United States Patent Application Publication US 2006/0134663 A1 - sequence listing, part 20

SEQ ID NO: 29041 - DNA, 1237661 bp, Homo Sapiens
aagcttaaatagtgttgcaagttttaatatgcctacttttcaatttttcaatactatttttactccaaagccatggtgacccacgctcgggtgggtcctgaggagaacaaagctctggttctgatcctaaccctaaccctgtcccaagactttgaccctgaacctaaatcctgatccctaccctggtccctaattctgacccttactttgaccctgactttgagcttgaccttgaccatgaccccacctctaaccatacttcccgccctgactctgaaccagatcctaatcctatccctaaccctattattatatttacaatctatgtctaatctaaccgtctagtgctaaatagctgtacccaaaggcacttttaaattatttaacttcttttccttgaattctctaaggacatcctaaaggagatgtcattatgtattttgcattccctctgagtggtatggcttcagatatgaacttctaatactttgcaagacataaaaagtttggagggtaacagcactgggttgttagggatgtatgttggcattcatggtagtcattggtgctgttctccaaatattttcagttcattttttatgaatgcattctgactcttccatcccacctacttaaattttctaatggccacatgagttttttttgttttgttttttttgccaatggaggtgagaagaaataacatgtgactttttcaggagaaatctccaagaaacagagttctattctgcatgcttttttctcttttctatagcaatggggatcttattgatggtccctccttccgtctggattcctgtgttaggatgacacagcacagagctacctctcacctgacccgtgatgagatgttttgtggcaacatgatctcaagataatgataattataaaaccctttactgacaaaatgtagatctccattttttcattgtaatttaactttgccttactttaagaacagtagtttgcagctccaaatgcactgattaaagacagacgtccattttctctggaaatgtatttttatgttcttactggatgtatttgctgttaatgtttgctactatgaagatacctgaacagtgtccacattagagaataagagaaagtaatgggcagattaaccctgtgcatctagacccgggaatcctttgaccctaccctccctgaaatggagacacagaggatggatgagaaaaactgagcagtgcacccatgatcacaaaaagaatgacatggaaatgtgcctcttcccatctcatgaaacgcagctcatcctctgttctttcaggcccttggtgaagagccaccccatgtctgtcccttcctcagtgtccacaccatgaggtctgcactgatctgggcttcccttctcatcactctcagtattagtgtgcattgtgaatcaggtccagctgtggctgctctgcatggggctgcagtcagtacgtttcctctgtgttcatgtaagtcctgttgaagcttactgatggagtcagagggggaaacattgtacagcccagcggttctcacagactctcctgcaaagcctctgatttcacttgtactggctacagcatgagcttggtccagcaggcttcatgacagggatttgtgtgggtggcaacagtgagttatcagggttactctccatgagtacaagtaaattaacagtcccaagcaacaccctttcaagtgcagtctaccttaaaatgaccaatgtgaaagccaaggacaagaccttgtattactgtgagtgacataggagcaggaacatctgcgtgagcccagacacaaaatcctctgcagggagacaggagggaatcgcatggtagatgctgattggaactaccatgtgtcgctcagaactaccaggaggtactcagaaccactagggggcgctcaggacaccaggggacgctcaggacaaccagggggtgttcaggacaccagggggtggtccgagccaccagggggcactcaggacaccaggggacgctcagaaccattaattccttgtaaatccatgatttttttacaaatgttacttccaaaacattaacttagaaccgggaattttttttttttgacaaagtctccctcttgtcgcacaggctggagtgcagtggcatgatcttggctcatggcaacctccaactcccgggttcaagcaattctcctgcctcatacttctgagtagctgccaccacgtgcctgccaccatgcctggctaatgtttgtacttttagtagagacggggtttcaccatgttgaccaggctagtctcgaattcatgacctcaggtgatctgccccgctaggcttcccaaagtgctgggattacaggcgtgagccaccatgcccagcctatttgaagttttaatgctgcgtgttttctgagtaacgctagcaatgatctgtcagaacaatttttaaaataggttatttatatattttattaaaatactattattaaaagagtaaaattgtaaaaattgcacctgcaatctcagcactttgggaggttgaggcaggcagatcacttgagctcaggagttttagaacagcctggcaacacaatgaaatcctttctatacaaaaaaaatagctgggtgtgatgctgcctgtggtcccagatacttggaaggctgaggtggggggatcccttaatcctgggaggttgaggctgtagtgagatgtgattgtaccactgcactccagcctggttgacagagtgagaccctgtcttaaaaaatgtgtatccttgatacacattgtttccatgaatagagtttagtgtttttgtgctgtgatactcaaacaattatatatgttttctaacattaactcaccatatgcatggtgttttgtttctttttctttcatcagctgaaagtggaatggaaattaaacaccactttaaaggctcttgttctccactttggttggctcctggtgtcctgtttttcagactatttctccatcttcccttttactttaaaagtcttttatcttcctcagtctccatgcaggaaataaaaattccctttactttctgtcctccaagtctggtgaacagtttccttctcttcataataactgaagccaaccaagtttaggaggataacagttctccttagaatatgctcatctacctgcagactctctgccctcctcacccttttctaaggtcctgcagacatcaccctcattccattccctcccttccctaagtacgacagagtgggctctgcagctcctgctgccttctgtgtgctcagccctggggctccctagtgcttttgttgcaggacgatcaaagatgggagagaccaaacagagttcaggagagtcctttattaaaaggtgatcacctggctcagttggactagcatccaggaaagtctgagccctggacaaagaaagcagccaccttttacacagtcagtggctgggagctacatgatgcaggaagcgtaattacagaacagagaacaaaggcagttatttgttacttcatgtcttacatccttgggaatacatggttctgtaacatatacttaacaatcttatgaccttgcagctgtgctggggaggtaagcaagaaccctctgagcctcaaggaatgtgaaaccaatgagaacagataaggctcactgagcacagaaggaaaaacaggcagttagtattctctaacttagactacgggggaggggctacacactacagtaagccctgaggggaaagttaattttctggctttacatattgtaaaattcataaattacttcttcactttgatgatgaagcccaaatccccatgtgcttacactctctcagaccaccctctaggaagctgccattgtgagtgagccctaaaaagcatgggctgggtttagcttcatattgctggatgttctctattataaaggcatgttggcaaataaagactacagtttgtattgaatattcatgccaaagaagtttttttcaaaacttttcaagtaaaaaattttatcttgcctagtttgaaaattaccatctaaattcaacaaataaggtaatacagttttaaaagtgatgcttgtcttattagttattcaatttattaacaacagactgatatttaaaataaataccattgcacatttaagtgccatactgttctgggattttttaaggaatcagagagaccgactctgttcaggaggatatttattatttaggttcaggaggatatttattatttaggtgcaccggccaagtcgaattaacatccaaaggactgagcccagaacagagttcagttaccttttaagcattttgtggggtgggagaggggacatctgtgcagggtgaagcatactacagaagtgagaaacaaagacagttattcaattgaaacatgtattacatcatttcttccttttcaaggaaaaacatgttttgcgacttgagtttatctttctagtgaccttgcagctacactgctagggaatcagggtcttcaaaatgcctgagaagggaggagaggtaaggctcattagccacagaaaaacaggcagttagtattttaaaggactccagctctttctctttttcagggagaattgggttttcttacatacaactgagtttctgcttacacattctttaatttcttttaattcctgtttcaatacttgacaagaatggcatttacatacagttttaccaaaacatgtatttaaatatatttgtctttttaatattggaataggcagacatacacgtagatcagcattattttgtactaaaatctcaaactgcaaacacaatttaaattcaattaaataattagaataatatgaaacaaatgggtgtgttgttttggtgtttacgtatgcattcacttttgcatgggcacatgtatgagtctttgctgggctgttgtgcacgtatgtgtgtttgtatgaccaggaggttttcaaatacatcattaaattacatagttatattaatcttggcaaggcacttgtattctgttttctttaattctgtttgcagaaagtagacacatattcagtcttagttccagtgtagggagtgcttttcatgagaaaaataccagaaaaaagggcaaacatggggcccactaatgtaaaaattagccacaatgtgtatgtgtgtgtgtgtgtgtgtgtgtgtgtgtctgagttgaatagtagagttggagtgggcttctatccacatgcacctgcgcctacaggtattatcaggtacaataatcaactgcagaaccctaaaggaaataagagtccccccaaacccctgaagagtgtttgggttcaccatgtgtccaatgattcagtgcctctcgagctccaggaaacggctccctggtgatgcgtgagatcttttcttggggtgtccctgcagagttcgctgggtttcctaaggctgattcactatttcaaaagatggtgtgagaagcatatggtgtaaataaagcagaattctgagccagggcacagccactttatactgggctagagacactggtaggaatatactctgtcagctcagatagaaacctccctgcagggtgggggcagggctgcagggggcgctcaggacacatcgagcacagtcttctgccccagagcaggtgcacatgaggctggggagaggttcctctcagggcctgggacttcctttaaaaatatctaaaataagtatttcacaaggactgctgatgtttgtataaatatcctattcaattgtgagcatttatcaaactggatgttgtaatgagaaccacttttataatggcgatttcaaactctgctagttatcttaataatagcagctggaggtcaggaagagattattacttataaataagtgcaatttttggagagacacactcattcccaaaataacacattcacatattaaggtctagaaatggttcacgttgcccctgagacattcaaatgtgggttcaaagtgaggtgctgtcctcggggagttgttccccagtggaggaagcgctatcaacacagagttcagggatgggtaggggatgcgtggcctctaacaggattacgactcgaaccctcagctcctataattgtgtcgtccgtgtgtcatggatttctctttctcatactgggtcaggaattggtctattaaatagcatccttcatgaatatgcaaataactgaggggaatatagtatctctgtaccctgaaagcatcacccaacaacaacatccctccttgggagaatcccctagagcacagctcctcaccatggactggacctggagcatcctcttcttggtggcagcagcaacaggtaaggggctccccagtctcggggttgaggcagaaaccaggccactcaagtgaggctttacccacccctgtgtcctctccacaggtacctactcccaggtgcagctggtgcagtctggccatgaggtgaagcagcctggggcctcagtgaaggtctcctgcaaggcttctggttacagtttcaccacctatggtatgaattgggtgccacaggcccctggacaagggcttgagtggatgggatggttcaacacctacactgggaacccaacatatgcccagggcttcacaggacggtttgtcttctccatggacacctctgccagcacagcatacctgcagatcagcagcctaaaggctgaggacatggccatgtattactgtgcgagatacaccatgtggaaacccacatcctgagagtgtcagaaatcctgatgtgggaggcagctgtgctgagctgaggcagtgatgcagcagtttccttaacttccatcttatctcattttgcatcgacatccacctttatattagccaagaatgtggaatagacgggtgctcataagagatccttaacttgcccattttaatgggttttccagaagatgtgagaagccactttgttagcaaagcatgccaaagccatgccctgctccagacacatgtgagcccatttcctgctctttgcttaactgacaagctctcatcagtgcacctgggctaatttcacatcaggtacaggaatatgttctaaaggaaagctaattttataatagcaattcctgcttaataaccttcagcttcattgtttttgtgtaatctatcaacaaattatgttagttcaaggttctcaatgggagtttctaataaatagaagggatgtatagaagttcccctaattaaaacaattgtgaacacaatcttggtattcagctgtgtctccacccttcttaccattcaccacaaagtaattctcacttctggaagctgggttcattttcaaattagttttttttttcattttaatatctcaaggttattgtatgtgactattttagcagaaattgaattttgggaaattgaactaaccaactgaaaataaattcacaactaaataacaagatgccagaatataattggctccaggctttgttaattcagcagtttatctacctaggcattatatttacacatcttcatgctatttttacagtcaactcccattatgtaagaaatggtcatacaccatttcttacatatggtaagatatctacgatggatattcagaactacgataaacattggatgcatccaggtttgtctgaactcactgagattattacactcagctgctgtttcaatgtgtctgaaggtataaatgacaattcgaatgacttgggtgtgtggatggttttacatgagtctttaagtgtagaacaatattgaccctgttccaaaatctgtccttgatccatgatcacactcatctcccagaacagctccttcaacacatttcctatctggatgaagaggactctgtgcttggtgaggggaggccacaggtagagaactgagttctcagagggcacagccagcatcctcctcccagggtgaacccgaaagactgcggcctccctcatcccttttcatctctccatacaaaggcaccacccacatgcaaatcctcacttaagcgcccacagggaaaccaccacacatttccttaaattcggcgttctgcttacacgggaaatgctttctgagagtcatggacctcgtgtgaaaagaacatgaaaaacctgtggttcttcctccccctggtggcagctcccagaagtgagtgtctccaggatgcagatatgaagatatgggaggctgcatctgagcccagggctcacagtgggtctctgtgttcacaggggtcctgtcccagtgcagctgcaggagtggggcccaggactggtgaagcttcggagaccctgtccctcacatgcgctgtctctggtgactccatcagcagtggtaactggtggagctggtccgccagtccccagggaaggggctggaatggattggatacatctattatagtgggaggagctactacaccccgtccctcaggagttgagtcaccatgtcaatagaaacgtccaagaaccagttttccctgaagctgagctctgtgaccgcagggaggcggagggggcgggcgcaggtgccgctcaggaccagcagggggcgcgcggggcccacagagcaggaggccgggtcaggagcaggtgcagggagggcggggcttcctcatctgctcagggctctccctcctcgccagcacctcagctgtctccagggctcctctttctttcttatctgtggttctgcttcctcacatccttgtggcaggcaagaaaggaggacgacaggcctggtgcggtggtgtatgcctgtaatccccgcactttgggaggccgaggcgggtggatcacctgacgtctggagttcgagaccagcctgaccaacatggagaaaccccgtctctactaaaagtacaaaattagccaggcgtggtggcgcatgcctgtaatcccagctactccggaggatgaggcaggagaacggcttgaacctggggggcggaggttgctgtgagccgagatcgtgccattgcactccagcctgggcaacaagagcaaaactccgtctaaaaaaaaataaaaggaagaagacaaattttcctcttacagtcgaagtatcaacaatactaggaactttcctacgagttcctgaatggccccttttttccttcttgattaaaaaaaagttctaatgcttctcaccatctctttatttgtgtcgtcaattgaattgtgccctctttgaaattcatatactgaaatcttgaatccagtggatctatattggaattttaagtatataattaaggttaaatgtggtcatacgtgtgagaccctaaagcaatagacatgttgtctttataagaagaggaagagacaccagagacctctcacttttcacgtgcacatagaaaggaggccatgtggacacacagtggactagaaggtggccctgggcaagccaggaagaagccgcaccaagaaccaccctgccagcaccgtgatcttggacattcagactgcagaattgtaagaaagtcagtatttgttgtttatgccacccactcctgttgtcttcttgtgaagacccacacagactaatactacataactctgttagctttgtctcctagaaggagaagcaggcccctgaggctgggcacatctcagatttccatataaagtaggcaaaaatagtaactcttataaaaaaatgtgtcaaggccctttctttcttttttttctttgagacagagtctcgctctgtcaccaggctggagtgcagtggcacgatctcggctcactacaacctccacctccagggttcaagtgattctccttcctcagcctcccaagtacctgggactacaggcacccgccaccaaccctggctaattttttgtatttttagtagagatggggtttcaccatgttagcaaggatggtctcgatctcctgacctcgtgatcctcccgcctcacctcccaaagtgctgggattacaggtgtgagccaccattggccatttttggtggaaaggtctctgaaaccaaccctggtgtctgtgccacaaaagttgtcttttatcttttatttggacataacaaatggacagtgagtaccacctggatggagactgaccactgaccatcttctgctgtctcctaagtatgtcaaagaaaaccacatcgacatcactatttttcttcaacctcctcgaatgaactatagaaatgatccctgaaagtatagtctattccttcaaccttctaaatttgcactaaatctcttcctaaatgagagctacagggggtctgagttttattcccttctttccagttttccccaagtacaaagagcagaatagactttcagtgaaatttggctgacaatgcccctaacaccacatcactttctaaaacccatatcctgcctccatccttctctggacacccctcatcgggctacccaggaatggccagaagctggcatcagcttctgggctgaggccacgagctatacacacatgtgatttcagttacacagactctactgcaggaccacacctgtgttctgaggcactcaggcacctgctgatctcagtcattctctaataaattacacacctcttattaataaaggtccaaatggtcccatcagctgcagagcagtggagtaaagctcatgggtgggtccgtcaggcagaagtcagacaatgggatgggtaggttggtcacctccattgtcactgaggttcccagtggattttaacagaataaaacaatattaacaacaaagggatcttgaaagtatttaaggtccaggaattttgtttggggggctagagaaagacatttttaaacagaaagccctaaagcacatacagcagctgacagagtggccactgtgcacatgacggctgaggagacagatggtaggggacattcccccaagatgtccctgggtgtgtgatggttggactcctcatgcatatgaaaataagagctggactcaggtagaaacaagggccataccccataggaaaggaagaaaaaaacagatgggcaaccctggagagagctcattagatttggtaggtttgagatgaaaattacttccatggattttaatgttctaagctaagtaagaatctcttcaataaagtgagaattaaaaggagaatggagctaggagttgagagaggcaacaaataatgagagagcagaaagcaaatccacaaaaaactgtcacatgacagaggccagaatggagctgatgcagctgcgtcatttcctacagacctagttgaccatgtggagaagaggcttgaacaaatggggacgttctccaaccttccaaatcagccttcttcttaggcttgagtagtaatcatggttctgagggtgaccttccaaattttcctgtctgtacctcttccaccaggggtagagtgtcttcccaaccataatggtttctctccagtgtcctcagcttctcctcctttgtacttaccctgcagattaaggatttcttctagatggagtttcctgggaatcctctgttttcttttgtttctgttgactccaccacaccccataggtcacaggtttgattggatttcccctggagacagtggaggtggatccaggcgttcaacagtcctcgctgttcttcccttcctgtcagcaccacaggacagcagataagggagttgactgtggatttttcaaattcctgggaaaagcctgcaaggactagtagattcacactctaataccattagcacatgcatccaaaaaaaatcctcactaaatatttccaggttagcctgttcctctctcaatgccatccagtggcacctgccctgggttcactaacatgtgggccccagtcctctctgcaggcctctctctcctcacatttcagtcttcttgctttctctgtgaaactaactcacaaatgttacaggtttttcttcttcctttattcacagtttttcaggtttgttgttaatgaggacagaataagatcatagtttcctcatttttcacattcccacactgagtagatttctatataaaagccagaaactaagagaacaaatcaaatatccatatccattacaggtgaatgttaaacaatttgacataagattatgaagtaaagtacaatgcagcattagaatcaaggcatcctcattcacataaagtcatggctacattcacaaataactgcgctgagtggaagtagctaaagtattaacagtgcacttcataaacttctatttgtataaactgtagaaggtaaaactattctaaagtaacagagaagagaatttggtgagaattgggtgttgaaagtaatggggtgttgagatgaaattacagagaagtgacagaaagatttagaggttaacttaattgcacacgacttaattgaaaccctgattaaagggttgcacacatacattaacatattccaaattgtgcagtatatatttgaattaattatttgttaattttgtacttaaaaaagcagtaacaaagaaacaaatgaatgtgttggttgaggaggagcaaaaaatagatggctattaacacttgaaacatcgctgacttttgaaagtacacatgtatgaacactggttctctctatatatatttcagataaacaacagaatacactaaaagaaaacagagatatcctggcaggggtggaatcctgcaaacctcactaggcatgtcccacactgccctggagttgtctcaggggagcagtcttctctagtggtcagaggcacaggcatggataatgggactaattctgtccagctgtgtgatcttgaccatattgtacagccactctgttctgtgtgtaatgtaaattccttaaaatgtaacattgacacttgcattaaatgtattctgcaaatatgtagaaatgaaataagatgatgactgctaaatagttatcaaggcatgatcacataatataaaatgatattttcctgagtgataagatgactaccaatctcccccaaggcactttgtctgctctgacccctgcccctcctcaggattcccatcccagagcttgctatacagtaggagacatgcaaacaggtttctccctttgttgatgaaaaccagcccagtcctgaccccgtaggtttgggagagaagccccagccctgggattcccaggggtttccgttttgtgatcaggactaaagacagaggacccatcatggagtctgggctgagctgggtttcacagttgttattttaaaaggtaaaccagagaaatagagtgtgagtgaatatatttgagagaaacagtggatatgtcaggcagtttctcaccaggatctctacgagtttacgggtgtccagtgtgaggtacagctggtggagtctggagaggacccaagacaacctgggttccctgagactctcctgtgcagcctctggattaaccttcagtagctactgaatgagctcggtttcccaggctccagggaaggggctggagtgagtagtagatatacagtgtgatggaagtcagatatgttatgcacaatctgtgacgagcagattcaccgtctccaaagaaaatgccaagaactcactgtatttgcaaatgaacagtctgagagcagagggcacagctgtgtgttactgtatgtgaggcaccaggtaagaagacatcagtgtgaacacagacacagaggttcctgtaatgataagggaggaggctgggataaagggagcactcaagacccacagaaaacaggggaagctctagggcaggtgcagacggtcgtcatgggctactttccttcagggtctgtggctttctctgcatccaacagttcccctgggagcctcttgacatttatgtttctgtgcccatccctgaggtctctggattagaaaaatttattataagaagtggaaacattctcatttgtcccaaaggcagatgtaagtaatggaggcataaaaatgcacaggaggccagggaggctgtagacactgccaccccagaatgtcaatctcaccactagtgctggagaagagtgggagtttgatggagcttacctaaataccctgggtccaagctaagttcagcgaggccactggtgcctcccagagctcagttgtccatcaggaatctcccatgtgtcccagcagcagccatgcctcagtacttccgctgtgcacagccattgtctgggaggagctcccaggttgggtgtctttggcacacaccaggtgacaggtgttagagtgcagtgcagcagctggctgcctggtctattgggctccctgatgttggagagatgggaggtggattctcagggccagcacccagtttgtgaatttttatataaaaaccatgattttacttcattttctcagatgacatagataattaagaacagagtctggtccggacgtggtggctgatgcctgtaatcccagcactttgggaggccaaggcgggcagatcacctgaggtcgagagttcgagaccagcctgaccaatatggaaaaatccatgtctactaacaatacaaaattagccaggcatggtagcatatgcctgtaatcccagctactagggaggctgaggcaggagaatcgcttgaacccgggaggtgaaggttgtggtgagccaagatcacaccattacactccagcctgggcaacaagagagagaatccatcaaaaaaaaaaacaacaaaaaaaaacagactttgcaaaataatgttcaaccttatcccaaattcattgtttcttaattctgtgcagcatccagacatattattaccttcctcatgatgaattgttctgtttaaactgagatcagttttttctcatattctttggtttctgtctaagaacagagatcttgattacagtaaggttggttctttcctcatactaaccctcacctcccccagagaaagagcagagattgtcctcactctgagtctgagggaggagctgttcctgtacaactcagagcctgcagagacccccaggtgcagcttcagtgagtcagacatttctccatgtgggtgacctccactgccagtgattgctgctgaggtctaattgtgggttaataattaggacacccttcaggttgtcacatcccaatcctattctgaacatcaccattatcatagacagagatagttcaatgcccattctactgacataagtttctctttataatttggttccaactatggagaaaaacgtgaccctatatttgtctgaatctaacctcagaatctgctgcattgctctaggagattcacaaattgaacacaagtgagctgtttattctcataaaaatgtacatatttgagaatttcaatgtattgcccagaacctgtgcatgccaacaactgtgtttctcagcgcactcttggcctggtgaagccctcacagaccctctcccttacctgcgctgtgtctgtgttccccgtgataacgaggtcttcctgctgaagctggatccatcagccccccagggaagggaatggagtggattgggtgcataggtcatgaagggagcacacattaccacccactcctcaagtgtccagtcaccatccccagatccgtgtccaaaaaagcagttcttcctacagctgagctacatgagcaacaagcacatagccatgtatttttaagccaaagacacagtgagggaatcacagtgtgagctcacacccaaacctccctgtgggggtgcataggacagaaggggttgctcaggtccccagggggctctcaggacaccaaggggcactcaagaccattgtagaggcacgcaggtcagccgggggctctcaggaaccatcgaggaaaatcaggacaccagagggtgctcggtacagcagggggctcaggaccattgtgaggactcagaaagagcaggttcaaggctcagccttagggcaggtgaagctgggatgaaaaggggctggatgaggggttttgtgtcaccatcatatttcaccactagacaccctccactacatctgttctaatgcatgttctaacacatgtgagtgtttgtatgactagaaaatgatattttggggccaggtgcagtgactcatgcctgtaatcccagcactttgggaggctgaggcgggcagatcacctgaggtcaggagttcaagactagcctggccaacatgatgaaactccgtttctactaaaaatacaaatattagccaggcccagtggcacacgcctgtaatcccagctactcgggaggctgaggcaggagaatcgcttgaacctgggaggcagaggttgcgttgagccaagatgtgccactgcactccagcctgggcaacagagcaagactccattaaaaaaaagagagaaaaaaagaaaatgatatttatatcaatatataaccatagctaggtgtgtcaagttgtcctctccatctatgtcagccttgtccataaggactaattccctgtaatttcttgaggacctcataaactgtggtcaattatgtaatattcctctcttttttctgccttccttcctgccttctctctctcacacagaaactgacgtacacccaccccacaacacacataaatctataccttttattacctgatgtatttaataaacttgattaatgtgcagcttttcaagcttagttgcttgtgaggttgtaagaataagaaccattttttcaaagggaatgcttccagtttttgcccattcagtatgatattggctgtgggtttgtcatagatagctcttattattttgaaatacgtcccatcgatacttaatttattgagagtttttagcatgaagggttgttgaattttgtcaaaggctttttctgcatctattgagataatcatgtggtttttgtctttggctttgtttatatgctggattacatttattgatttgcgtatattgaaccagccttgcatcccagggatgaagcccacttgatcctggtggataagtttttgatgtgctgctggattcgttttgccagtattttattgaggttttttgcatcaatgttcatttgacaaagggctaatatccagaatttacaatgaactccaacaaatttacaaggaaaaaaaaacaaccccatcaaaaagtgggcgaaggacatgaacagacacttctcaaaagaagacatttatgcagccaaaaaacacatgaaaaaatgctcatcatcactggccatcagagaaatgcaaatcaaaaccacaatgagataccatctcacaccagttagaatggcaatcattaaaaagttaggaaacaacaggtgctggagaggatgtggagaaataggaacatttttacactgttggtgggactgtaaactagttcaaccattatggaagtcagtgtggcaattcctcagggatctggaactggaaataccatttgacccagccatcccattactgggtatatacccaaaggactataaatcatgctgctataaagacacatgcacacgtatgttatattgcggcattattcacaatagcaagacttggaaccaacccaaatgtccaaaaatgatagactggattaagaaaatgtggcacatatacaccatggaatactatgcagccataaaaaatgatgagttcatgtcctttgtagggacatgggtgaaattggaaatcatcattctcagtaaactatcgcaagaacaaaaaaccaaacaccgcatattctccctcataggtgggaattgaacaatgagatcacatggacacaggaaggggaatatcacactctggggactgttgtggggtggggggaggggggagagatagcatcgggagatatacctaatgctagatgacgagttagtgggtgcagcacaccagcatggcacatgtatacatatgtaactaacctgcacaatgtgcacatgtaccctaaaacttaaagtataataaacaaaaaaagaaaggtgagggagatactgtgagtaaagagctcgcttggggtctgcaatgtagtatggcttagtcagtgtgttagtgctctgtcctcttctttctgaaatcacagttcaccatcacctccttattttctagaaacacctggaaatagtgaaacttttttacttcccttatatttcatattagtgctatacccagggatcatcagttaaccacaatgacagtgacaaaaagctgccttcatattttctcccaggagaattttggctccaagaatcaaggctttaataggattcaggagaagtcagtgatcacagggcagatgcctcaggtttaaagtcacatcaaaccgagtgtgaaccttctgtaactcgcaactgtgctaacttttggaggtttcttgaaaaattctagtcagtttgggttaaagaatggtttcagtaatgtcacactcagggtcatgactgctcaactggtcattagccctgggaagtaacttccgctaacattggcttacctcataggagcttataaattgccatcatattgattatctcattaggtcatcaggatcctgagagaatgatcttttaagaaaacaatctttttatcaggcttatttatcattgcttctatatgctgctcttgtcctgcagaggaggcagcctggggtcaatcaagatactgggtatttgggttcatactttaagccccccactctctcatggtctaacttcagacaagtcacctctgctttttgagcttcacttttctcagccaccaaatggatgtagagataatatttgcttgcccaattttgaaatgtaggacggggcatcattaattaattagttcttttgtccacaaacatttacccagctccagcatgagcccagcctatgcttggtcttctgcagaacagagaaatgccttagaaggagattctgactctagtcatccacgctgtagttaaagaactgtgagctgggagggtggggcaggcgagggggccttctgatatttatgtctcatctttccctgaaaaaatactgtgtttctactttgctgcttgtattcattcccaacctattactgttcataaaatgcataaggtttactttgactccaagtttatttttattaattaaaatattccatgtttatcataatgagggtgattctcattaaaactcttttcattgccttcctgactaaaagcaagtacatttttattttaataaacataagtaacacaataaaaaaaaaagaaccatgtgtttcccagctgtgtacctctctaagctgagtagcatcagcttataatacccagcatgaaaaacaactcaaatgtcagtcatcagcttaattggtaaagaaattgaggaaaactcatccattggcatattacccactactacaagcaactaatgttggctactgtcaacagcatggcaaaattcacaagtagttctcataagtaaaatgagccaaacaaataaaagtacttacataagatacaacttttataaatttcataaaatgaaaagtaatctaaacttacacaaaaatcagtagctcactgtgaatattgtaggaaaagggaaggtctaggaaggagaaattacagaacaagagaaaattttaaggaaattgacttgttatctacgttgataatgattatgtttgggacaatattagtaaaattgaacacttcataaagatattttttaatttaacctaattaaagatagcactaattataacatgtattatttggtagaaaaggagttagacagagataaataaaatacatgaaatgtcagagacacctgaaatacacagcaacgagccctaggcatctctgtatttttagagaaacattagaatacagcaaaataatggactaattctacgacattaagaaagtttatcaaacccaccaggcatgttgtattagttcatcttcacactcctataaagaactacgtgagactgggtagtttatgaaaaaagaggtttagttgactcacagttctgcacagctggggaagtcacaggaaacttacaatcatggtggaaggtgaaggggaagcaaggcacgtctcagatggcagcaggtgagagagagagagagagaagtgacatacacttttaaaccctcaggtcttgtgagaactcactatcatgagaacaacatggggaagctgcccccgtgatccaatcacctctcacttggtccctcccttgacatgtggggattacaatttgagatgatatttaggtggggacacaaagccaatgcatatcatatgtccagctctatcctggagttgtttcaggaatccagtgtgtcctgttgatagaaaccgtgacactgagctcacagcatcagtagtatttgacaccatgcaaagtcaagagatctcaactgagatttagtgtggatgttttgtctgatgaagtcgtacactcagagcaagtgaatatggagaggtttattatctgcactgtagaggtgtctgctgagagcagggcagttctctcaggactgtctaaaatggcttggtaaaggaggaatggagactgactcagggtttttataatggtttggtggtgggggcagagtgaggcttcccactcacagaaaggggtttatagggtttgaaactcccaatggcatcacatgaagaagctcctgtgattgcaaactagattcaccttgtttgacaaaagaggagatgatagaggagtgagccttaagtcctcagcagtcatgcatcaaaaatattgtgacaacttattctatgtagcaagaataaaaataatgaataagcaaaaagataagggttcaatgcaggtggacaacatggaggtctacaggaatgcaatgactttataaatataagcaaataatattgagaaaaaggaggaggggttggggaattagagaggggtcctggtctaatgtcttgggtagaagcttctcacaacaaaggactatcagcttattctgcaggtcttaggccagctatctgcttaaaaacatccaaaaccccagagaatctataaggatgctcagtttaatatctcctatttgagtagctttacagttgtgtggaattctttattgattcttttttatttgtttttagagacaggctctcaccctgttgcacagtttgaagaacagttgtatgatcaaagctcactgtaattttgaacacctggctcacataatcttcccatctttgcttcctgagtatctagaagtagaggggaacgccacccctcacctgcttattctttaaaatattttttcagagaaatagcatctctttatgttgctcaggttggcttcgattgcctcgtctcacgggatttccctcatttttgcttctgaaagtggtgtgattatagcgatgatccactgcatctggcctgaatttattctttagttgtaaaacatgaacccaacaattaactgcctgaatattttctgcagcgagttagttaaaagtatctgataagattccttccaatatgattcaagaggagtattttctgctgatgttccttccaatttccttgctgaagatcacaagagtctgtggaaaagatgtaacaaaaaggcagcctcaaactcttcatgattggagtggatatcacacaggaatcactttcagtattttgtaacacatgcatgcaataggacaaagatgatctctgggggtaaactctataaacgtatgggccttttagctgccaagtcatagggtaataactgatgcaccctgaggagtggaacatgattccatagtgctagtgggagaacctttggccaagggagttttacattttattaaagatttgatcatttttatgtagagatgccatttttaaaacattcctagaagattgttgagtaggattcattctgtcttatatgaacaatgataatgctctccatggttagataatattataaactagattgagctagagcgtttggtgtatttaatcactttttttagcttccattagcatttggattaaatgaaaatcataacaaacagtctctcagaccacagtgcgatcaaattagaactcagaattaagaaactcattcaaaaccacacaactacatggaaactgaacaacctgcttctgaatgactactgggtaaataatgaaattaaggcagaaataaacaagttctttgaaaccaatgagaacaaagacacaacataccagaatctctcggacacagctaaagcagtgtttagagggaaacttataggactaaatgctcatgagagaaagcaagaaagatctgaaatcgacaccctaacatcacagttaatagaactagagaagcaagagcaaaccaattcaaaaactagcagaagacaagaaataacgaagatcagagcagaactgaaggagatagagacaggaaaaacccttcaaaaatcaatgaatccaggagatagttttttgaaaagattaacaaaatagatagactgctagccatactaataaagaagaaatgagagaagaatcaaatggacacaataaaaaaatgataaagaggacatcaccactgatcccactgaaatacaaactaccatcagggaatactataaacacctctatgcatataaactagaaaatctagaagaaatggataaatttttggacacatacaccctcccaagactaaaccaggaagaaatagaatccctgaatagatgaataacaagttctgaaattaagtcagtaattaataatagcctactaataatattattaatagtaattaataatagccaactaaaaaaagaccactaccaggtggattcacagctgaattctaccaggggtacaaagaggagctggtaccattcctcctgaaactattcctaacaatagaaaaagagggactcctccctaactcattttatgaggccagcatcaccctgataccaaaacctgtcagagacacaacaaaaaaagaaaatttcaggccaatatccctgaagaacatcgatgcaaaaatcctcaataaaatactggcaaaccgaacccagaagcacatcaaaaagctcatccaacaggatcaagtcggcttcatccctgggatacaagggtggtttgacatatgcaaaacaataaacataatccatcacgtaaacagaaccaatgacaaaaaccacatgattatctcaatagatgcagaaaaggcctttgataaaatccaacaccacttcatgctaaaacctctgaataaaccaggtattgatggaaagtatctcaaaataataagagctatttatgacaaacccacagccaatatcatactgaacaggcaaaagctggaagcattccctttgaaaactggcacaagacaagggtgctctctctcaccactcctattcaacatagtattggaagttctggccagggcaatcaggcaagagaaagaaataaagggtactcaaaataggaaaagaggaagtcatattgtctctgtttgcagatgacatgattttatatttagaaaaccccatcgtctcagcccaaaaactccttaagctgataagcaacttcagcaaagtcccaggatataaagtcaatgtgcaaaaatcacaagcattcctatacaccaataatagacaaaaagagagccaaatcatgagtgaactcccattcaaaattgctacaaagagaataaaatacctgggaatacaacttacaagggatgtgaagaaccccttcaaggagaactacaaaccactgctcaacaaaataagagaggacatgaacaaatggaaaaacattccatgctcatgaataggaagaatcaatattgccaaatggccatacggcccaaagtaatttatagattcaatgctattcccatcaagctaccattgacttccttcacagaattaggaaaagctacttaaatttcatatgggaccaaaaaagatcccgtatagccaagacaatcctgagcaaaaagaacaaaactggaggcatcacgctacctgacttcaaactatactacaaggctacagtaaccaaaacagcatggtacttgtaccaaaacagacatatagaccaatagaacagaacagaggcctcagaaataacatcacacagctacaaccatctgatctttgaaaaacctgacaaaaacagcaatggggaaaggattccctattttataaacagtgctgggaaaactggctagccatatgtagaaagttaaaactggatcccttccttagaccttatataaaaattaactcaagatggattaaagacttaaacataagacctaaaaccatacaaaccctagaagaaaacctaggcagtaccattcaggacataggcatgggcaaagacttcatgactaaaacatcaaaggcaatggcaacaaaagccaaaattgacaaatgggatctaattaaactaaggagcttctgcacagcaaaagaaactaccatcagagtgaacaggcaacctacagactgggagaatgtttgtgcaatctatctatctgacaaaagggctaatatccagaatctacaaagaacttaaatttacaaggaaaagacaaacaatcccatcaaaaagtgggcgaaacatatgaacacttgcttctcaaaagaagacacatgaaaaaaaaagctcatccttactggtcattagaggaatgcaaatcaaaaccacaatgagataccatctcacaccagttagaatggccatcattaaaaagtcaggaaacaacagatgctggaaaggatgtggagaaataggaacgcttttacactgttggtgggagtgtaaattggttcaactattgtggaagacagtgtggcgattcctcaagcatcaagaaccagaaattccatttgacccagcaatcccattactgggtatatcagcaaaggattataaatcattctactgtgtcttacgtgacacatgaacacatatgtttattgcagcactgttcataattgcaaagacttggaaacaacccttatgcccatcagtgatagactggataaagaaaatgtggaaaatatacaccatggaatactctgcagccataaaaaggatgagttcatgtcattttcagggacatggataaagctggaaaccgtcattctcagcaaactaacacaagaacagaaaatcaaacactgtatgttctcactcaaaagtgggaattgaacaatgagaacacatggacacagggaggggaacatcacacacaggggcctgtcacggggtggggaagctaggggagggatagcattaggagaaataccaaatgtagatgatgggttgatgagtgcagcaaaccaccatggcacatatatacctatgtaacaaacctgtacattctgcacatgtatcccataacttaaagtataataaaaaatagtaactcaaaaaattatgttaatcagttctctagtaggtagaaattcatctgggagtttcttctcttgtccattttgataggatctgcagaagacataagaaccctctctgttaaaaatattcctaagttgtacaccatctagaaacatatatacttaattataatttttaatttattaaaaagctttaataagtgcaatgttttctgccttctgagttgatttcataacacatagaaggatatatcctgaatgaaactttgtactagtaatacaaattaaaggttaataacctctacttttattattgaggtattacccaccaatatataatcttaaatcagtgctctcaatggggcttttacctaaataatataaaaaatattttcctgatcttgacacaaaatagatgtgaacacattcttcatattcagccatgtctcctgtctattacattatgaaccacatgctaactttgatttacttgggacttgttctaatttcaaactagttattttttatcttcatgcagctagattattatgtgtgagtattttatcagagagtgataaagataatttaaacaagtaattgtgtgtctcaggactcttcttgggttctgagacaagaaatgccattactacctgaaggattgagacaactttgaaaatgtcagaggaatcatctctaattgcttctaaatttcagttttatcaattcttatgctttctgaattatttttgattttagttattaaaggattctttctttttctcttaatctagctaagaatttgtccttttttaagaaaaaactcttaggtttgttgatttttctattgcttgtaaagtcttttttcacttatttcatttactctaaagcctcataaacacattggtgacaggtagatggagaacttgattgtaaatgccctgtttttgttagacccagctgatcatgtcaggaagccccctgaggggtctaggagctgactgtggctcccaccactggacaaggatgagaacctccatgctttggggatgggaggacatgcagggcagtgtgaggggaggagggttgctggcaggtccagcattgcttcccctggctgcaccactcatgtccttcctcactcagagattcagtcatttcttcccaggtggaaaaatcagttaactttatctttgatatatggatgggagcccaagatagaggcttgtcagtcattatttctgtgcctgctgccttgggaatgtctgaatttctcatgctctgtcctgggtctataccccagtggctcccctactccatggcacccacctgtgcctgtgcatggcccctgatcacagcctccgtgaaacatctggtttggctcaggaagaaccctccctgccttgttttcctgctgtccctggtccacatccttctccatccacaggctctcagtggtgcctcccatccacactgaccctacgtgggttcatatcttgtccaccacttcctctctcttttcttctgcatcttgctttttattccaacagcctgtttccacctcacctggacttatgtacaggaaagtgtttactgagcaggcttgtgttgtgcaaaccctgaagattactgaaaaagtgctttctcaagccacatccatattcagctcctgggagatgatatctgcttttttggcatactcctcctggaaatatttttaaaccattttattaaggtaaggattacatctataagactatacgttatttaacatacttaattcattgagttaagtatgcaaagttaccatcaccatcaaggtcataaacatagcaatgacttccaaaacattcctctttattctttttattcttagtattatgattattattattagttgaaatgtatttttgcttgtgtgtctctgtctctgtgtgtgtagcctgggtgcacactatgctagctgtttccataatgacttatggggaatgcctattattgctgaaggggccagcgtctgagcactggaggtcagttatgcaggtgccacacacatctgtgatgggccccaataaacagcactgggcaccagcactcaggtgagcttccctggtggacaatgcttcacacgtattgtcatgcatcactgctgggagaactggggacaagagacttctcagggaaagaacacctgggagcttgtgcctggattctcagggccttcccactggttcctttgctcattttaattcatattcatttgctataataaagctgcacccacgagaataacagcttgtcttgagtcctttatttgtactgattatggggcctgaggatggtcttgggacactcaacacaattacatcagaggtgtaaattgctagaaagaccctgactactgacacatgtctatagcatttataatatcaaaggatgagaaagtgtaggataaaagacattcagtgcctggatggctatagaatcacatggcatgagatgatgtgtgcactccaataaggagcaggaagtgaaagtaatccatggaatttagaaacgacggacacagctccctaggagttgttccctgaacaagaacaagtaaaaataatgaagaacaacctgagtatgcaactcatatctgtgatagctaaaataatagtaaaaagatgcacatccagccctgcagtgtgccctgtgagccaaggctgctagactcccattcactgccaaagggtacagttgtccagaaacaacacacaacacacaagagctacacagatggtagcccagggtttggactggggaggggaatccacttgacaactagaacagggaggatagtgtggaaagtggcatcattttgtgatatgaatgatatcattaatagatatcatcagatcgtgaacaacattagccaatggactaggagactgactgatgtagcagattctctttggcttcatgtgttgcataagggaggagcatgtttgggaagatgctggacccacagctcacaatagacacatcacagatggctctagctgatcccaacctcaagtaggatgcttctgatgggacagctttcctcaagcactggatcccgatcatgtaaagtttctctaccctgagaatgagactgccctttctctctttaaaatgcaaagtgggctctccagatgaggagcccaatgctgtatatggaagccatagtgctatgtgtttatgttgataccgacggtcattgcttagcatgcatcttatccaggtcctgctgctgtgtgtttctgttgatgctgctggacattgcttcgcatgcaccttacctaggtcatggcctgtgctgtgataaagagaagtccttttgcttctgcaccccaggtacaactcctgtgagcaatctggcaaatattttagaaactgtgtagtttgtattgccttgtcttttcatttgaatcttttagatgataaggaaatgagagtggttcacaagataatggggcagacacaggggatagttaagggcctcctccaagcaatgtggatatcataaaatgaatgttaaaaaatgaaagaactaaacaagaaggtgctggggttgacacaaaggacttaaaacagaactaccaggagttgggtgcagcaatggcaatcccttcagttccatcagcaattcagagacctaaacaaatattccctatttatgttgaattggcagactgtagaaatgtagaagacaaaatgaccagaaaaaatgtgtgatttggcatgggtgaaggtctggcaagttaatcaagttgaggactgttgaagccctagggtggtcctgcctttgctgggtgcccagaccataatggcactcatgggaaattgccagcaagtagaaactaggtgttttttttttttttgtagttcttattatcaggcatatgtgcatttgaattttgtcttcatagcatttcctggttctatttctcattttttaaaacacacgtgatttcatctagatttatcaccttcacagggtcacagagaagggtaggaagaagggaggccctggtttgggtcttgtaggaccatggacaagagtgcggagggacaacagggggttgtaagacattattaagaccttattctgcctctcccaagaggctcagttcagccgtttttctgcagttgcggttctgggttataaaccttgtagactcttcccttcaggccagggcggcaactatgcaaattcaagtgggggcctccccacttaaacccagggctctcctccacagtgagtctccttcaccacccagctgggatctcagtgctttcttttctgtcctcctccaggatggggtcaaccgtcatcctttccctcgtcctggctgttctccaaggtcagtcctgcccagggtttgaggtcacagagaagaatgggcagaagggagcccctgatgcaaattttgtgtctcccacacaggtgtctttgccgaggtgcagctgttgcagtctgcagcagaggtgaaaagacccggggagtctctgaggatctcctgtaagacttctggatacagctttaccagctactggatccactgggtgcgccagatgcccgggaaagaactggagtggatggggagcatctatcctgggaactctgataccagatacagcccatccttccaaggccacgtcaccatctcagccgacagctccagcagcaccgcctacctgcagtggagcagcctgaaggcctcggacgccgccatgtattattgtgtgagagggaccatctaaaaccttccgcggtgcaggtgcagagtgagctgccagacacaccctccccaggggcctctctattcatccggggaggaaacactggctgtttgtgtcctcaggagcaaaaaccagagaacaacatgggagcgttcctaacccctaaggcaactggatgggagacctgacccatccagttctctgagggggctcttgtgtgttctacaaggttgttcatggtgtatattacatggttaacatcaaaaggctgcctaataggcacctcttcaatataatagtcttttaattagtgaaaattttacacagttcatcattgcttgcttgccttcctcccttctgtccgctcttactccctccttcttttattttctacttacttttccaaaatcatttaacccctttttgtaccattaataagttatcttgtttttgttgttgttttccttttaacaatatgcactgaataattcatctttgtgccaattcgtaaatattttgatataacaaagacttctgtcataaatagatttcctgtgagtaatcttgcaaatattttagaacctgtttggttaagaataaattaaaataaatagacaaatttttaaagacatacaacctatcaaaactgaaccaccaagaaataaaaaatctgggctgggcgtggttgctcatatgtgtattctcagcactttgggagaccgatgcgggtggatcacctcaggtcaggagttcaagatcagcctggccaacatggcaaaaccccgtctctactaaaaatacacagattagctgggtgtggtggtgttcacccgcagtcccatagtcccggctactcgggaggctgaggtaggagaatgacttgaacctgggaggcagaggttgcagaaagccaaaatcgagccactgcactccagactgagcaacagagtgagactccaattaaaaaaaatctgaacagaccaatgagtaaagagatcgagtcagtgatttttccaacatctcgaatcaaagtccagaacttcatggcttcactactgaattttatcaaaaattaaaaaaaacctagaatctctactcaaatttccaacaaaataaagagaaagaaatatatccaagcttattttggaaggccctatttccaaagcaaggaaaagacactacaagtaaataaaactacaggccaatatccctgattatcatagtttcaaaaactctcaagagtgatgagatgacaaacaaaattaaacagcagattaagaatagaattcaccattatctgtgtctcccatacccagagaggctgctgcttgccctgcacaaggatactctgagcagaaacctacctggcccagccctcaccttgctttatgcagccatctgccctggcagcttaacacaaaggacagcatcttttgggagatacatggccacacccactgcctgagaatccacagtagcccctattcctgggcaacataagccaagcaaaaaccccactgttaatactgtagctggtgctctttggaaagcaccatctccaagcaggaagccaataaacagtccatcacagtatctcctggtagactatcactgcacccagaaaggagaaaatgactgtgtgatctcagctatgaccagtgcctgcaccactctggatgaccaggaggtcctgagtctgtccatgtgaacagttcattaccgctataaccagcattcaagaaagccagtacacaaaggctatcaatatctaaggaatttcagtctccatcactcccctgctgcttccatcagacctggttcactgctcactgctgaaaaattgaggacacatcacaccaccggatccctcacatacattccccaacaccagcctgaagtgtgtcaacttcactgggcggctagacctagagaagcaacaacactcacagtagtatggctcccaggttctcctgctcctaggggaagggagtgcaccacattgagggaacaccctgtgggacaggagaatctggatggcaggccttgaacatcaatcagatccctccattggtgggaaacttcttttagtagaggcagttacagtgctgagctcagcagagaaagtcttcagctctgtctcaacagtcagatatccctggtgcatgtgaaaaacttgaagaagaggaagtctttcccccttgtacaccactgcaggcacacttggggtctctcccataagagctcagtacgggtgcaactatagacagcatttctggaacacatcatgttgactgcatcccccagaaagagcactctccaggttcaggttttggccagacacagagtcacaattcctctgtatttaacacttcaacttttgtacagaggaaaagacatgcctgtctgatctgaatagctggaatcctgggatacgggagtgtcttagaggtgcataactttcctacagacctggcaagacagctgaggtggctccaacccttcccccagataagacctcagtgtgactcactaaaagctcctccagccaactctgtcaaggctgggacttcatttaccacctgatttagccacagctggtttctatccagggacaagccccctactggtctgaagcctgaaccatcaaactagcaaataaatcactgggggaaaataaataaatacgtgcatgccacagaggaatgaactaaggtttaatagacctcaaccattctaaccccatagaagacagtgaacttgctcacatactgagcagatttctactgcaatcaacacataggaaagccatcatacaaagattctccataaccacggaactcttacagagtcttcacccctctaaggaccaaaaaccaaattagactgtaattaattataaccattaaagtctcattcttaagggaaaaaataaatttaaaaacaaacaaaagaaacagttaaaacaaacataatttcaatactagttagaagaaatagtctaccaaaataagaggaaatgagaaaaataactcaagtaatatgacaaaacagggtgctataacatcccaaaaaggtcacactaggtctccagcaataaactttaaccaaaatgaagtctttaaaataccagataagaaattcagaatgttgattattaagctactcaagaagatataataagaaggtgaatatcatcataaacaaatgtataaaagcagttcagaatataaatacaaatttttatagagagatagatatcataaagagaaaccaatcagaacttctgaaaataaaagacaaaatgcagggaaatagtaagggaattacaaaatgccatggaaagttttaaaaatagactagaaaaaagtagaagaaaaaataaacaagagactagaaaaagtacaaaataaaaagttgaagtaaaaaattagatgaaaaaagaagaagaataaagtagaaataagaaaaaagaagaaataaaaaagactatttttgaaataatcaaatcagagaaaaataaatttagaaagaaccaaaagaagtaaacacagtctccaggaaatatgggattatgtaaaatgaccaaacctcagcataattggtgttcctgaagaagaaaaaaaataatatgtttggaaaacttatttgagagaaaaattgagaaatacattcctggcctgcctagagacctagatatccaaatccaagaagttcaaagaactcctgggaaatgtattgcaaaactgccttcaccaagcttatagtcatcaggctaccgaaagttaacatgaaggaaataattctaagagcagcaatacaaaacaaaacaaaaaacccatcagactaatggcagacttctcagcagaaacttcaccagccagatggattaagcttctatcttcaaattccttaaatagaacaactttcaatcaagaattttgtatcctgccaaactgtttgataaatgaaaaagaagtaaagtcattttcagaatcaccagtgctcagggaattcgtcactaccaaaccagcagtacaagaaatgctaaaaggagttgcaaaccttgaaacaaaagcccagtaagcacataaagggaacctcttaagagcctgaaactcacaggcctataaaacaataacacagtgaaaaaaaaaaactaggtaagaattaacatggcaaagaaaacagtaactcatatctaaatattcacattgaatgtaaatggcctaaatgctccatataaaagatacacaatggcagaatagattaaaaaatcacaatggaaatatctgatgtctctaaaagatccccctaacacacaaagatttacataaactcaaggtaaaaggttggaagaaggtatttcacaaaaatggaaaccaagagtgagcaggagtagctattttgatatcagacaaaatggacttcaaagcaacaacagtaaaaaaaagacatagatgatcactatacaattacaaaaggatcaattcaataagaaaatactacaattctaaatttataggcaccaaacaccagaggaactagattcataaaacaagtactattagagatttaaaaaaatgagagcgaaacaatcagagtgggagactttaatacaatcataacagcactagacagatcttcgagactgaaagtcaacagagaaaaaatgcacttaaataactcactgaaacaaatggatgtagcagatgtgtacagaacattctgtccaagatctgcagaataaacattcttgtaatcagtacatgcaacattctacaagatagaacatataataggtcacaaaacaagtctcaatgaatttttaaaacagtgaaatcatatcaagtatcttctcagaccacaggagaataaaactaaaaatgaactctcaaagaaacccttacaactgaacaaatacatagaaattaagaaatctgctcctgagtaatatctgggttaacaatggcataagatgaaaatttaaaaattaccttaattaaatggtaacaagttattgaaaccttaagaatacagcaaaagcagtggtaagaggaaagtttatagtgactactgcctacgtgaaaaagccggaaagagcacaagttgtcaacctaatgttgacacgagaaaaaagaaaaaattaaagaaagaaaatataaatcaaaaaagagaaagaaacaagctgcctgtgttaggctgactcacgtcaaaggcagtaacacgcaaagtttcaatgatgttatctaagggccggagctcagaggaatgggctctgaagactctcccagcactccctcagcataaggatgaaaagaggtaagttttcctatctctcctttagtgtaagtgaacttccctgtcgaatctcatcccctctgctatgtaaactataccttgcctcttgctctgtacgttttaggagtttctgtttttcctgtagttaatgattgcaggttcctgcttctgcatctaagcagtacagcctgagcaggtctggcttgtagccagctacatgccatggtgggggtggcaggatgagtctttgtgagactcctttgaactaagcaggtaatgaccatctgggctgcatgggaaggagtattgctaaccctgagttacaagcctggctttgtttgattaacggcctctgtcttgcctctgtacgtgcgcgttcgtgccacttaggaggaggtgtataagcaaaaccttgtctttgttcggggcccagttgtttggacgttgagtcccttgggacagagtgcactcagtgaagaccctcctgctatgccccgaggtgtcccttgccctcctgatgttccgcaacctttcttgcgagccagcagccaggaggagaagagaggacagattggctgtctcctttgccggagggtctggggctctggtcgcggcgatctgtgaccccagggcggcctcggggagcacttcagcccggaggggagaccggctctccaggcccccggggcccctcccctgacagcgcaaaggagcgcggaaagggctgcgggatgatcccagaagcagcgctaatgaaccgcggtcggcttttggggcccaaggcaggacccgtcccacgaggacggaggggagccccatcacctgccgggctgtgcgtctagtccgacccagggaggctgcggcggcgagagggggtcgctcactcgggtaccgcagacgccgcaaccgacgcggcacaggagagaggcccgccaggccggttaggaaagggaactggggaggggaagtgggtgaaagggcgtgcaagagacggctgcaggaggggccggtgcggggagtgacgtgggaggcgcagatctcagcgtggactgggcgctcccagcgaagcctggggccgacctgggatagcggcgaagcggctggtaggagctgccccgtggcagcagcggccgtgctgggaataggggactctcctagccaggcggccccgaaaactcctgtaataggagacgctctgctcggtaaaaaaggaagtcagagtgagtgtgcgtcgtagagggaggaaatgggaggaaaatcgtggaaacccactccactggaatgtatactaaagaattttaagaaaggttttgcagcggattatggaattaagctgaccccctgaagttgaaaactctctgtgaatcagaatggccttctttaggggtcggctgccggccgagggtgctatatagatagggaggtgattggccgggtgtttaaggtggtgaccggggtgggaggacagccagggtacccagatcaatttccctatatcgattcatggctcaatgttatacaaaactgaccagcgtggttgcaccccccagcagcatattgtaagacgcctgtggcccgagcagccgaagacaaaatgaaagtaaaatcagccatgctggcagctgcagagaaaaagggaaagtcacaggaaagccgagataaaccagttctgcgggcacctcaggaggaaacagaatttcctcctcctcctcatgttccaagccacccccctttgccgagaccaactgctccctctgcaagttcagctgtgaggccagcagccccagctgtccatggggagttaaatccgggagagtatactcccccagcctcaactaagaaggaggaattggagctgcaggaagttagagtggaaagcccagaaagtcaggcaggccatctcaggtctggccgcacctgagtcctgcaaatgcgtctcagggagacgaggggacctgtctattatgaccagcatggccacatccagaggggagagtgaactttcgtttaccagcccttttcaaccactgacctcctaaagtggaagcatcatattccctcttacatggagaagccacaggctctcgttgattgatgcagtccgtttttcagacacacaatccaacgtgaccagattgaaaacagcttcttttgaccctgtttaatatggaggaatggcagagagtgacacaggcagccctccagtggctaaaactaatgcacctgcagacacagttaatgcccagacatatgcatatttgaccctgtttaatatggaggaatggcagagggtgacacaggcagccctccggtggctaaaactaatgcacctgcagacacagttaatgcccaggcatatgcacgggtcagttccctgaaacaaaccccaattgggacccaaatgatgcaacccagttgcagcacctgcagcggtactgagaggcaatctttcatgggctgaaggatggtgggagaaaagcagttaatataggaaaaatctcggaggtgctccagggagcagttgagagcccaagccagttgtattagagactttgtgaggcttatcggctgtacaccctgttcaaccctgagactactgagaatcagcatgtggtaaatatgtcatttgtaggtcaggcccagggtgatatcaggcaaaatttgcagaagatggaaggtttcgcgggtatgaatgctactcagcttattgaggtagccaccaaggtgtacattaacaatgatcaggaggcaaagagggaggctgattgaaggcttaagaagaaggctgatttactggcagctccccttacgggaagggaagctggttttgcaaggggatgcgggtatggatgagggcatggaagaggccggactggatggggatttgagagtcagctgagactagaaagagatcaatgtgtgcagtgcaaaaggaaaggacactggaagaatgagtgtccagagaataacaaggagaatggtcagggctgtggtatgggaaggccaccagcagggggctgccgcacctgggaggaaccagacactgacctaatcggactggccagggctgaaggatatgaggactaggacagaccgggctctttctctttgggcacccaagagcctatgttcagattagaagtggaggccaactagtggactttatggtagatactggggctgagcactcagcagtgacccgacctatagggccgctatccaagaactgtgcaactattgcaggagccactggagtctcagagaagaggcctttctgtcagtcaaagaggcgtgttataggaggacaaggagtccaacaagaattcctgtacctcccaaattgtccagttccttcgctggaaagagacccatttcaaaaattgcaggcacagattacatttgggccacaaggggatgtaactttaaatctagctcactcagaggctatggtgttaacccttactgtcccacgggctgaggaatggagactatatgcaggaaagactccagaaccaggagtaaattaaatgcgtgggttacttactaaaattactggagtttgggctgaaagtaacctgccggaactggcagtaaatccggcaccaattgtagtggagttaaaactgggagcgactctggttcatgtccgtcagtacccgcttctccctgaggccatacgggagtccacaaacacttagattgacttcacaggtgaggaaccatagtcaaatgccagtcactatggaacacccctctcttgccagtgtggaagccgtctggagaatataggccagtgcaggacttgtgtgcagtaaaccaggccacggtgaccatccacccagtgctgccaaacctgtatactttaatgggacatattccagtgagtgccacttggtttacagtcctagatttgaaggacacatttttctgtctccagctggcaccgattagtcagcctgtttttgctttgcaatggggtgaatcacagtatacttgaacaagactgccacagggatttaagactctcccacaatctttgaagaggcactggcctcagaccttaaagcctacaccccaccaagcagtgactgtgtcttgctctagtacattgatgatcttcttctagcagccccaacctggaaggactgctttcaggagacccaagacctcctgcacctgttatggaaggcaggatataaaggcaggatataaagtgtcagggaaaaaggatcaaatctgctctgaaagtgtccagtatttaggcttctatataagcgaagggaaaagattgcttggtagtgaatgaaagcaggcttttgtgtgcttcccactccaaccacctggtgacaaatgagagagttactaaaggcagctgggttctgccacatctggatcccatgtttctcactcatgggtaagccattgtatgaagccacaaagaggggaaagaaggagcccctcctctgggaggccacccaggaaaaggccttttaataaatcaaaggagacttgactgaagctccagctttaggcttgccagatctaactaagcttttctttttatatgcccatgagtgaaaaggaatggtcataggggtcctaactcaagtcatagggtcatggcaccacccggtggcatatttatccaggcaattagatactgtggcacttgcatggacccttgtttaaggcattagctgctactgcttcactggcacaggaagctaataaactgactttgggacggcaactgataatccaggtaccatactcggttataactttaatggacaaaagggggcaccaatggttataaaatccgagaatgatttgatatcaagagctcttatgtgaaaatccctgcataactttagagactgtaaataccctaaacctggctaccttgcccccttcattgctgtgtggacgtagcagatgaagtgttctcaagccagagagatttgacagatcggcccctcggggacccggacattgaatatttcactgatgggagcagcttcatcctagaggggcccgccgagcagggtatgcagtagtgactttggactcagtagcagaggcatagtctttgcctacaggaacttctgctcagaaagcagagctaatagctctgacaagggctcattggctagcaaaagaccaaaagaccaatattcacacaaactctaaatatgcttttgccattttgaatgttcatggggctatttacaaagaaagaggactcttgactgatggagggaaagaaagaaagtacaaggaagaaattctacagcccttagatgctgtgtgggccccgaagcaggtggctgtaatgcactgtagggggcacctgagggcaggaacatcagaggtgaaaggaaacagaaaggcagacaagaggcaaagcagactgcagtggtgactctgccttctaaagaggaagccttggctatgcctctccttccagaaattcccctcccagagaccccaagctacactccaaatgaaagggctttttttgcccaagaaaatgggagctacgttgaaggaggatggtggaaattctccaatgggaggctagccataactgaaatggtggcccccagatttgtaaagcagttccaccaagggactcacatgggaaaaacggcactagagacattattaggttgtcacttctatgtgtcccagcttacggctatcacttgagcagtttgtgaacggtgtttaacttgtgctcataacaaccctcgacaagggcccacttgaccccccaggaattcaggaaacaagagccatccctgtgtaaacgtgcttatgggcttcaccaaactgtcctgagcagggggctatcagtacatgttggtgcttgtctgcaccttttcaggatgggtcgaggccttctccacccagacaaagaaggcatgagaggcgaccaaggtattgttaagagacgttattcccagatttggactacccctgactctggggttagacaatggactggcatttgtggctgaagtagtgcaggacttaactcgactattaggaataaaatggaaattatatacagcctgtagcctgcagagctcaggtaaagtggagcacatgaactggacactaaaacagctactgaagaaattttgtgaggaaactcacctgaggtgggatcaggtcttacccgtggtcctcctccaagtcgggtgcacccgcacaaaacaaaccgggtgttcaccctatgagattttattcggccggccacccccaatcacaggtcaaattaaaggtgatctctgtgagttaggagaactctaaggaagcaaatgcaggctttagggctagctatgcagaaagtgcatggctgggtgcaagaaagaatgcccattggtctgacagacccagtacaccctttcaaacctggggacctcgttggggttaagaaatggaatcataactctgggacccatatgtgatgggccccatgttgtaattttgtccactcccactgctgttaaagttcagaaatcgtgccttggatccaccacgactggctgaaaccggcagcccaggaccagaggaccagctagcaggacccagaccatccgacccagctgaccctgcgacgagactgggttcccagcggagaggacaacagcccggctctgcttacttcggaagctgaccagtctatgcatggtggaagcttgagaaaacagcaagctctgctctagtcactctggaagctgactagtttacgcatggcagaaagcttgagtcgtcatcatcagatgagtaaatgtggccagagatcttaggtccagtaatcttatttgtattattaattatattactgctgtgctattgcttcaacaaatctcctccaccctgcccatgctaggtgtaagaatgctacaccttgccttgtttctgtcgatccccatatctgtcctaggagaggaagagcctatagaggaatgtccacattgcatgtgtactacgtggataggtaatacactagttaagactttattgtaccatacatactatgaacgcacaggaacccctctggggacttgtatgtacaaccaaacgaactattcagtttgtgacccaggggatagctagctttatgtatactatgaccctaagcttttacctgggcctggtttgagattcgcactgggtcaagggaaggaagtcttttaaacaagaccgaagtttctctctcccacaagggagtcacatctttgtattttgatatttgccagataacatccatagactcactctttcccgtaatccacagttccatggagtactataatagctgccataaaagtaagtgtgcatcccctgcttgctccaccggttccctggtaacaacttgctggggctttgcaacatggcctactaaccaacaatcactagggctaatcatgcttaccaaaataccttcagaaccagattgtaaaactaacatttgcaatcctgtgaatcttaccaccttggagccaaattggctcgtatggactacaggtttaaaagcaccactgagggtacaagccagcagccaagaaatagactcaagagtctatgtctatattatatacataaaaaaaaacctgaatccttcttgcccagcagcagttccaagtctttaagtcattcaatgagcactttaagcaggaggtacctgaagctcctcctcctatagctgtagatctgtttgcacggttggctgaaaacagctggcagcttaggtgtttcctcatgctttgtctgtggaggaacaaatatgggaaaccagtggccttgggaaacaaaagagctatcgcctcaagaaaattacactttaaccctttcatccccagagccggcactcacgagctcaagtgtctggctgctaaaatcttctgtcattggaagattctgcattgcccactggggaaaagcctttacaaacccagtaggggaattagtctgcctaggacagcaatattacaatgagacattagggaaaactttatggcggggcaataataagcaaggtaaagatacaaccaggttgccatgccataatccattttcccattttcactctttaaaccactcctggtatcaactagaggcaccaaatgaacacctagcaagcaccttctggcctcgactggatctgtgggccatgagcttattggcaattacctgccaattggacaggggcctgtgtgttggggacaataagaccatctttcttccttgacccgttacaacagggagaggttttagggtatcctatctatgatgaaattaaggggaggagcaaaaggaatatagacataaaaaaagatataaagataggagattggaaggacaccgattggcctcctgaaagaataatttaatactatgggccagctacatgggcacaagatgggatgcagggatactgtacccctatttacatgctcaacagcatcataaggttgcaggcagtacttgaaatcatcaccaatgaaactgcaaatgcattagacctgctggcccagcaagccacaaagatgagaaatgccatttatcaaaataggctaggcttggactacctcctagcccaggaaggaggcataggcgggaagtttaatctgacaaattgttgtttagaaattgatgataacagaaaggccatcatggaaataactgcaagaatgcaaaagctagctcatgtcccagttcagacctggaagccaatatggtctctagattccctttttggaggttggttttcaggttttggcagttttaaaacattaatagggatagtactagctatattaggaggctgtttaatactcccctgcctcttacccctccttatcaggggcatccaatcaactatagacgccgtagttgacaaaaccatcaccacttgactaatggctctaactaaataccaagctgtaccaaacgaagaaaacttgccttatcatgaagaacaaagttgtagtgatgacttctattaaaatttcatacataggaggcatcaaaggcagggtatgagatgggaaaaaagaaaaaaattaagaaaaaaagaaaatagaaattaaaaaagagaaagaaacaagctgcctgtgttaggctgactcatgtcaaaggcagtaacacgcaaagtttcaataatgtaatttaagggccagagctcagaggaatgtgctctgaagactctcccagcactccctcaacataaggatgtgaagagataagttttcctatctctcctttagtgtaagtaaacttccccgtcgaatctcatcccctctgctatgtaaactatatcttgctccttgctctgtaagtttttggagtttctgtttttcctacagttaatgattgtaggttcctgcttctgcatctaagcagtatagcctgagcaggtctggctagtagccagctagacgccatagtgggggtcgcaagatgagtctttgtgagactcctttgaactaagcagataatgaccatctgggcagcatagtaaggagtatactaaacttgagttataagcctgtcttagtttgtttaacggcctttgtcttgcctctgtacattcgcgtttgcaccacttaggagtaggtatataagcaaaaccttgtctttgttcggggcccagttttttggacgttgagtccactgagacagagtgcactcaataaaggatcctcctgctataccctgaggtctcccttgccctcctaaatttctgcaacaatgtcacacctcaagaaactggagaaataagaacaaactaaacctagatccagaagaagaaaagaaataacaaagatcagagcagaactaaatgaaaatcaaacaaaaaacacaaaaaaccaatgaaataaaaagttggttatttgaaaaaataatcaaattcatggaccattagctatattaaccaagaaaagaagagcaaagatccagataagttcaattagaaatgaaatgagacaatacaatctacactgctaatatataaaataatttgagactactatgtacaacttcatgtgcacaatctaggagacttacaggaaatggaaaaattcctagaaacatacaactctcctagattaaatcaagaagaaacagttactttgaatagatgaataataaacaatgagattgaatcagtaattcaagaattgccaacaataccaacaacaaaatagggccaggtgaattcacatttgaagtctacacaaaattcaaagaaaaattgctaccattttttctgaaactattttttaaatttagaaaaaaagaatcctccctaaattattctctaaagctactataacccagatacccaaaccaggggaacacacacacacacacacacacacacactctctacatacgaattttcctggtaaatatagatgcaaaaatactcaaaaaatagctacctgagtccaacagcacatccaaaagataattcatcatgataaaagtaggtttcaactcagaaatggaaggattatttgaacatacacaagtcaataaatgtaacacatcacataaacagaactaaaaacaaaaactataggattatctcaatagatgcagaaaaagcatttaacaaaattcagcgtttttaattataaaaattctaagtcaggtaggcatagaaggaactgacctcaaactaataaaggttatataggaaaaactcacacccaacatcatgctgaatgtgaaaaagttaaaagcattccccctgggaacagaaacaatagaagaatgtccatgttcaccagttctattcaacatagtgctagaagttctacccagagcaattaatcagaagaaaaaaataaagggcatccatattgagaaagagaaagtcaaactatcactgtttacagatgaagtgattatatacctagaaaaccctaaactcccccaaaatactgttagttttagtaaatgaattcacttatgtctcaggttacaaaataaatgtacacaaattggtagcactgctatacatcaacaacaacaaagctgcgaatcaaatcaagaactccatttcttttacagaagctacaaaaagatatttaggaatatacttaaccaaaaaggtaaaagatttctacaaggagaactacaaaacactgctgaaagaaatcatagatgacacaaacaaatggaaatgaatcccatgctcatggattggaagaagcaatattgtgaacatgaccgtaatgcccaaagcaatctacagattcagtgcaattcttatgaaaatacccacattattttttacagaattaaaaaataataatgttaaaattcatatgaaaccaaaaaagcccaaatagccaaataaatcctaataagaaaaaaatggagccatcacattactgaacttcaaattataccacaaggctgcagttacctaaacaacatggtactgatataaagtaggttcatagaccactggaacaaaatagagaacccagaaataaagccaaatatgtaaagccaactgatgttttacaaaacatacaaaaatataaattggaaaatagacaccatatttaataaatggtactgggaaaactaggaagccacatgtaaaagaataagactggatctctatctgtcaccatataaaaaacaactcccattcaaaatttcaaagaaatgcatttacataaattggaaaaaaactctttataatttgtatggctggggtgattgacccaggctatcaagatggaatcatactactactccacaatggaggtaagaaatagtatgtttggaatacagggggatttcttagggcatctcttagcattactttgccatgtgattaaggtcaatgggaaactacaacaacctaatccaggcaggcatacagatggctcagattcttcaagagtaaaagtttaggtcactccaccaggtaaacaaacaaacaaatgaacaagaaacaaaactgaccagccaaggtaactgctgaaggccaaaaaatacagaatgggtagatacaagaaagttgttatcaataccaggtatgaccatcaaccagaaatgaggactggaattgtcatgagtatgtctttcttatcttcttaagaatatatttctgcatgtatataactgtactaagaaaatgttttctttttgtttttcatgtaacataagatttatcgacttcatattagcatttgagagttgttaactgtatatagtggcatttaggttaaggattagtgcattttcagttgtatgaaggatagctgtattatgttaggcataattatgaccttactattgtctttatttggagatcgagcatgatttcaggtgatatgtagggatgctaagttgacaacaagggattggcctgtgatagttaatattaggtttaacttgattggattaaagcatgcttagatggctgggaagtattgtttctttgtgtgtctcttgggttttgccagaggaggttggcatttgactaagtagcctgcaagagaaagacccagccccaatatggaagggcaccatccactcagctgccagcacagctagaataaagcaggtggaagaagaggagataacattgcttgctgcgccttctgtttttgttttgttttgctttgttttccttgctggctgctttcttctgctcttcctacccttggacataagatttcacgttctttggcagttgaactatggggcgtgaagcaggggcttgctgagggttcttgggcccttggtcagagaatgaagtgtgcactgttggcttttctggttttgagacttctggacttagactgagccactaccagtttctctctcttcccaagcttttagaaagcctatcatggaactttcattttgtaattttgtgagaaaattctaataaactatatttcctatatacatatgttatattagttctatttctctagagaactctgggtaatacagctttgatacaaaaaacaacattgttgtattcacaaaaatgtatcctaagataagccaacacataaaagtgcataaagtatgattctatttctaggaattataaaaaatgaaaatgaatctaaagtaacaaaaaaagatcagtagttgcctaaggacagattggaaaattatatttttccaaatgctacaaatgatactctcacctactatgagcattgctctctcctcaggaatttcacccaagaaccgactctatagtcggagacatgcaaacaggttcctgttcatgtacgaactcttcctaacactttcttttcatgtacttccttgacttatttgttgatgaaggttgataccataaaaataactaaaccaggctcacattagagaaaaagaagagagtgatggaaagattaagccggagcatccagtttcagtgattctttgaccctgccctccctgaagtctagaggcagagggatgagccctgctgagcagttcacacttgtccacagggagaaagaggtgtaaatgtgccccccatccatgctcataaaatggcccatggacagcttatcccttgtccatgaaggggatgccacctgatgtcggtgcccttcctcagtgtccacaccttagggtctctgctaatctggggttctcttcttattctcagaggtagggtccctgtggatcaagcctagctgtggctgcttctcagcctgttccctctgtgtttgtaagagtcctacaagaagttcactggtggaatctggaagagaaatgatacagcctaactgttctcagagccttttttacaaagcctctgaatttaccttcattgactctagcatgagctcagcccagcaggcttcaggacaggggttggtgtgggaggcaaaagcgagggattcaagtggaatttgttagtggtaccctccatcaatacaaagaaaaatcataatcctcagggacacccttgtcagcacagtctccctcaaaatgaccaacctgagagccgaggagaaggccatgtattactgtgagagacacaggagatatccgtgtggcaacctaacacaggggacacctgtatttgtgtctgagcccagacacaaacctccctgcagggagacaggaggggaccgtgtgacagacactgctcagaaccaccaaggggagctcagaaccagcaggaggcagtggggacacaaaggaagactcaggagccaccagggggcgctcagaaccacctgggggtggtgaggacaccagggggcgctgaggacacaaggggaggatcaggacaccagggtcggctcaggacgcgaggaggtgctcaggacaccagggtctgctcagaaccaccagggggcactcaggaaccaccaggagaggctcagccaccaccagggggcactcaggacatcaggagctgctcagaatcaccagacggcggctgggcgcggtggctcacgtctgtaatcccagcactttgggaggccgaggcgggcggatcacgaggtcaggagatcgagaccatcccggctaaaacggtgaaaccccgtctctactaaaaatacaaaaaattagccaggcgtagtggcgggcgcctgtagtcccagctacttgggaggctgaggcaggagaatggcgtgaacccgggtggcggagcttgcagtgagccgagatcccgccactgcactccagcctggggtgacagagcgagactccgtctcaaaaaaaaaaaaaaaaaaaaaaagaatcaccagacggcgcacaggacatgaggtggcgcacaggacatgaggtggcactcaggacacaagggggagctcagaaccacctgggggtggtgaggacaccaggggatgctgaggacacaaggggaggatcaggacaccagggtctgctcagcaaccaccagggggcgctcaggacatcaggagctgctcagaatcaccagacgtcgctcaggacatgaggtggcactcaggacacaagggggagctcagaaccaccagggggcgctcaggacatgaggtggcgctcaggacacaagggggagctcagaaccaacagggggcgctcgggacactagggggtgctaagaacaccaaggggcggtcaggacatcagggttctcttaggaagcagtgcatcatcaggtccctggggagggtgggtttctttatttaggccttgtgattcctgacctggtaaagtgaaactcttctcagcatcttttgccatttcttccttggaatccatgtttctcttacctacaaaatcctaacttagaacaggaattcaattaaacttttaattctttatatttttgtaataatactagtaataatatctcagtacaattttaaaatgaagaaattgtgtatgcttacttcaaactatttacacagatttttgttactgtgctgtgtcagtcacacttttgtaaatgttttctaacaataactcagcatatgcatggtgttgagtttctttttcttccatttgctgattgtgaagatgaaaccccactttaagggctcctgtcctccactttggtggcccctggtgttctgcccctcagtctgtttctccaccttcccttcttctttccaaaccttttataatcctcaatttccattcaaggaatcagcaagcccgtttattatgtctcatccatgtctggtgaatcagttcacttccctttatgatcactgaagccaaccaagtataggcaggcaacagttctaagaatatgctcatctacctgcagactctctgccctcctcacccctttcaacggtcctgcagacatcaccccaccccatcctctatcttccctaagtaccacagagtgggctctgcagctcctgctgcccactgtgtgctcagccctggggctcactagtgctttgatgataaagcctaaatccctaacgtgtttgcacacttcctgaccaccctctagcaagttgtcattgtgagtgaatcctgggaaccctgtgctgatattaattctatatttatggatattctctagcatccaggaatattgtcaaataacctatcgagttgatgttaaaaattcatgtgaagccattgcaaaagaaaaaagtctttaaactggaaattgctattttttaatacttaatatttttttaatttaatatttaaatgctatttaaattagaaaaaggtgatgccttttgtaaagtacaatgttatttcaaccaatcgtgtaataaaattttaatagagatgcttgccttattgattattatatttatttataacattaaatgcattaaaacatttatttaaaaaatatgctattagtaaaaatgggaaataagctagcacagagtatgtaaagaataccattgtatttttcaatgatagatttgtcaataatggcagttacagtaagttttattaaaacatgcatttacatatatttcttaatttacattggaatagacagacttactcatagaagaatgttactttggactaaaaccttaaactataaatacaaataaatccatataaattaaatatataacacagaaacaaatgtatgtcactttgatgtttggaaatgcatttatttttgcctgtgcacatatatgtttcattgctgggtgtgtgtgtctgtgtctgtatatatgggtgtgactgtgaagtttcaaaatacattattaacttgtatagttatataaatctaagtttttttatgttaaaagatagtaaaaaaacacacacaaaaatattctagagagcatttgcaataactaaggagtattcaggtgttgtattaataatgaaaaactagccaaaatgtttttaaacttttattttaggttcagaagtacttgtgcaagtgttgttttataggcaaattgtgagttctgttggtttgatgtacagattattttgtcaccaaggaaataagcatagtacctggtaggtagtttttcaattctcaccctcctcccaccctccacactcaagtaggacctagtgtctgttgttttctttgtgtcaatatgattagctcccacttatacatgagaacagatggtttgtaattttctgttactgtgttactttccttaggataatgacctccagctccatctatgttgctgcaaataacatgatcttattcttcttatgactgtgttgtattccattctgaaatatacataaatcagtaaatgtgattcatcacacacacacaatcatctcattgatcaatattaactttcaatgtaaatctcccaggaatctttcatcttctcttgaccctcccctctcctcaggcatcccaaaccatagctttctatatattaggatacatgaaaatagggccctctctcagctgatgaaaaccagcccagccctgactctgcagctctgggagacaagccccagccgtgcagtaccaaggtgcttccattcagtgattagcactgaacactgaagacatcccatggagttaggaatgcgctgggttttctttgttgttgttctaaaaggcaatcaagaagaactagaaatattgtctgtgagtgatatgagtgagagaaacagtggatctgtgtggcagtttctgacaagaatgtctctgtgtttgcaggtgtccaatgtgaagtgtagctggtagagtctgggggaggcttggtacagcttggggggtccatgtgactctcctgtgcagcctctggatacactttcagtaactatggcatgcactaggtggaccaagctccagggaagggactggagtgggtcttacattaatgctagtggtggaggcatatactactcagactctgtgaagggccggttgaccatctccagagaaaacaccaagaactcactgtatctgcaaataaacagtttcattgctgacaccatggccgtctattactgtaagagacacagtgaggagaagtcagtgtgagcccagtcacaaacctcctacaggaacgctgggaggaaaatcagctacagggctcactcaaggcccactgatcagagtccactccagagggaggttcacatggaggttaggggctggttttctgtcaggacattggacttcatcatcttcttccattactttctttagggagcctcttcattttagaattctgtgtgtactattgttatatatacatatatatatatatatatataaaataatcatagtaatgcgaggacatattttctcatgcacaaaatgtagattgacacttacagagaagaaaaattatcaaccaatgtcaaaaacatcagagtcctggaaaatcttaagtgttctggtgggtcatctctaatcagacccagaacagtaacctcagtgaaattccatgattcagatactatttttggattctgatcataaccaagacagagtctggaccagggtcagtgtcatatagaacctcacagcttccatatatgacccttctcttgacagtgaaatatgaaattcagtatcagcagtgatttgatttttcttttgctttccgtattctttctttttagttgttgttgtttagttatttcttttgctatatccattttctttttttttagttgtgcctttcacttttggctttcacttttccatttgcttttcctgcttcctgataaagggagatgtaatccctgtggtctaaattccagggctcaagccttttcctgggagctcaggtgggtctcaggatgtggctcctgcagccacgtgaaagaggctgatgggactttctttccttctcatgactcaggcattccacggtgttgtgtggagactcatctgagattgcacgtggccattagtagtgaaggggatgagatgtgggtgtggactgatcctgtgctgtgcaaattgtcattagtagtgaaggggatgagatgtggatgtggactgatcctgtgctgtgcaaattgtcattagtagtgaaggggatgagatgtgggtgtggactgatcctgtgctgtgcaaattgtcattagtagtgaaggggatgagatgtgggtgtggactgatcctgtgctgtgcaaattgtcattagtagtgaaggggatgagatgtgggtgtggactgatcctgtgctgtgcaaattgtcattagtagtgaaggggatgagatgtgggtgtggactgatcctgtgctgtgcaaattgtcatggagtcacttttctcaccatagtgttagaaagagactgtaaaagttgtcagaatcaaactgcaacaatttgtgttaaaacctgggaaatggagctgggaaggccatgagggagggttctcatacacatgccttccataacaagaactgtcataaatagattctgcaaaaccacaaccttgcacaaaggccagcacaaccttaaaataattacttctccaagtacatctgcccagaggtgcctgtgcaatattacactgatgccaccctggttattgatcattttatcccaggttaagtgtctcaaaaccgcatatgtggccctcctcattttttctttaaaacactttccttatttacctaccgaaatgtgcccgtgcacattcccattgcaatgctaattctcaaataaataccactttactttagagtttctttctgtctgatattcaggtttgacaagctgcagatggacttgccaattttctgtgggatacagggtataataattatgagagatgtgtaggcatgttcaatgttcataagagcaaccgtaaataaatgcaggctggaagtctcagagagagctgaatgtgctgaaacaccatactattttatcttctcccattcttttctgattggaatcagacccaaccaggttatcaatgccaatctacctaagctagagccaactgattacggtatcaacagcaacaatagctttttattttctgcttggctttgtattgttaccttgttccatcctctagagtatctatttcagcccttcggataccggtttcagaggctttcccctaaagtgtaatttcttagttttgtagtggtgataagggaggaggtgggtctggatgtgttttagaagttcaggctgtcattctctcccagacagacactttagtacagaacgatttatgtggttgtcccatttctacaggaaagatattcaagagaataagaaagctcttcagtatttggtccctgagaattttacactagagcacattcaccactcttgactttaagcaacctaattaatgtatttgaagccttatcttgaaatagactatatttcatatggcagactctgcctcaggtaatctcataccctgactttgttactctctacaagaacttgtctctccctaaatttcagatttgttgtttgtcttaaaatttcgattatctgaagtatgaaagacaatttgccaagtttcttattttctgttcatctgttattgttgatgttgttgttgtaaaatacaaaaatatatatatttcttatctaagtacttctgcaagctgagtagcagatatttttggtaaaacccagaataacagaagagtccacatattaattagcttcttaataggaaaaatcattatagtaaatttgttcactggactgttacccatcatttataatgtacaaatatctgatacacacaacaaactaaaatatctaggtatttatgctgagtaaaataagccaaaaaaataagtatatatgctatattattccatttctataaattctggaaaatgaaaactaacctacaataatttaatgaagaacagttgttgcctgaggaaatggtagaagaagggaaagggataggaggaaatgtggaacaggagaaaaaattgaggcgaattcacttgtccactttcttgataatggtgatagttatgtcatgtttatcaatgtatactttaagtatatgaagtttattatctctcaattagaccttataaagtttattacaagcaaacaaataaaaaattagacaaaaagaactgatagaaaatgggtaacatatgttaaatgccagttacctgaaaatttatctgcgtgaaccttagttctctccataattttaggtgaacgctggagtgtaacagagtcacaatattttcattaaggcagtaagttctgcaagccacactagacatgtcccgctctgtcctggagttagttcagggaacacagtgatgaggaacacgggctcagataccggaactcactcatctcagacatgagcacttagacacatacataggcactctgtgtgtgggtttactttcacatccgtacatggagaaacattgagtctcacagacataatttacacacatatttaaaatataataaggtgtttgatgctgtttatcacagcacaatttcctcgtaaaagtgcaaatcttctaaataccataagttaccaaactcctgcaggacaccatcatcctctctcggcaatgccttctcctcacgtgtcccaccctagagttttttatgtagttggaaatatgcaaaggaccctccttctttggtgaaaaccagccctgccctcaccctacagttctgggatgggagacccagccctggaatttcaaggtttttccacatggtgattagcactgaacagagaactcaccatggggtttgtgctgacttgggatttacttgttactattttaaaagtagattcagggtgaactagagattttgagtgtgagtggataacagttaaggaaacactgaaaatatgtgccagtttctgaccaggatgcccctgtgtttttgggtgtccagtgtgaggcgcagttgttggagcctgggggagacttggtacagcctggcgcggtgggggtgggggtccctgagactgtcctgtgcagcctctggatttgccttcagtagccactggatgcactgggcctgccaggctccagggaacagactggagtgggtctcatgtattagtactgatgggagtagcatacgctatgcacattctgggaagttctgattccccatctccagaaacaatgccaagaacacactcttatctggaaatgaacagtttgagagctgagtacacagccacgtattactgtgctggagacgcagtgaagggaagtcaggttgagcccagacacaaacctctctgcagaaacacatgaagtaaatcagctacgggggcgctcaggacccactgatcagattcaacctcagaggcagatgcagatacagggtaggagctggttttctcatagtgtttgtaacttccctctccaactgacagtttcccagagaacctcactaatttagagttctgtgcctaccaaaaaaatctccaaatatacaccttttaaaaggtagtaatataaaggcctagtctcacatgcacaaaatgcagatcaccacttccaggcatgagaagttctcaaccacggtcaccaagatcagagtcctgaggaagctcaggggtgccttgtgggtcttctccaatcacattcgggacaggaaactaagtttaattccctgattaaaaaaggctataattccctgatttaaaacgtttcattccctgattaaaaaaggctggaatttttctgattccagccaagaaagaggctgggccagagtcagtgtcacgtacaagctcacaggtttcacgtctgccccttctcctgatatgagactatgcaaagcagtatcagcactcatctgctgcactttttgctgtcaatccattttctttcttttcagctgttgtcactttttcgttttcttttctgctccctgaaaaagaaagatgtggtccatgcggtctaaattccaaggctcaagctcttccgctggagctcaggtggggctcaggctgtggctcctgcagccgcatgggagaggctgatggggctttcttctttccccagtgcttgggaccctccaccgtgtttcatggggactcatgtggaaatttgagtggcccaggggaactgaagggcataagcttgtttggtgagagtgaaacgtgactgtggaattgattctttgttgtgcaaaccagaagaaattttgaattttgtcagaatcaaaacggagtcacttttgttaaaacttttgcaaatgggactgggaaaggccatagaagcagggttctcatacacttacacttggtaacaagaactaccacaaatagagcctaaaaaacacaaccttgcacaaaatccaccacaactttaggaaaaagctacccccacaaggatatgtcctcatgtactgtgagtccaactttccactgttgccacccttgttattaatctttgcagcccaggaaaattgtctcaaagcaacttagcaacttacttagcccttcttattttaactttaactgcctaagaatttataccgtgaagtaattgcttcatttagtgttaatattaatgcccttttgacaatctttgaagctctttttttctgatatttcttccaacataaagaatgggagctttttcaccatataaagaatttttaggaagatatgatggaaagggaaactcaatgtattgttcagtgtttctgcctaacacatcaatctcttaaaatattttgctgtgtctgcatgtgataaagcagatgctaacactggagataaaagaaaaaaatgcacagaccttccacattccaaatcataaagtggtactggatgtgtttctgatgaagtgaaccatgggtcataagtgctagtgcaagtagctttggaaaatggagttcatagcttcttaaagttttgctagttttaatttaagaatgttatttactatttctttttagtacaagctttccagaagattcttgatggtaatggaagtgtcgcatttaagaattacaaatgactcacagagttactttgtaattttttctgtagggtgtacatgtcagtcacttgacataaaagctcatatgtcacagatagaaaaatgaaaattgagccaattttaataactgcagtggaaatagtttttggcaatgagtgcttcaagacaaccacaaaataaatcggcaaaatattaaaatacagcaggaatctgatctcagtttctctgccttataagaacaaggctgtcccacatcaaaattattattcaagctctaggaaaaaatacacttttggattctggaagctaaaagctctctccttagatagtgctaaagtacttgtgaaatgcagagttgtgttcatgaaaaagatgactttattgtgattttttttttttttttttgcctgttgacaactcaccaatctgtctcagatgtaaagccctgctctatgggttgaatgtggttgcacatgactggcagagactgattattcataactccaggtgccctgtctttggagcagctacaggagtcaggcccagactagaagagcccacactgaccttctgcatcacttatgctctctctggccactacatcacaaacagtgcttatgactgggcctgaatctgccagcccaggaaagggctggaatggatggggtgcattggtagtgatggtgggggtcctactagcctgtggcaaatggaagcatctcttttttatcagactgaataatattgtagtgttttcttataccacatttacttcatccctttgtgcattaacacttaggttgtttttatatattggctgccataaatagagctgcaattaatataagagcacaggtgtctttacaagttcatgattttatttcctttccctgtatttccagagaagcgtttgctgagtcatattgtatttccatttttgatttatttatgagctgctatactgtttttcataatggtgcaactaaaaaatggtgtagtcatcatgaaaaacagttttagtttttgacataatccaaacacaatgtttgaatctggttatctataggagtttctagtaaaattggtgaatgtaaattaaaaagcagtaagaaaaatctgcaattcagaaatagtgtacccagatggtctttctctccgaaatgaaagagaaataaactatttctcaggtgagataaactaagatattttcttcacacttgaccagtcatacaagaaatattcaagggaatttttgtataaaagccagcatatgaaaaccatcagcttggaaaaaaacacacaaaacctatatttcaatggtagaaacaattaaaaaaggagaaaagaaacaaacattattactacaaaacaacatcaaatcataaaaccaaacagaaagagaataaacaaagatagagatatatacatatatacaaacaatcataaaacaataaagaaaataatttgagtaaatacttataaataataaccttatgtaataaaattcctcaattaaaaatacagtataaaaattgattttattaaagtcccaactctatgctgcttacaagagactcaaatcatctgagaatctacacacagactgaaagtgagtgggtggaaaaaagatatgctacaaaaatagaaaccaacagcacaaatagctctacttatatcagacacaaattttaagtcaaatgctgtaaagggagaccaaaatggacattatataataaaaaatgatcaatgtagcaagaatacgtaacaactgtaaatatacatatatacatatatgttatatatatgtaacaagaacacataattgtatatatatacatatatacacacacacatatatacatatgtacccacacctgagaactcaaatatgtaaagcaaatctattacatagtaagggatagatactaaccttatacaattatagttggagaatttaacacgttatttagcattggatatgttacctagccaaaaattaacagacaaacattggatttaaactgcactatattccaaatggacctgaatttacagaccattgcaccaaacaacttcagaacacatattcttttttttttaaaaattaaatggatgtgtttatttatctttttttattattattatactttaagttttagggtacatgtgcacaatgtgcaggttagttacatatgtatacatgtgccatgctggtgtgctgcacccatcaactcgtcatttagcattaggtatatctcctaaagctatccctcccctctccccccaccccacaacagtccccagagtgtgatgttcccctcctgtgtccatgtgttctcattgttcaattcccacctgtgagtgagaatatgtttggttttttgttcttgcgatagtttactgagaatgatgatttccagtttcatccatgtccctacaaaggacatgaactcatcattttttgtggctgcatagtattccatggtgtatatgtgccacattttcttaatccagtctatcattgttggacatgtgagttggttccaagtctttgctattgtgaatagtgccgcaataaacatacgtgtgcatgtgtctttatagcagcatgatttatagtcctttgggtatatacccagtaatgggatggctgggtcaaatggtatttccagttctagatccctgaggaatggccacactgacttccacaatggttgaactagtttacagtcccaccaacagtgtcaaagtgttcctatttctccacatcctctccagcacctgttgtttcctgactttttaatgattgccattctaactggtgtgagatggtatctcattgtggttttgattcgcatttctctggtggccagtgatggtgagcattttttcatgcagaacacatattcttttcttcagcgcatgtgatactcttcagagttgatcatatattaatacagaaaatgtatcaaaaaatttaaataaaattataccgacgttttatctgactaagatagagtcaaagatggaatcaaactaaacatcagtaactggaggaacttctttttttttttttttgagatagactctttctctgtatcccaggctggagtgcagtgacagaatctcggctcactacaacctccaccttccgagttcaaaccattctcctgcctcagcctcctgataagctgaaattacaggcacctgccaccactcctggctaattttggtatgtttagtagagagggggtttcaccatgttggccaggctggtcttgaaatcctgacctaaagtcatccaccagcctcggcctccaaagtgccgggactacaggcatgagccaccacccagcctggagaaaatttcaaaaaaatataaacacaaaaattaaacaaatcactcttacatggccaatgggtgaaagaagacattaagaagaaaataaaaaatgtatgaaacaaacaaagaaacacaacataccaaatcttatggcgtttagtcaaatcactattatgaggcaagtttagagcaataaatgcccacatcaaaaagtagaaatatcttaattaatcaaaataacaatgcatgttagagaacttgaagaacaagaaaaagctaaattcaaaattatttttaaaaacaataaagagcagattagatataaatggaattaagactaaaaataccagaaaatattaaaatagcaatagtctttttaaaaaagataagcaaaattgaaagccattagctgggctaacaaaaaaaatataaagagctaagacatgaataaatgaggtagaaacagaagatgtctcaactgatatcccagaattaaaataaattaggaaatactataataaattatgtgataaatgtgaaaacctagaggaattggatacattcctggccatatactacctaacaagattgaaaaaggaaaaaatagaaagccttaacagaccaataaaaagtaatgagagggactcacttaaaaaatctatatcctattgaacataaataaaaaaacccaaattactagcacagcaaatcaaacagcatttaaatactaatactaatactaatacagcatgacaaagtagaattcaacccagggattcaattatgctttaatatacacaagtgaataaacatgatatatcacgtatatacgacaaggatgaaaaacatatttttactttaatagatgcagaataagtactttataaaactcaaaacctcttcatgaaaaaaactctcaattatgtgtagaaagaacaacacaataagaccacatgacaagttcatagctaacatcatacttaacagaaaaaaagtttaatgcttttcttctgaaaactggaaaagacaaggaagccaactctcagcacttattcaacacagtactgaaggtactagccagagcagttagacaagagaaagaaataaaggggattacaattagaaaaaaggtagccaaattacctctaatttcagatgacataatcatatatatactaaagactcttgtaaatgctcttagagctgatgaatttagtaaagtttcaagatacaatatcaacatagaaatctcagtggggtttctatacacaaacaataaactaggtaaaaaaaatcaagaaatcccattttcaataactacaaaaactattaaacacctaggaatacatttcaccaaggaggtgaaaatccgtaaatgaacaaactatgaaacactgatataattaattgaatgagacaaacacaaaataagaaggacaatctgtattcatgaactggaataatttatattgttagaatgaccataatgcacatgacaatctacatattcaatgtcatctctatgaaaataccaatggcattattcacagaaatattaaaaagcattattaaaatttgtatacaattgaaaataccccaaatgactaatgcagtcttgtggataaaaaacagaggtggaggtattaacaaccagatttcaaaaaaaattataaaactgtaataacaaaaacagcgtagtgctggcataaaaatccatggaaaaaagtagagaaaccaagacattaatccatatatttatagataacttatttgcaacagaggcaccaaaaatatttattgtgaaaagaaaagtatcctcagtaaattgtgtagggaaaaactgaatatccatatgcagatgaatgaacttacattcccacatttaactgtatataaaaatgaaataaaaataagttaaatactcaaatggaagacccaaaactataaagctgctcttaaaaacttagaaataatgcttcatgaaatctgtctggaaaacaattttataaataagacctcaaaagtacagtcaactaaataaaacacaaacgaattaaattttatcaaactaaacagtgtttacacagtaaaataatccaaatattgaatagataacataaaagtggtaaaatgtattttaaactattaattaaacaggctattaatatccagaatataccagaaaaataaatgtctcaaccacaaaaatataaataatcttattttataacagacaattaacccaaataagcagacgtttctcaaagaaacacatacaagatgccagaaaatatttgagaaaaaatggtcaccatcggtaataatcaggaaagcacaaatttaaagtacaatgaaatattatctcaccccagacagaatagccatattcaaatacataaaaatagtgctaatgtggatgaagataaaatgggacatgtatacactgttgatgagaatgtacactcatacagccactatggagagacgtatagaagttagtaaaaccacaaatgcaacaatcatatgatacagaaattttacgactgaacatttgtcccaaggacaggaaattaatatattgaagaggaaaatcaatattttgatgagatttcttcactcccatgtttattgcagccctgttcacagtagccaagtaattgaatcaaccgaagtgttcaatataaggtgagtagagaaagatgatgtggaatatgtacataatggaattctacacagccatgaaagattaaattgtgtcactcatagaaacttgcatgtaacatataagactctatgttaattgaaagagccaggaacagaaagctaaacaccacatgttttcactcccataaaatagtcaagaaatatccataaaacataaataattgaaattggacatgaactatagaaacaataattgtcacctgaatatttattttccttcaaataatatataattcaatgatagtaagaagagtcctgataaataaatcatgttgagataaagagctactgaattgtgcattccacactaaatggaaacaatgccataagatccagtgttgtgtaggatctgtttacctttttacctcaaatactacaagtcactcccttgttctaatcaccccgcaaaactgatattttgttgctttatgttatgtcagtaaaaatgattccacattggaagcttcatgtgttgctcagaaatcaccctgttgataaaatgagcacaactacagttacaacctttctgtagatattttctgcatatgatcctcactttttatttgttgtttttgttcacagtttctttaagcactcagagttatatagcatattttcagcatattttaattattttccattgttatggtcagtgctcctgtgggctcaagagtcaggtgttgtgtgactgccagttgacttcactgccacctttacctacacaaaacactgcaagatgaaccatgatgtgtaagaacccatccacaaagtgcttcaaataaagacaaggtgacttgtgtatagatttagtgagactggggaacagttcacggtgttatgttacagaggagcagaaaggtgaatctctctcggagttattgagggtgtaagagctgcagttttggagggtggtgaaaggcacttttgagtgggaagccctagagcatgtgtgaaagctgaaggaatgatcaccatgcacatggacgctgatgaggcatgtggtaaggtccattccctccagatgttcctggatgggcggttgtaggatggctcatgtatatgaaaatgtgggcagggctgaaataggaacaaggccatcatcccacgggaatgcgagaaagcaaaacagagatggacacccatgaagagagctcattagacctggtgaaggaaagataggaatctcttccaaaggctccgctgttcttggctaaatatgaattgtggtgatagactgaaaataaggaggggaagggagatatgactcaagagaggaaaaaccctaagacagcataaaccaaatctacacagaacaatcacatggtagatgccagggtggggctgaaacaggagcttcaatctactgggtacctagttgagatcctttgacatttcttgtgaggtaattctagtgatgatgaatttcctcagttttcctttgtctgggaagtatttctctatccttcatttcataagagatgttttatcaattttaggttcttggttggctgctttttccccccagaaatttaaatccagttatttgctgcataacaaagtttctgccagtaacagatggtggttccacggtgctatacttccttacttatctatatctctttatgtttagatacacaaataattactactatgtttccatggccaacagtattcactacggttgtttctgagtcactggggtgttgctttttctggccagaaccctctgtggccagtggcacttttgcctgagttcttgtcctacatgtggaaagaatgaagtatgcagccatgtggagggtaagcaagacaaagcctagcttcattaagcattagagcatctcagaggagacccccagtgagtagctcctctctgtaggcaggtagactggttgagtgttcagctctaagcagagagggtagctcctccctgcagccggtcgtcctgtggtcttcccagttctcaggagagagggtagctcctccctgcagctggtcgtcctgtggtcttcccatttctcaggagagagggtagctcctccctgcagctggtcgtcctgtcgtctctccatcctctgtcctgctccagctgaggccaggggtttttacggacctccgaggggaggaagtgcaagcccattggtccatgggtgctcatgggtgggccgtaggaagcaccacaagtcccgactctggtctgaggatctgggagccccggcccagccttcaggcccttcctggggacccgcccctgtgcacaggatcttcctgcctcctgttgtagttcatggtccctggggctccgccctgactttgctccaagatcagagcaggcaccagcagcaggaagaagccaggaagtgggagcaggcacttcggagcatgcaagagcacagggcttttcctggggaccccaagagtgcaggggcgcctgaggccgcagcccccggtttgcggagcagggcttctgccggcttcatggagcgagaggcccgtgtcttcagccgcagtttgggaggctgcagccacagccggggaggcagggctccttcctgttcctcgacctccaagagcacagagtccgagcccactgccctggtttgcgcagctggagccgcacctgagagatgagagctgctgcctgctcctggctcccaccggctccgtggagcatcagcccctccacccctccttgcagcctgggcaggggctcctgatcctctctgggccctggccggcgtccagggcaggagtgacatctccacaagctccctgcattgccccggtgctcagggaggcccgggcagagctgatgacgaccccggcccgtagtcgggagtggcggcctccatggtcaccctgacatgcggctgaaccctggggacgcggcccaagcagcctgcacagaacctcccaaggcccaggaaccccgcaccctaggcggggtgggcacagcggctgctccgctgcccgggttttcaaggaggcgccacttccacttccctccctggaaccccgaagtttgacatgggggctcctttctgccttgctccgcagctccccttcccccggagtggagccccctgtttccctggcgttccctcccacagctgcagtgttctccatcggtgtcatcaccttccagctctgctgccctgctctgcagactaaggctctgattccataagagaggggagctgcttcccagtagaaccttgctggggagctctgttcccatctcagttcctgaggggttaaaccagtgcatttaggatactggttttggtggtttgcccctgttgagtaatttcttagttctctagtgggtgtaagagacttggctctggaagcatttcagaagtgtgggctctgatacaccccagacagacactttgggaagggaagatttttgtgactattctcattataagggaaaggcattcaaaagaatagaaaaactctccagtatgtggttcctgagaatttctcactaaaaacatgcttatcacactcgactcaaaacagttcaatgtatattagtgtattttatcttgtactagcctttattgcatttggtgaactctgccccagttcagctcatactctagctttgattctccctacaaaaacttgtctctctctagatttcagatttgttgattgtcttaaaatttcaatgatctgaagtattaaagaaaatttgcaaaagtccattttctctgattaacagttattgttgattttattcttgttgtaaaaaaaagaaattctcatctatgtacatttcaaacctgaataacaaaatttttattaacaccaaaaataataaaagaatccaaatatttatcagctgcctaatagaaaaacaaatcatggtaacattgttcgctggaatattacccatcattcataataagggaatgtctgatacacaaaataagaagataaaattatcaagtatttaaattgagtaaaataagccaaacaaataagagtatgtatgattctatttttaaaaattctggaaaatgaaaactgatctaaagtaatataaagaagattagtagtttcctgggaatatgttggcagaagggaaggagaaaggataaggaaatagaaataggaagtagaaggacagaaaagaagttgagggaatttcacttgtccaccttccttataatggtaatagttatgccatgattatcagttttacactttaaatatgtaaagtttataatctgtcaatcaaatcttataaaatgtattatgaggaaacaagttgaaaattagacaatgtaggagtgacagaaagatagatatgagtatgttgaatgtcagagatacctgaaagtttatctacctgaaccctagttctctccatagtttaaggtaaacaggagagtgcaggaaaatcatccatattctgattaggcagtggcttctgcaaaccacactaggcctggccggctgtgtcctggagttggctaagggaggagtcagggccagtggtgagaagtgcaggcccagataccagaactcactcatcccagacatgagctcttagatacacagagagcccatccatgtgtggatttatcttacatctgtaagtagagaacattgactcttacagaacataatttacacacataggtaaatctgaaataaggtgatcagtgtgaagattttatcacagcacagtttcataataagcacaatttctcaaatcccattgttgtcacccatcttcctcaggacactttcatctgccctgggtcctgctctttcttcaggtgtctcaccccagagcttgatatatagtaggagacatgcaaatagggccctcactctgctgaagaaaaccagccctgcagctctgggagaggagccccagccctgggattcccagctgtttctgcttgctgatcaggactgcacacagagaactcaccatggagtttgggctgagctgggttttccttgttgctattttaaaaggtgattcatggagaactggagatatggagtgtgaatggacatgagtgagataagcagtggatgtgtgtggcagtttctgaccagggtgtctctgtgtttgcaggtgtccagtgtgaggtgcagctggtggagtccgggggaggcttagttcagcctggggggtccctgagactctcctgtgcagcctctggattcaccttcagtagctactggatgcactgggtccgccaagctccagggaaggggctggtgtgggtctcacgtattaatagtgatgggagtagcacaagctacgcggactccgtgaagggccgattcaccatctccagagacaacgccaagaacacgctgtatctgcaaatgaacagtctgagagccgaggacacggctgtgtattactgtgcaagagacacagtgaggggaagtcaatgtgagcccagacacaaacctcgctgcaggggcatctgagaccacgagggggtgtcctgggccctgtgaactgggctgctctccgtggcagcggctggtggtgctaaaggctgattttctctcagcatctggggctgattcatcaagtttcctcagagacctttcagattacaattctgtacttacgtttaatgtctctgaatgtgacactttccttccctggtgtgtctttgtttttgtgacaagaggacacattctcacctccacagaagcccgagtgtcactttggggacagaaatgaccctgccctggtcaccagaatcagagtcccgaggaagcccaggaggacctgggaagtgtttttcaatcagactcagggcaggcgtctccgtgggaatctctgattggaacaggctttgggattcagattgggaccaagagggaggctcacccagggccagggtccttagaatcctgacagttttcacagtaaccccatcgtcctttaaaactgaacatctaactcagaactgacccatttggtcctttctctgtaatccattttccttttctctaggcttcattcttacacttcccttttcaccttcattctgaaaatggagggtgtgcttcctgtggtctaaaccacaggcctcagatgcattacctggaactcaggtgtggctctggctatggctcctgtggacctggcaggctgagggatctttctcattccctggtgcctgcatgcccctgctgtcttctatgcgtggatgcatttgggaaatgcaagtggacactcatagtcgtttcctcaaatgggatactgttgtagagctgatcttgtgcttctcaccctgtcacagagcccccactctcacttgtggatttttgggagagctgaggatggacactttattgggctgtgagctctgcatgatggcaatcgtgaggtctgggtgggcacagccagagccaatggagctggccaaaaggaaagacaggacggaattcctgggaagtcctacagctgctgtctaccatagagttccattgtcttctcctctgctaggattaaaccagaccgaccaagttcatctaggacaatcttcctgacctagagaagtgatgacaggctttaataacacctgtattatacatcagagcaacacctagattagtgtttgattgaataattgagactatgtcctagtcaaggtgacacacaaaatcaattattaccatgattaatattttatattgattaatattttaatactaatattaatcaatgcaatattgatttaatattaattaatattttatatttgacaatagaatcagactcatgttataaataattttgcaaatatatgtatattattattggtcttctgagcataaatctccattagccgattaagtgtgcatgcattggtcgaaggagggcatccacccttttgagggaaaatgcatggagggtaaatgaggctgggaagctgatggcatatgatggaagcctgtccctgagtgaaggagagagggaggcaggattgggtggaactttcctacatttctgtgctgtgcaaagaaactccagattatcactgagtctcctgcaagtcaaagttgcccctcaggaaacccccatcactcccagcaatgactctgccccagatgagtgcaaggctcactctattcctgagaaaggagcacaggatatgggatttagcatgagccacgtcatggacgtcagagagcaggagctgggtgcatgatccaagtgcactgttctgcctgtaggtggagagaggaaggtgcattcccagagctaacacactgtggatttttatacagaatacacgttttcacctgatttattggaaggcatatgaaaaaatgtgcagtccacaaacaattgtaatttccaaatttaccacaattgcattatttcttcattctgcatgatgtcctggaacagagttacatttttcatgggtattgtttcatggattgaggacatgaatttcacacctgcctttttagccatgtgcagagaccttgagtagagcatgtctggacctcatctacactatctctcatgccccaagggaaagagtggagacttgactgactgcaaactttggggtgggagctgctcctgcacacctcagaggctgcagagaccccaagtgcagttttattgagttggggtgtctttctatgtgggggaattatgggctgccccactcctggtgattgctggtcagctctaaagacgggttcagaatgaggtcacctggtaacctttctcactgcagctccattatgtaaattaccactaccagattccaggtaataatgcaagctctatttttgcgacctcattttcttatcttttttgttcataagtttggttatagaaaatgttaccacctagtttcctgattcaaatcctataatttgctgaactactcaggatgttttttaatgtgcccagtatttgggaaatataaatgaacagccatgtgtggttcactgagtggacatagtcagttaagtacattagtaaaaacatgattgctgaattgtatagtgaaactacaattagatttgcagaaaattgcctccagtaatgtctgaagggagagccacccagccaatcccgtctctgggcttggaggaagctcactacacaggccaggtcacatgggtgatatccaaggtgcagctcccagcgttactgtgctattttccaggaaccagacatacaacttggcatctcagaagaagatctccaagatttcctttacctggacttcatgggcagcacaggaccagcaggagatgctcagaactcacccaaggcagaaccccagggaagagcaggtgcggagaggaaccagccagggaacctctgaccaccatctagggttgccttcttttccttcacagcatggagccctcaggagaccacccactaggttgtctgtaactcacgtccttcttgtcttgaagcaaaacagacataaatatgaatttgcagttagccccttgaacctgggtcaattttttctgagaatgccaacttaatcgtcaacatcatgggcattatatcaaaatcgagatggatatttagtcaccaggaagacagtttgtctcatggtagaagtgcttattcaattaaaaattacattttaatgaaaaggtctctaagtgaggactgttcaaataataaagtattagtgaagtatcagaaaaataaatggcaccattatctttggtatccagttaatctataaagcatatcaatattcatgttgtaagtggcctaggacaagttatggcagtatttaggctataaggagacattgctttccttcttagataggaatgtccttttttatcatactttaagttctggggtacatgtgcagaatgtgcatgtttgttacataggtatacaagtgccatggtggtttgctgcactcatcaacccgtcatcgacattaggtattactcctaatgctatccctcccctagccccccaccccccaacaggccccagtgtgtgatgttcccctccctgtgtccatgtgttctcattcttcaactcccacttatgagtgagaacatgcagtgtttggttttctgttcctgtgttagtttgctgagaatgatggtttccagcttcatcaatgtccctgcaaaggacatgaacaggaaattccttctaaatgaactgtgttttgacaaatattatccagtgactcttcctacatggggtttctacatgatctatttttcttttccaaaaacaaatcactcaagtttctcatctcctgagtgagaaaaattttccccaaacacaatctcagtctaggtagacaccttcatgaatgagccttcattctcagacaggcacacactgtccccatgtggatgcttctctcagacaggcacacatatccccacatggttgggatcatctgctgggactttgccccatggggatctctattatcactggggcaagttagcacctcgatcctcatccacactgtggcctttgatgtctgtgacctgccacaccctgtctgtccctcagtgtctagaatggtgaagtagtccaccccagggatggaggaagatcccagattttcctgtgaaggagacagaatgccaatcacagagatggaaatctctcacatccctcctgggtcatattctgggcagggtctctgaagtcacccctggatcagtgtcctaagatgtctccctctatttccttgggaagaacccatagaaagacaaataagtttttctattagggcatcgtagaacttgtgctttcttgtgtgacaaatataggtattttgactattttaaaaattagatataatattaagtctaccaaatatgtaaatatataagctttataatgtatccctagagggatgtctcctggaattgagaattgaatatatatatatatatatatatatatatattccaagataaatcttggtgaacattataaaattgactctaatatttatgttcaagatgatcatttcaaaaaagttttaacaacagagaccagatgtatctttccaccagaaataactgtaaaacacagtgaaattttttaaacatgattttaaggtattttacatcaaataacaaggacagtgattgctgaggtggggaaaatatacaaaaggagccctctgatgaacgcatgctttgctactttttaaagagagtttccaggccacagtgctgaagaggaaccaggtagatttgaagttgaggaaaaggagctgagatcccagacaggccaagaagtgtggagatcacagactagacagtggatagcagaacactgttcagagagtgagccccgtagatggccggagagagacccagccttggtagagtgtggatcagtgtatgggaaccctggaaagttgtacatgagaacacaccttactctagggggcttgccttaaaatctaaaattaccctaaaatttaaacataatcagttacaaattttaaaacataaagaaagacaccatgttaaagaaagataaaggaaaggtggatttgcaatattaaaatataaaaagtgtatttctgaacaaatgataatactgatgaggggggacaagtttattccatcacggcaaatgatttaagagaagaacattccaaatgcttatggccctaatgaggaagcttcaatcacgaatataaatagagttatctcattaccagtgtgatggtgtgagaaacttcaagatttccaaagagacaacctaatctggtaaaaattatagaaacccaacctgtactatcaaggaaaattattctgagaacacacagtaaatgaaatccattgactgacataaagtcctcctgttgactgaagggttatgaccccccacaaggcatatgttggaatctcaactccatcgtgacggtggcaggaggtggggcctttggtctcctttgaaaggtgttgaggctccgtttcatgaatggaatcagcgtcctgatacaataccccagagagctccctctttccttccaccaggtgtggtcacagtaggaaggtggcaatctataaataaagaattgggacatcaccagataccaatctttaagtcatctttatcttgaacttcccagccttgaaaattgggacaaatgcatttatgttatttctgagccacccagtccatgatatcctcttatagcaactcaaacagtcttagcaagtgcagtgaggatcacaatacttgagagaagagcattacctcttctttacatctcaggatcacagaatcttgaccttgggctgaactgacaagaaggtggtgcttccctctcccccagatctcagttgaggtcatgatgtcagatctttatggtggagactaaattcctgcctgtgatttgatggatgcctttctcctcccagcctcactcacaagacatagtttccatgtcaggtgttatagaccaagaacaggtggaccccgattattctcaccccagctcacttgtagggcagaggttctgggagcttcctgggagaggaacagtgagatcatacaagtccatcacttccatgcagttttctgtacttaaagcaggagtgtccttctgagctgcttgaaccctttcttctgcaccaaggtagagacttccatgtttttctagtgatacagtcagggcataaaaacagtgatagaaagctctctctaaagggcgtgaccagatttgcagtagaatgagaatagtttcaaccctaaagttcatctaaaatgttagtggttttcatggtaagtaattaatagaaacctgacagctccatgacagcaatatagaaatcaatagtccactcattttaacagagagaattagaaaacctataatttaagaataaccagctgggcactgtggctctgcctgcagttgaatttacttgggagtttgaggtgagaggatcacttgagcccaggatttcaagcgcagcctggaaacatagctagacttaatttcttgaaaaaaatcagtgctattttggggtcagaacaatcctcaaaaatggtccccggaaagaagcccaaatttaattgcaccagattgttgaacgatttatgctacaaaacagtgtcacatgtcagaaatgagcacagtgtaacatctacatggtttgttaagagacacaaatggtcaagtagaacaatcaggtaattaggctgtcgaaggcaacactgccaaatgacagcatttccgtggaaactgcgtgtacatccaggactgcacctgtgaacgatgacatcatacccttcacagtgtcgaggaaagagacatcactcaaacagacaagccaagggacttcagaaaatataaggggaaatacagtgtgcaaatatgtaaaaaatgcaataagatgattactcctaaatgaatatcaagacacaatcacataatatgaaattaaattttcctgaatgataggattactaccaatcaccccccaggacaccctcatctactctgtgcacagccttctcgtcaggcgtcccagcccagaccttgctatgtagcagaagacatgcaaataagacccccctttttgctgatgaaaagcagcccagccctgaccctgcagctctgggagaggagctccagccttgggattcccagctgtctccactcggtgatcggcactgaatacaggagactcaccatggagtttgggctgagctgggttttccttgttgctattttaaaaggtgattcatggggaactagagatactgagtgtgagtggacatgagtgagagaaacagtggacgtgtgtggcactttctgaccagggtgtctctgtgtttgcaggtgtccagtgtgaggtgcagctggtggagtccgggggaggcttggtccagcctggggggtccctgaaactctcctgtgcagcctctgggttcaccttcagtggctctgctatgcactgggtccgccaggcttccgggaaagggctggagtgggttggccgtattagaagcaaagctaacagttacgcgacagcatatgctgcgtcggtgaaaggcaggttcaccatctccagagatgattcaaagaacacggcgtatctgcaaatgaacagcctgaaaaccgaggacacggccgtgtattactgtactagacacacagtgaggggaggtcagtgtgagcccggacacaaacctccctgcaggggcgcgcggggctaccagggggcgctcgggactcactgagggcgggacaggtcccaggaacaggtgcagcggtaggttttctttctcctcagctggagaagtcaggtttgtgttttcagaactctggagtcttacaggttgctacattttcatacagttattagtatgtatttattatcattggtatttaagttttaataattttaaaccttttatgtagtgttattttttaaaactgtttactttcatttgcagttattcttccagagtttcattaacatctattgctatgagcaactacatagctatgagagcataaatttacacctgtagacgtaggtctaaatgccacaaacctgtgcataaatgtatagtgacttatatttaacattataataagataatttttaaaatatatcctaaacgatcaaacttactgatgaactaaatataaattatcagagtaatgcataattgatttcaataattttatattgtttatattaattaatatctatttctttactgaaacataatatattggtcatttcaaaatagctacgatacatttcaaatggccttgatgctaataatgaaaagattttgaggtgattaatatgctaattagttatatttaattattccatattgtattaatatatcaaaacattgctttgtacctcataaatagatacagtcgtaatttgtcaattttcaagacagttatttaatccatcctgggtcataatctttttttcccctgtccatggctgattggattgtcctgataaacccatccatacgcctgcctcccgcaggcttctgagacgggctccatgaaggccagaagcaggcaccctgtgagagtccacacgacctggagcctccctctccttggattaggccatctcctcgggatcgcagggctcttcattatcctcacccccttgttgtaccaaacaagcaacatcacactttaattcatcacgctttgctttaattttccccccaaaaatcaaggtaataattttagcaataaacatcacaacctactatgagtaagtcctttccaacgtactaaggtttcttctgaggactttacatgtattacacagtttaaatttctttatgaaatgagataccaatatctctatattagagattgtttttctaagtcgtttctgacaattaatttgtccaagggcctgtaaggattctgttagaaatccaggataaaatttgaaatttcagcagtaatatctggaaaaacattgagactatatttaacttcgtacacgtgctctcaaatatccttatttccctaaaggttgttctcagttattattttacacatgatatctataattaatactaataacacaggttaaaatattatctcaattatttaacgacttttgataataacaaaatacatattccacatatttttgaccagtttgttttctctatgaaacacgtgtttattaacttattattatcagatgtcacccttatctttctgatttctgggatttaattctagcaggtatcgtttagtatattttattaattcatattatattgttcacattttcagtatgattttattatttgcattgtttattgaatttgaaactttcttacataatttttttaattttttattttcatgagatgtaatttcaatataagtaataatgcatagatctgcaatgtaccattacaggatttctggcaaatgtaaacacacttgtccccaacagccaaggttggatgtagaggaggcccattcccccagcacaagcgaccttctctgtgcttccagtcagctcccacatttaacacaatgttttgatttctgccactgtagattcactgttcatgttttgattttcatataaatggattcaaacattatagaccccttttctggtaaggggctacttttgttatttttgacgtttatttatgctatttcatatgtaaaattgcatctgtatattgtcatttattcacttaacagactgcctctgatataaaatctcaaagttttgatatatatggataaagagagagggagagagagagagggagaaattttatacttgagtcagtgcatttaacaataaacgacagtaagctgatccatttccctgtcaatgcacttttaatttgtttctggtttattaacatcataagcaaagctgctgcacatattttttgtttttctatttaccttttctcatttttattgagaaagtatgtggaaatatccatttcttcatcataaaagtaaacttcatttgttcagctttatggaactataattgacaataaaattgtatatatttgaggtgcaccacttgatattttggtataaattgtgaaattttcactatgaccaaggagttagcatgtctgttaccctacatttgccattttcttcctttaatttatatgtgtgtgtccaatgagagcacctgagatctatccctttaccagagatcaagtttgcaatacagtgttgatagctatagtcccattgctttacattagacctccagaacccattcaacctgcacaactgaaactttatgcccttgacaagaatcattctatttccactcctcccagccctgggaaccacttttctactctctgcttctaagaatttgaatattttagattccccatataaatgagataatgcagcatttgtctttctgtgtctggcttattccacttagcataatgttctccaggcccatccatgttgttggaaatgttataatttccttatttttagaggtcacataatattccattgtatgtgtatacatttgctttatacacccatttacctacggtcactaactttaaaaaaattctaggccattatgaataatcttgtaataaacatattttttacttactgattttatttcctttgaatacgcagccagaagtgggatcaccagatcacgtaatagttttactttcaatttataaaataacttttactaccactccactgaataattctcttttcaccagctaactgtcagcattttgttatcttttgtgtctgtgataatagtcatggtaatgaacgtgaggtgatatctcattgtggttttgatttggattcccctgatgattagcaatgtggaacacctttccatgtcctgctggccatgcatatgtcttcccttgaatacaatgtctatgtacagttttgccctcttaaaaatcaggggttttttttgctattgtatgggttctttacacatttagatagatccctttgtcagatatatagcttcaagtaatttatttgtctatgattttggtgtcgaatccaaataaatcattttccagatcaactctggaaagcttcttttttccctgttttcttctatgagtttacaattttagatatcatattatatccaagccttgagtacatttttaggtgatttttgtatatgagatgagatgaggtctcatttttttctgcatatggatgctcagtttttacaccatttgttaaaaaggcaatcttttccttattgtgtgtccttggaacaaaaaatctgggagatacacaaaagaggaaaatcttagaccaatattcctgatgatagacctaaaaatcttcaagaaaatactaggaaattgaatatagcagcacattaaaaagttattacattatgatccagtagattttactcctttcatgcaaggctagttcaacatacacaaatcaataaaggtgctccaccacataagcagaatcaaaagcaaaaactatataattatctcaatagatccagagaaactttcaataagattcaacattcttcatgataaaaaccttcaacagactagacatcaaagaaacttagcttaaaatgataagagccatgtatgacaaacccacaactgacaccatactgaatcaacaaaagctcaaatcattccccttcataactggaacaaaacaagaatacccactctcaccactcctattcaacatagtagtggatgttctagccagagaaatcaaacaagagaaagaaataaaaggcatccccacaagtaaataagaattcaaactatctatttttgctgttgataggatcctatgcatagaaaattctatagactctgccaaaagaatcctagaattgataaacaactttagtaatgtttcaggatacagaataaatatacgaaaatcagtagcttttttatacaccaacgacatccaggcatagagaaaaataaatgacacgatcccacttacaacatctacaaaaaaagaaatacctaggaatacagctaaccaaggaggtgaaagatctctacaagaagaactacaacctctccagcacatgttgtttcctgactttttaatgatcgccattctagctggtgtgagatggtatctcattgtggttttgatttgcatttctctgatggcgagtgatgatgagcagtttttcatgtgtctgttgactgcataaatgtcttctttcgagaagtgtctgttcatatccttcacccactttttgatggggttgtttgtttttttcttgtaaatttgtttgagttcattgtagattctggacattagccctttgtcagatgagtagattgcaaacattttctcccattcgttaggttgcttgttcactctgttggtagtttcttttgctgtgcagaagctctttagtttaattagatcccatttgtcaattttggcttgtgttgccattgcttttggtgttttagacatgaagtccttgcccatgcttatgtcctgaatggtattgcctagattttcttctagggtttctatggttttaggtctaacatttaagtttttaatccatcttgaattaatttttctataaggtgtaaggaagagatccagtttcagctttctacatatggctagccagttttcccagcaccatttattaaatagggaatcctttccccatttcttgtttttgtcaggtttgtcaaagatcagatagttgtagatatgtggcattatttctgagggctctgttctgttccattggtctatatctctggtttggtaccagtaccatgctgttttggttactgtagccttggaaacaacaggtaacaacaggtgctggagaggatgtggagaaataggaacacttttacactgttggtgggactgtaaactagttcaaacattgtggaagtcagtatggcaatttctcagggatctagaactagaaataccatttgacccagccattccattactgggtatataccaaaaggattataaaccatgctgctataaaaacacatgcacacgtatgtttattgtggcactattcacaatagcaaagacttggaaccaactcagatgtccaacaatgatagactggattaagaaaatgtggcacatatacaccatggaatactatgcagccataaaagatgatgagttcacgtcctttgtagggacatggatgaagctggaaaccatcattctcagcaaactatcgcaaggacaaaaaaccaaacaccgcatattctcactcataggtgagaattgaacaatgagaacacatggacacaggaaggggaacatcacacaccggggcctgttgtggggtggggggaggagggagggatagcattaggagatacacgtaatgctaaatgatgagttaatgggtgcagcagaccaacatggcacatgtatacatatgtaacacacctgcacattgtgcacatgtaccctaaaacttaaagtataattaaaaaaaacaattacaacgaaaatccttaatgtctcttgagtaggtagagaacatatattttatctaagtaacttgctctaaactgcaaaccaaaataagatgattcaataaagtattttgtaaactagtctttagcaaaaaaaaaaaaagaactacaaaacactgcagaaagaaatcagaaagtaaacaaataaattgaaaaaaaaattccatgctcatggaatgggagaaataatattgcaaaaatggcaatattatccttcaatatttatcgattcaatgttattatcaaaataccagttttattcttctagaaatataagaaaagtattctaaaatttgtatgtaaccaaaaaagaacaaaaacagccaaagtaatcctcagccaaaagaacaatgccagggacatcacactatttgacttcaaactctactataaagccacagtaacaaaaactgtttggtacttgtacaagaataaacacatagacaaatgaaatagaatagaaaactcagaaataaagctgcacacccacaaccatctgttttttgacaaccctgaaaaaaataaacaagcaatggggaaaagacaacctagtcaataaatggtgctgggataacttgctagccatatgcagaagatgggaacttgactcgtgactatcaccatatgaaaaagaaaattaactcaaaatggattatagctttaactaagacttcaaactacaaaaagctaggaagacaacctaggaatactcttctctgcattggccttggcaaagaattactggctctgagaccaggcattttttgtaacagtgatttattttctggggtacatatcatggagtgggattgctgattgaacgatagatctattttagttgcttgataagcctttacaatttttttcacataggttgcactaatttacattaccaacaacagtgtataaatgcattttctctgaattctcatccatatctataattttttgacttcataataataggcactttgactgatgtaaagttgtgtctcactgttgttttaatattaatttatctaatgattaatgttgttcagctttttatttccatatgctttttggccatttgaatatcttcttcacaaaatgtctgttgatgtcttttgcccacattttaatggtgtaatttatttatttgttgttgttgctgagttgtctgtgttcttgttagattctagatgttagttatttattgcacagtaatgtaataaatctaaaagtcaggaaacaacaggtgctggagaggatgtggagaaataggaacacttttacactgttggtgggactgtaaactagttcaaccattgtggaagtcagtgtggcgattcctcagggatctagaactagaaatatcatttgacccagcaatcccattactgagtatataccatcccatgactgggtatatacccaaaggattataaatcatgctgctataaagacacatgcacacgtatgtttattgtagcactattcacaatagcaaagacttggaaccaacccaagtgtccaacaatgaatagactggattaagaaaatgtggcacatataccccatggaatactatgcagccataaaagatgatgagttcacgtcctttgtagggacatggatgaagctggaaaccatcactctcagcaaactatcgcaaggacaaaaaaccaaacaccgcatgttctcactcataggtgggaattgaacaatgagagcacatggacacaggaaggggaacatcacacactggggcctgttgtggggttggaggggcggtggggagggatagcattaggagaaatacctaatgttaaatgatgagttaatgggtgcagcacaccaacatggcacacatatacatatgcaacaaacctgcacattgtgcacacataccctaaaacttaaagtgtaataaaaaaaataaaattaaaaaaatcaattgcaaaaaaactgttgaaactatgaaaatatgaggtaattaaacaacacaattttgaccaatcattggctcaccaataaaattaagatattaatttttaaaaatacaaagaaaaatgaagccacaacataccaaaccctctgagatacaggaagagcagtactaagagcttatagttctaaatgtctatgaaaaaatagaaagattataaactagcaatctattgatttacttcaaggaactagatattttagaacaaaccaaccccagagctagaagaagaaaataaataaagatcatggcagatttcaaaaatattgaaacaaaaaagcaaaatataaggaatcaacaaaacaaaatgtggttattttaaaacatgaacacaattgatagagcactaactaggtcaacaaaaaaaaaaaacagaagattcaagttagcacaagcagaaatgataaaggtggtattataactgacccaatggaaatacaaaagattatcaagacatactgaatatgtctatgctcacaaactagaaaatctagaggaaatcaataaatttctggaaatattcaactaccccccaaaattgaaccaggaaggaaaagaaatcctaaatagaccaatgcgagtaataagactgaatcagaaactgaaaatctcccaaccccaaaagcccagaaccagataaattcaaggtctaattttaccagatgtaccattcttactggaactattccaaaggattaaagagaagagattctttcccacctttgtctaaaatactcgtatcacctaataccaaaatcaggcaaggatacaactacaacaacaaaaagctacagggaaatatccctaatgaacatagatacaaaatagtaaacagaatactagctagctgaaaccaacagcacaataaaagataatacatcatgaccaattgggttttattccagggatgcaaagcttgtctaaaataaacacatcaataaatatgattcaacatataacataattaaaaacagaaaacataagaccatctcaatgaatgcaaaaaagtcattcaataaaattcaatatcccttcatgaaaaattcctcaacaagcttagcatcaaagaaacctacctcaaaactataaaagccacatacaacaaccaacaaaaaactcttaaataaatcaatagaacagggatcttcttaaatttagtaaaaacctatgcaactgatttattcaatatgctggacttggtagtgaagaaatgaatgactttaactaaaaaaaaaagccacatataacaaaacaacattatatggaatgagaaaaagttgcaaaaatattcctgaagaacgtgagcaagaatgcacactttcaccactcctactggacgtattactgaaagtcctagccagaataatcagaaaggaaaaaagaaatgtatgtttcaagttccaagctaaggaatccaggagtggcagacccagagacttgttttttaatctatgaataacatccaaacccctgaccgatcccttggaacacaggatttaggggtgattgaggctctttcttttgggttaaatgaaagttgctaggtggagggtgttaagtaaaaattactacataagctgcatagttttgtcaaatggttgtagttttcttgtccagcctgctgttcctgaaccaccctatatgaaagccctcaataaactatatgtcttgttcactggtttggcctgttgtacacgatgccagtcctattggagtccatattggtctggcgtgacatccagtcaacctggtaaaaggtccaaaaaaaatctcatgagcacccagacaatggaatctaaaaagaggagacccctgcagaaaccttgggcaggctgttaatttctacgtggggcccaacagccgttatccatgatggatggggcccagtgcctgagtatggggataccgccacaatgccaaaagttctggaagaacctcttcagtgggtgcatcttacaaagtgaaagtcagatgtccaggctgttgcattatcaggtgagtggttcttcctgactgcactctgagaagccactgagacagtgctcactgtgtatgctacagtgtgtcagtcacaagaagagctactcctagaaaaacatgccagactagctcagactaatcagagacctttctgtcctgcctgtggaagcagaatggcaaattggggaccgccgcttgtggagcagcacatttgaaggatttctggccatcacatgaattagttacggctgtgatgactaaactgtcatgggaccctaagacctagttcccataaagagttctagggggaggaggatgaagtttggggtaagcccatgggggttcctgtcctctctacacatctggtggctaccaccaaggtaaaaatgggccaactgcaccagcagaggcgagccccagagacatttcccacctgaaataaggaaacacaccacaatgtgggattccaccactgcggaattgctgacacttagaaatgggttcagacagaagaagagagagttgatcacagggtggcttcttcatctgtgaggcatgcgggaggagggcattatactccctgaactcaagattagtaaagtgacatccatcacaaaccatctgggcctgaggcagcacctcgatggtgtcagtcatggagattggaccatccctctccttagctgggtggttgcagactgcaagggaccctggtgaaacgagggagatgtccgctttattagtgtgttctcgtattgctagaaagaaatacctgaaactgagtaattcacatagaaaataggtttaatttactcatgattctgctggctgtatgggaagcatgatgaaaaatctgttcagcttctggagaggcctcaggaaatttacaatgatagtgaaaggcaaaaggggagcagccactttatatggtgggagcaggagcaaagaaagagtgagggtggaggtcccacacactgttaaacaaccaaatctcatgagaactcatttactatcatagcaaggggaccgtgctaaccattattcataaatccggacccacgatacaaccaccgggccccgcctcaaacattagggaagcaaaatcacatacagttgttatgacaggtgggacatcctgaaaacctctctaggcatgtcccacacggccctggagctgtctcaggggagcagtctcctccagtgtttagacgcacaggcacggataatagggctaagtctggccagatgtgtgatattcaacacattgcacaactgctctgttctgtatgtaatttatcttctctacaaatgtaacattgatggttgcattaaatatattctgcaaatatgtaaaaataaaataagatgatgattgctaaatgattatcaaggcacaatcacataatccgaagttacaatttcctgagagataggattactgcccatgcttaccaggacactcacatctgctctgggcactgccttctcctcaggcgtcccaccccagagcttgctatatagtaggagacatgcaaatagggtcctccctctgctgatgaaaaccagcccagccctgaccctgcagctctgagagcggagccccagccccagaattcccaggtgttttcatttggtgatcagcactgaacacagaggactcaccatggagtttgggctgagctgggttttccttgttgttattttacaaggtgatttatggagaactagagatgttaagtgtgagtggacgtgagtgagagaaacagtggatttgtgtgacagtttctgaccagggtgtctctgtgtttgcaggtgtccagtgtgaggtgcagctggtggagtctgggggaggcttggtccagcctggagggtccctgagactctcctgtgcagcctctggattcaccttcagtgaccactacatggactgggtccgccaggctccagggaaggggctggagtgggttggccgtactagaaacaaagctaacagttacaccacagaatacgccgcgtctgtgaaaggcagattcaccatctcaagagatgattcaaagaactcactgtatctgcaaatgaacagcctgaaaaccgaggacacggccgtgtattactgtgctagagacacagcgaggggaggtcagtgtgagcccggacacaaacctccctgcaggggcgcgtggggccaacagggggcggtcgggaaccactgaggacgggacaggtcccaggagcaggtgcagggggcggtttcctgtcagctgcaggaggcgggtttgtttttgcaggactctggagccttatgaggttgcactattttattatggttatttatcatgtgttttttattgatatttgtgttttagtaatttttacatttatatgtaggggtattttttaaaaatacataacttcaagaaataattcttcctagtaatttacacctattcctctaaagttttattaacacctgttgatatcagcaactacatagctatgcaacattaatttacatctataaacatatgtgtgaatacatgaaactatgcatacatgtgtagtcatttatatttaacattataataaaataataaattaaataaaataattgaattaaattaaaagaattaaacttaatgatgaactaaatataaattagagtaatccataattgatttcaatccttctctatggtttacataaatcgatgtctacttgtaagcttaagtatagtgaattggtcattttaaaatagccaagaacaaatttcaaatgttcttgtcaccaaaaaatgataaggatttgaagatttgaggtgatatatatgtcaattagctcgattcaattattccacattgcattcataaatcataacatagctttgtaccccatcagtatatggggtacaaccaaaatttctcaatttccaatgaaattttaattatatattttttaatttgatgcctctctttggatcaggccacctcctcaggattacagtgctgttcagttttctcaacatgctgttgtaccagataagcacaaaacatttaatttcattatgctttgctttagtttttcaaaacaacataaaggtaataattttcccaacaaacatattacagcctattctatacttttttattttttgtttttatgagataaaatttacatgtaagaaaaaatttatagatctgaaatgtgtcactagagagtttctggcaaatgtgaatacccttgtcccgaacacctaaggtagactaaagagcaagtccatacccacaacatgcgtctttctctgtgcctgcggtcaacccctacatggggaagtgttttgatttctgacaccatagatccatttttttctgttttgagctttatataaatggaatcaaacattatagacctttttttggtaagggactactttgctattttttaggttaattcatgctatttaatgtatgaaattagatcatcatagtgtcatttactcaattaatgggctgactctgatatgaaacctcaaagtattcatgtatatatggagagagagagagggaggaaggacagagattttatatctgagacagtccattgagtaaatatatgacaatatattgatctatttgttgtcgatggattttacatttgtttccagtatatgaatattataagcaaagctgttacaaatacattagtgtaagtttctctatctatgttgtctcaattttgttgagaaaatatgaagtatgtttttctctattgtaagaggaagtttaatttttttcagttttattgaggtaaaaataaaatattttttaaaatgtataggtttaaggtgccccacttgacgttttgatgttgtattagtccattctcacactgctataaaaaatgcctgagactgagtaatttgaaaaaaaatatgtttaattggctcacggttctgcaggctgtacaggaagtgcagtggcttctccttctggggagagtcaggaaagttaggatcatggcagaagacaaaggggagcaggtgtgtcacatggccagagcggaagccacaggaagcggaccggggtgtggggggactgcacactgttagacaactagatcttgtgagaactcaggcactgtagtgagaacagcaccaggagtcggtgctgaaccactcatgaaagacccaccccacgacccagtcatctcccaccaggtcccaccccaggactgaggattataatataacatgagatttggtccaagacacagatccaaaccatatcatatgcacattgtgaaatgctcatcatggttaaggtaatttgtatattcatcttctcactattttttgtttgatttttgagacagagttttgctcttgtcgtccaggctggagttcaatgtcaccatctcagctcactgcaacctccaacccctggattcaagggattctcctgcctcagcttcccgagtagctgggattacaggagctcaacaccacaccccgctatttttttttttttttggtacttttagtaaagacagagtttcgccacgttggccaggctggcctcgaacagctgacctcaagagatctgtccgcctcggcctcccaaagtgctgggattacagatgcaagccacagcgcccagccaattttattattttaaaaatgtactgcatgtgagtgtgtgcgtgtgtgtgtgtttcatgagaacacctaagatctacccttttagcaaaaatcacttttacagtacagtattaaatacaggaaaattggcgtaggttagatctccagaactcattcaccctgcacagctgaaactctgtaccctctgaccaacttcacccaatttccctctcctcccaggtcctgggacccactattctactctctgctttcaagagcttgaatatttcagatcccacacgtaaatgagatcatgcagcatttgtctttctgcatctggcttattccactcagcgtcatgtcctccaggcccatccatgttgcaaaagccagaacttccttcttttcaaagctaaataaaattcagttttatgtgtacacattttctttaaacattctttaatctatggtcattaaactctttcacaaatctacactattataaataatctggcagtgaacatgtgtttaacataataattttatttcatttgaatatataacaagaagtgggatcaccagatcgtacgataactttatttttcaatttattgagtaacaagtcctaccacaccatatcatgatttcctttcccaacattcttgtgaacacttgttatattttgtcttgctgataatagtcattttaagtggtttgaggcaatatttcatcgtgctttagatttgaatttctctgaaaattagtaatgttgggaacctttttaggctctgtttttcatgagtgggttttctgaaaaaaagtctatccaggttttttcccttttatcaggtcgtttgtaatttgcacatagttttttttcctgtgcttttggtattaaattcaaataaatcatttctgaatcaatgacaggaagtttttccatgctgtctatgagtttgtggtttcaggttttgctcatttttagttgatttttgtacatggtgtgagagaaggtctaattttatttcttctgcatatggatgtccagttatacatcatttattgaggagactgtctttcttcactgtgtctttttggcatacaaaatcaggaagagacataattaaaaaagaaaatattagatgaatattcgtgatgaacatagacctaaaagttctcaacaaaatattagcaaatagaatccagaagcactttaaaatgtaacacatcatgatcaagtgggctttaccctgggatgcaaagttcattcaacatccacaaatcaataactgtgattcattgtgtaagcagaataaaagcaaaaaccatatgttatctcaatagatgctgagaaagcttttgatatgctccaacactcactcataataaaaaccctcagcaaactaggcatcaaaaaacatacctcaaaataataagagccatctatgaccaacccacagtcaacattatactgagtgagcaaaagctcaaaccccatgagaattggaacaagacaaggatgccctctcaccactcctattgaacatagcactgaaaatcctagtcagggcaaccaggcaatagcgaaaataaaacgcagccgatatggtttgtactagtgccccattcaaatttcatgtcaaattgtaattcccagggttggggctggggtctggtgaagggtgattctatcatgaggatgggtctccgtctcttgtgctgctctcgtgatggtcctcaggagatctggtttcaaagtatgtgtcatctccctcctctctcttcctcctgctcctgccctgtaagacatgatgcttccctttctgtcatgattgtcatgttcctgaggcccccccaagagccataattcctgtacagcctgcagaaccataagacaattaaaaacctttatacattacacagtctcaggtgtttctttagagtgtgcgaatggactaatacagaatcaaaataggaaaagaagtcaatgtatctgtccaaattgatgatataattctatacctagaaaattctaaagactctgccaaaataattctagaatagataaacaactttggtaaagtgtcgggatacaaaatcaatgtacaaaaatcactagcatttgtgtaccccaactacatccaagctgagagtgaaatcaagaacacaattctatcccacttacaatatccacaaagaaaaggaaatgcctgggaacacagataacaaataagatggaagatccctgcaagatgaatgacaaaacacagcagaaataagtcataaatgacacaaaaaatgggaaaacatttcatgctcatgattggaataatcaatattgtaaaaattgtcatactgccaatagaaatttacagattcaatactattcacataaaactatcaccatcattcttcacagaattagaaaaaaaagtatatatattctaaaagttatatggaaccaaaaagcccctgagtagccaaagcaattctaagcagaaagaaccatgacagaggcaacatgatacctgactttaaactacaccataaagtcacagtaaccaaaacagcttggaagtggtacatgagcagacatgcagaaaaatggaacaagagagaaaacagaaataaacctgcacacataaaccatctgatatttgataaggctgacgaaaacaagcaatggggataaaactctgtattcactaaacggtgctgggataactggattctgtcagatatacagaatgcaaaagtgaaggaggctgggcagcttcgacttagatttcagaggatatgtagagggccctgcaggcccagcaggaggccggctgcagcagtgcagccaccacagacagcctctactaggacagtgccaaagatggggaaagagagggttggagccccaattcacaatccccactagggcattttacactaaagctgtgggaatgtggccacgaccctcaaggtccctgaatggtagaaccaaaggcagcttgcactctcagcctggaaaaacttctggtactcgactctaacctatgaatgcaggccaataagctgtgctcagctataaggatgaaaagcctgaggtttctgggactccttcaacccagggtgccctggttgaagtacatcaagtgaagcgagattattttgtagctttaagatttaatatctgcccagacaggctttaggtgtgtggggggcctattggccattcctttggacatttttttccttttgtattaacaatatttaaccaatatctgtggcagtcttgcatgttggaagtaaataactctttaaaacattttgccagctcatagctggagggaaattgccttaagactcggataagactttggaattttcagttggaggttgaccaagttaagacttttggaaactattaaaaaaaaaagatcattttgcaacctctgaaggacgtaagatcagggggcacaagagtgaaatgatatagtttagatgatggtcccctccaaatctcatggcgaaatgtgctccacaatatttgaggtggggccgactgggagattttgggacatggggaaaaatccttcaggaatggctcaataaccaccctatggcagtaggtgaattattcctgtattaactactgggagatctgattattaaaaggagtctgatgaccctcctcccctctcacgtccacccctcaccatatgacaccgcctgcttcccctttgccttccaccataactgtaagcttcctgaggccctcacaagaagcagatgctggtgccatgctcctcacacagcctgccgaactctaagccaaatgagcctcttttatttgtaaattacttggcctcaggcattaatttagagcaatgcaaaatagactaaaacacactgcccaaagcaatatacagagtcaatgcagtttccatcaaataaccaatataattaagtacattttttttaaatgtcctaaaatttatatggaagcaaaaaagagccttttgattccatataatagcaaaagccgtcctaagacaaggaaacaaagctgaaagccccacattccctgacttcaaattatactacacagttataggaagaaagacagcacggtactggtaccaaaacaaaacaaaaaatattagaccaggtgtgcctgtaatcccagcactttaggtggcagaagctggtggatcacctgaggtcaggagctcaagaccagcctgaccaacatggtgaacccctgtctctagtaaaaatatgaaaaactagccaggcctagtggcccatacctgtaatctcagctacatcggaagctgaggcaggagaatcacttaaacccgggaggtggaggtttcagtgagctgacatcttgccattgcactccagcctgggtgacaagagcaaaactccatctcaaaaaaaaaattaatgtaacagaatagagagcccagaaagaaagccaaatatctacaaccaactattctttgacaaaactgacaaaaatatacactggagaaatagtcctctattcagtaagtcgtgctgggaaaattggatggccactcatagaagaataaaaccaggcttctatctcaccacagacaaaaagtaactgaatatggattcaataattaaatgtataaactgaaactataaaaatacttgaagaaaatgtagggagaattctcgggacattggcctaggcagataaaatatgactaagacttcaaaagcaaatgcaacgaaaacaaaaatagatgaagaggacttagttgaactaaagatcttctgcagagaaaaagaaataatcaacatggtgaacaaacagcctacacaatggtagaaggtatcacttcatctcagttaagaaggctcttatcaaaaaagaaaaaaaacagccaggcgtggtggctcatgcctgtaatcccagcactttgcgaggccgaggcaggtggatcacttgagatcaggagtttaagaccaacttgtccaacatggcaaaaccctatccctcctaaaaatgcaaaaattagctgggcgtgttggccagcacctgtagccccagctactcggtaggttaaggcaagataatcgattgaacctgggagttggaggttgcagtgaggtgagatcacgccactacactccagcctgggtgacaggagtgaaactctgtctcaaaaagaaggaaggaaggaaggaaggaaggaaggaaggaaggaaggaaggaagggagggagggagggagggagggagggagggagggaggaagggaaagaaagaaagaaagaacgaaagaaagaaagaaagaaaaagaaattaagaaagaaaaaaattaagaaagaaaagaaagaaagaaaaagaaggaaagagagaaaaaagaaagagagagagaaaaaaggaaggaaggatggaaggacagaaggagggatagaaggaagaaaaggaaaggagaaagaaagaaaaaagagaaagagataaaaagaaataaagagagaaagaaagaaaactaacaaatgctggtaaggttggggagaaggtaaactagtacagtcagtcactatggagagcagcgtggaggtacctcaaaaaactacaaatacaactaccaaacgacccagcaattccactactgcaaatgtatccaaacgcatgaaaataattatatcagagatttcttactcccagtgtatatggcaggacctttcacaatggccaagatatgaaatcaaaccaggtgtcagagagcagatgaatggttaaagattatgtggtgcatatacatgatgagatgctcatcatccacaggaaaggaaatcctgttgtttttggcaatgaagacggaactggaggacattatgtgaaatgaaataaaccaggaacttcaagtaatacaccttgttttctcactcatacgtggaaggaaaaagaaaatttgtctcatagaaataaatagtagaacagaggatactagagtctgggaagtgcaggggaagagataggcagagatttgtgaaggaatacattagagttaggtgggaggaatagattataatgttctttaccactgtgggataaatgtatttaacaattatatgtagtttcaaacagttagaagaaggatattgagtgttcccaacaaaaagaaaatgtttcagatgacggatatattaattatccttatctgtcccctacacactgtttcacaacatcgctatgtacctcatgaatatttacaatcattatttgtctattaaaattatattagaaaacacaaaattcactggaagtaacataaatggaggctctgggatagacctggagataacggagggtctgggatacattacaggcctagcactcaatggtcagaggagctcccattagctttttgtatttgtagcactgagtaaatctaacatttctcagagcttccctttgcaatagagacgtgaggcctagggagatcttgcagatagtcagatatgcagagggaagaagcaggggtagagggttgctggcccattcaacaatagttggaatgataattacgcatgtagagaagccaacattgatttaaataagttgcatcactgaaagccatgaaaaaaaatccaaaggaaatctttaaataaaattgagagtgaaactgttttgggtgaagaaatgttcactgaagttaggtgtgccagtaaagctgttaagaactacagtaaccactggattggattcagctttgtctgaattcagtgtgattattactggctcaggcaggggtcagaaatcaacatggataggtggtagcaacacgaaaaagccagggaccagaaagattcacagccgaattttttcagatgtataaagaagtgttgctaccaatcctagtgtaactatttcccaaaaatgaggataaaggtctcctccctaaattattccatgaagccagcattattctgataacaaaacctggcagagacttaataaaaaaacatgactttagaccaatatacctgatgcaaaaatgctcaatgaaatactcacaaactgaatacagcagcacatcaaaaagcctaacctaccaacactttgttcctgggatgcaaggttggttcaacatatgcaaatcaggaaatgtgattcatcacataaacagaacgaaaaacaaaaaccatgttaaccggcagggcacggtgactcatgcctgtaatcccagcactttgggaggctgaggcgggcggatcataaggtcaggagctcgagaccatcctggttaacatggtgaaaccccgtctctactaaaaatacaaaaaaattagctgggcatggtggcgggctcctgtagtcccagctactcgggaggttgaggcaggagaatggcgtgagtccaggaggtggagcttgcagtgagccgagatcacgccactgcagttcagcctgggcgacagagtgagactctgtctcaaaaaaaaaaaaaaaaaagaaagaaaacgttaaccatagacacagaaaaggttttgaaaaaactttaagattctttcatgttaaaaaccatcaaccaggcatgaaggaatacaccacaaaatataagggccatctatgacaaactcacagccaacattatactgactgagcaaaacctggaagcattttcccctgaaaactagaacaagaaaaggacacccattctaaccactcctgttcatcattgtcatggaagtcccagccagagcatgcaggcaagagaaagaaataaaaagcatcaagtcaggaagagagggtgtcaaactatccctgcagatgaaatgatcacattcctgagtctgtagtttggtgactgacattaatttaaaatattgtcagtcatcattgtttaaatatttcttcttagcctttctctatttttttctatttcccattatgtgcatgttatacctctgtcactgtctcaccattcttgggtaagctgttcttcttttgtatatatgtgtgtgtgtgtatatatatatatgtatatatgtgtgtatatatgtatatatatatgtatatatatgtgtgtatatatgtatatatgtgtatatatgtatatatgtgtatatatgtgtgtgtgtgtgtctgtgtgtgtgtatatttgtatttgtgtgtttactgttctaacaatatattttttgtttttgcttttcagtttgggaaatttctattgagatagttttaagttcagatttttgtccgcagctatgccccatctacatataagtccattgaaagcattacttaattctgttacaaaattcttgatatctacttttttttccttttttggaatttgcttcattctacttgcatgacacagctgttccagcatgctgtctgcttaattcattacagaccttagcatattaatcacagtggtcttaaattctttgtttggtaattccaaactaaatggcatggctgaatctcattttgatgcttgttttgtcttgtcacactatgatatatttcttttagtatatatcatgatttttatagggagaaattatgtatcaggtgaaagaaactgctgtaaagaggcctttagtgatatcattgtaagttgtggagagaaacctgtttcataatcctctggccatggcttcatctaggaagcttaaggcctttgaaaataaatccttacatgaacgtgaaaagataagccacagatatggagaatttcctcacaaatcaaatatttggaaaaggacttttatcaggaataataaaaattaccttacagttgaatgacaaaaccacatgatctaattttaaaatagacaaagacctgtatagaaagaagcctcatctaaaaataaatataaaaagtgatcagcatgatttttaggtatatgtatgtttaatattcaaaaaatactatatcctgttagaatgggtaaaatacacattttagacagtaccaaatggtgatgaggaagttgaaaaacaggaacattcactccttgtgggtgggaaggggatgctgaagaggcacatacacaactacagttagtactttattgtatatttcagaatagctagaagataagatttagaatgttcttaacacaaagaagtaatcagtgatggaggtgagggatatcccaggtatctggatttgatcattgcagataacatgcttttatcaaaatatcatgcgtatcccttaaaggttttgaactgttatgtatctatataaattaaacatttttaaaaaaacggtgcaggggaatccagctaattgcagattcccattagatgggatgtgctgcataatctgtaaactaatcagagtctgtgggtttgtaaaggactttagaaatcaactggactacttgtttctaaagataagtctcgcaagtttaattattttcttaatgggtggcgattttgaacatagaagaaatgttaacagttgtttctcaagttttcttctagtttcagaagaaaaggtttgcagggaggaatctgggaccatctttcaagtctcaacttcaatgtgattatctcagtaaatattttctgatacccctgagcagggtaagtctcatatatgtcctagaaactgcaagtagaattctaggcaccccaactgactgaagggaacttttctcttcaacgaggagttccatggacactagaaaacctagtttaggccgtgtcagaaatggaggatcagaaatccctcattataccctcctccctttggaattcaagcacaagtaaccagcattttccttaaaacagatttaaggctcagaaaacagattccgtgtagcagtaaaacaccaaattctaacctgactcaagaatagcatcacatgacagagaaaaggccttggaaggaatcaaagtcttttaccctaaaatatatgtctttgacatatttttaaatcaccctgcacagttatctttttgcaagagaaatttacattctgtagagaatcgcttccctttgaaggtgtttgtgttatactgaggtatcgggggaaattcagccagatactgggagaaattcacccccgatatttcacgtagattcttttctattttccttaagtgtcagccggtctgagaaataaagggacaaagtacaaaagagagaaattttaaagctgggtgtctgggggagacatcacagttcggcaggttctgtgatgccccctgagccgcaaaaccagcaggtttttattagtgattttcaaaaggggagggagtgtacgaatagggtgtgggtcacagagatcactgcttcacaaggtaatagaatatcacaaggccaatggaggcagggcgagatcacaggaccacaggaccagggcgagattaaaattgctaatgaagtttcaggcacgcattgtcatcgataacatcttatcaggagacagggtttgagagcagacaaccggtctgaccaaaatttattaggcgggaatttcctcgtcctaataagcctgggagcgctacgggagactggggcttatttcatccccccgctgcgaccgtaaaggacagccgccccccgaagcggccattttagaggcgtttagagcgtttctgtcttctctcccagtttctacgagttcctccagtgcctgtaacacagagctgttagtggctttgcccctgcctgttaattctttggtcatgtaatggtggtgagggagctgggtctggatgcatttcagccacagctgctgttccacttccccacacagaaccatctcgggaggaagaggttggagatttttctgatgtgtcctcaatcctggcagaaaaggtttcaatagcaataggattccctcagttgtatgtcctctgataatttaaacaataacttctttattatactcaactctaaacggtctaaagagtatgtctaagttaaccctgcattcgcttatatgacatttgctctaccccagataaggtcatattctctttctgtttgttcctgcaagtcactgactttcacaagatgtaaggtcccttgtttgtcctataacatcaataatctgatgttttaaagaaaatatgctaatttgcagctcagtaagtttagttgtaaaaataatacatttttttctgagatgcctacatctccatgctgagttggagctttatttgtaacactcagaaactggaaataacaaaaatattaaggagctttataaatagtacgggcacactcattaactggaattctgttcctcattacaaggaacatattctttatacacaaccaaactactgactcacaagtaattgtgctgagcaagaagccacacaaatgaaatggaaactgtaaggtttcactttaaccaaattttgaaaaatagacctgaagtagcaaacatgagagactgactcagtgtagtgagcggaaaatgactgggaggcaggaattagaggaaactagggaaaccttgaagtgtaattcattgttatcttgattgttattttggatgcacaggtaagcacatgtgaaactgcattttttcctttggagacatggtcttgctttgtcatccaggctggagctcagtggtgagatcatagctctctgcagcctcagaccctgcgtctccaccaatcttcctccctctgccatacgtagctgggactactggtatgtaagacaatacttggcttcagtgcttattaaaatgcacactttaattaagcagtatttgttatacagcaatcatgcctcaataagagtattgcaaataagtggatagataatttgttcaataaagattgatggaaagatagatgctaacatgagaaaatgcatgacacccaagaaaataacactgtaggaaacatgcttttctttacaattgttaggtaatcacaacagagcatacacatcacaccatgttctcgttacagagaaaaggttctgcaaacctcactagctgcaacccctgtgtgctgggcttggttcagggagaagtcaggtccagtggtgagaagcacaggcccagataaccaagctcactctgaccgaatgtgagccctgggtacattgtacaacccatctgtgcttctgctggtaatttttcatctgtaacatggaaatgacattgatactatataccatgtttcctctgcatatgtaaaaataaaaggtgattggtgctaactttaaatatacacagtttatgtacattgattgcacctcaatacaacagttttaaatagatattacaacattataagttttataggtttaatattttatcacagaacaaactttcaataagaaaccacaatttccaaatgctatcaatatcacaaatctcccccaggacactctcacatgctctgagccccactctctcctcaggcgtcccatcccagagcttggcatgtagtaggagacatgcaaatagagccctccctcggcttatgaaaaccagcccagccctgaccctgcagcactggaagaggagccccagccctgggattttcaggtgttttcatttggtgatcaggactgaacacagaggactcaccatggagtcatggctgagctgggtttttcttgccgctattttaaaaggtaattcattgagaactattgaaattgagtgtgagtggataagagtgagagaaacagtggatttgtgtggcagtttctgaccagggtttctttttgtttgcaggtgtccagtgtgaggtgcagctggtggagtccgggggaggcttggtccagcctggggggtccctgagactctcctgtgcagcctctggattcaccttcagtgactactacatgagctgggtccgccaggctcccgggaaggggctggagtgggtaggtttcattagaaacaaagctaatggtgggacaacagaatagaccacgtctgtgaaaggcagattcacaatctcaagagatgattccaaaagcatcacctatctgcaaatgaacagcctgagagccgaggacacggccgtgtattactgtgcgagagacacagtgaggggaagtcagtgtgagcccggacacaaacctccctgcaggggtccccaggaccaccagggggcgccagggacactgtgcacggggctgtctccagggcaggtgcaggtgctgctgagggctggcttcctgtgatggtctggggctgcctcattgtcaaatttccccagggaacttctccagatttacaatcctgtactaacatttcatgtctctaaatgcaaaacttttttgttctttctgtatttttgtttttgtaacaggaggacacattctcgcctccacagaagccacagtgtcactttgggggcagatgatccttctgtagtcagcaggatgaaagtgcagaggaatctcagtggaacctgggaagtcttttccagttagactcagggcagagacctccatgggaatctctgattagaacaggctttgagttctgataggagccaagagagaggctcacccagggtcagagtccttaaaacctgacggttttcacagctatctcacctcgtcttgaaaaactgtgcacatctgactcacactaattcagttgaccttatttctgctaatctattttccttctctgcagacttgattctcacagttccctttcttcttctcttgcctgaaaacagaggatgtgttttctgtagtcaaaatcccagagatcaggtctgcaggacctgggtaggctgaggggactttctcactcaccatagcctggtgacactcctgctgtattttgtatgtggaggtgtttggaaaacgaagtgaacattagtcatgaagggaataatactagttttctccaaagggatgtggatgtagagctgatcttgtgcttctcacactgtcacagaatttatgctctcccctgtgactttaggagagctgaggatggacactccattgtgctgtgagctctggtaatagtaattatagggtctcgctaggcagcctaaggtcaatactgctggccttcgggaaaggcaggctgggattcctaggaaaacctgcatctgccatccagcatggagtcccatcgtcttctgttatgctctgattgaatcaggcacacctaggttatctagaacactcttcgtgacttgggaaaaattagtggcaggctctactaagacctgcattatgccatgggagcaacacctaggctagtgtgtgattgagtaggtgagactatggtctagtcaaggtgacagggaaaattgttgccattattatgttttattttatatttggcaatatagtcatgctcatattacaaatatctttctacattttttgtgtcagaagcttttgaacaagagcaacttcatcttgaatagaggctaggaaaaataagactgagacctgctgggctacattcccagtaagttaaggcgttcttagtcacagggatgagataggaggtctgcacacgatccaggttataaagaccttgctggtaaaggttacagtaaagaagctggccacagcccaccaaaaccaggatggcaaaaaagtgatctctgttcgtcctcactgctcattataatgccttaacatgctgaaagccactcccctcagcgccatgacggtttacacatgccatggcaacatcaggaaggttccctagatggtgtacaaaggaggggaggacacctcagcttcgggaattgcccagggactcatgaataatccatccgttgtgagaaatacattcatccctttgagagaaaatgcacagggggtggaatgaggctgggaagccgatggcacatggtggaagcctgtccctgagtgaaagagagggggaagctggattgggtggaaggtccctatatttctgtgctgtgcaagggaggggcaaaatataattgagtctcttgtaagtcagtgtttcctctcaggggatccccatgactcccagaaataatggctctgcttaggaatccctgcagagtcactcctttcattagagtagaccacaggacatgggcctcagcacacgccatgccacagatgtcagaaagcagctgctgggaacctgacccacctgcattttgctgcctgtaggaggaggaggacgtgcattctcagggccaacacactgtttttggatttttatagagaacacctgcttttactttattttttggaaaaatatatgaacaaatgtgcacctgcaaacaattgtaattttcacatttattttaattgcatttgtttataattgtgcatgaggtcctggtgcagagttgagtttttcatgggaattgttccaagaatcaagaacatccattttccactttcactggtttttccccatgtgcagagaccttgagtagagcacatctggcccttatccacactatctcttgtgtccccgggaaagacagggatttgcctgactgcagaatctagggtaggagtctgcacacgtctgagcctgcagagaagcccagtgaagtttaatgaagtcagagagctttcccgtgtggggaacctctagcttcctcactctcagagattgctggtcagctgtaattgaggggttaagaattagagcacctgggagcctgtctcatcacagctccattctgtaacttaccaccatcagactgcaggtaataactcaatcttgatttttctgaccccatcttattcatttgtaagtttggttatacaaaatgttacattttagtttctgattcaaacctcagaattttgtgaattcatcaggaataattaaaaatgtgtccagtttttgggaaatgtaaattaatgtccatactgtttatgtgtgtgtgcgtgtgtgtgtggggggatatgtcagtcacttacaccccagtaaaaatgattccttaattatatagtcgaactgcaattagatttgctgaaaattgtctacagtaatttctgtgaagctgaccttgccaccttgctgtgaggatgctcagtgcacaggtgaggtctcacaggagagatccaaggttcagcccccaggactggctgagctcctggcttggagccagacataggactgggcatctcagaagcagatcccctggccctcctttatctgggctgtatgggcagcagaggacaagcagaagaaactcagaattcagccaagacagagccccatttaggagcaggtgcatcaaggaaccagccagagaacctctgactacaatctagggttgtcttcttttgcttcacagcatccagtcctaaggagaccacccactatatcatctgtaactcagaactttcttgttacaaaggaaaacacaaatgaatataactctgcagttaacttcttgaacctggattgatgagtttccacggccttatgagcacagagaccacatccagtgcaggtgcagagcaaggctgcaacagtcagcctgctgctccctcaggagtcttccaattcccttgtccaaagcatccgctcattcatgggctgagaaaagggaagtcattcatgcagtctactctctccacagaactgacggggcacaaggacaacatcgatttttcatggaacatgcctctaggaatgcagctgtgtgcacacacactgctaagcacacacttctttacataattacttgtaactgtattttcttatttattctctccaatttttttacacaaattcatcacttttccccataatcaaagaggattttgatcagaatgcttgtggggagccccttgccccccagatgcccaccatcattattcttgaagggaggaggaacggcagctctcttgatttctactctaatcctctaggactaaaaccagaaggttgcatgtccggtgcgggagcatcgaagaagatcctgtctgtagaagcaggagcgtcaagacttgactgagagccatggtgctgaaatgagatagattccctgatggagagcacacgtggacccccacacctgagggctcactgctcctcaccacagatgcactcccctactgagtcctgagacctgagtgcaccccatagagtagggctcagatgaggggatgcaaatctccaccagctccaccctcccctgggttcaaaagacgaggacagggcctcgctcagtgaatcctgctctccaccatggacatactttgttccacgctcctgctactgactgtcccgtcctgtgagtgctgtggtcaggtagtacttcagaagcaaaaaatctattctctcctttgtgggcttcatcttcttatgtcttctccacaggggtcttatcccaggtcaccttgagggagtctggtcctgcgctggtgaaacccacacagaccctcacactgacctgcaccttctctgggttctcactcagcactagtggaatgtgtgtgagctggatccgtcagcccccagggaaggccctggagtggcttgcactcattgattgggatgatgataaatactacagcacatctctgaagaccaggctcaccatctccaaggacacctccaaaaaccaggtggtccttacaatgaccaacatggaccctgtggacacagccacgtattattgtgcacggataccacagagacacagcccagggcgcttcctgtacaagaacccaggtgtttttcagtggtgctccctccccacttctgcagaacaggatagtgtggctgagatgccatttcctgcccagggcgtgcgtttcccatccccatctgactcagagccttgttttcctcctttttctttactaataaatggcatgtcccctgttagtggttcatgcaagcagaagctgtatcctgtttgacaaagattcagcatgaaaggtcctgctacctaaaaaaaaatagacagatgagatttaattaacctaaataatttttttcacaacaacagagtgaatacgcaatttacagaatgacagaaaacttttgcacactttgcctgtgacagggaactaatatgaagaatttgcaaggaactcaaacaactctacaacaacaacagcaacaagaaccaaataactccgttaaaatgagcaaaggacatgagtagacattttcaaaagaacacatagaaatggataataaatatataaacaatactcaacatcactaaccatcagggaaatgcaaattaaaaccacaataagatatcatcttccaccagtcacaatgactattactaaaaactcaaataatatcagatgttgctgaggatgggaaatgaaggcaactcttagacattgttgatgaggatgtagatgagtacaacctctgtggaaaatggtatggagatttcccagaaaactagaaatagaactgtcatttggtccagcaatcccactactgggtaactacccaaaggaaaataaactattatttcaaaaagatacccaccttctatgcttaccataaaactactctcaatagcacatatgtcaaactgagtgtctgccaaccgatgattttataaaagaatatagcatgtatgcacaattcaatactagtcagccacaataaggaatgaaactgtgtcttttgcagcaagatgcatagaagtgggggacaatataattagtgaactaactcacaaacagaatgtcacatgtcacacattattacttgtaagtgggaggtaaacagcgtgtacacaaggatttgtagagagaaattacacacattggagacttacaaggatgggcgggcagaaggtgggagcatgatgagtcattacataacaggcacaatataaaataattaagaattgaccaatgatcttaaaattaaaatgtagaatatgatcaataaatgaacttgatattagttgacctcattaaatttaaaaactttttctactcaaatgactgtaagaaaatgaatgcccggttacagatgagaaactgtttgcgagtcaaataaccaccaatgtaactataataagaaacttcagaactcaactgtgaataaaaaagaaacaactgatggataaattaggcaagggtttctacagacatttcgtcaaagaagatgtgcagatgacactgaagcatataaacaggatctcaacaggattttccgttagagaaattcaaatcaagcccgcaaagagacaccactgtacactttttaaaatggctgaaattaagaagaaatacagataacatcaatgctggtgagcataccaggttgctagaggctaaaacattgctaacaggaatgcaaaatgaaacagatactcaggaaaataatttttagttttctctaaaatcaaacatacccttaacacctgaatatttgcatcagagaaaaacaatcttacattcacgcataacttctattcaaatattcaagatatcgtgtgtatgtgtgttagaaagtaaaaataacataaatgtctcaaaatttgaataggtgaagaactaggaagcatctataaattgaataccaccagcaataaaaaaataacaagtgaccgatacataaactattacaggtgaactccagacattgtgctaagtgagagaagccagtctcaaagatcaaagggacacagctgtaagcaccacggtcatcctcaggtgtcagtggtttgggctggactttctgtgtctctttcctgaccagacccagatattgagctccaccacttgcagatggaaaatcctattttcaaccatgcagtgaggtttgaactgcttcacagactgaacgaaacaaacacgggctcctttgaacagcgtccggcatttgttccaaccacaagagaacgtccctcagctctcccacctcctcggttctctcctgcaagccagcagccctgcagtttagcctgcatctcccgtgcatccacccatctccctccaagcaccttcccccacaccctccactgtttctgagagcacaggcaggctttgaacttttccgcattctgttgttattgaagttaggatgtttaggaccaacttaaggatcatattttatgactgaattccagtgccccttctctcctgggacagagtgcataaccaagtttctgcaggtggagacgaagttgagcttttttcttcctcagcctaggagatgagcgctaattggagggttggcagaagcttcccaccatcccagcactttggttctggtggggcggaatcggtgccatagggcagagctagaaaccgcggactgaatgttcccagtggcactggacccagggcagagcctccatccacgagtggggctctatggaagaagtgagtctctggctctcagtagctctcgtccagcactgaacctcagcatcatgtgctgtgtgcagggtcagagggccaacgtactggcccctgggaaagcgtttcctctggtgggagttggtagaaggtgtcctgtcttcttggctgcatctgtccgcagtggagtttacatcatgctgagctgggatgtggaaggaaggaagagcatcttagatcaaatatgatgactggccttactgagttttctagattttcctgaataaatgtttcttcactcactgtgtgctgttagagtctttccaaacctgtaatttcccaaaataattttcactggtctcatgagggcatggattcattgagcccctcatgctgtcaaagagaaatagaactgtttttttttttcacttcatagcgaacatccatgggttatcaaataatgggctggcttttcttccaacactttacagacaccatcaattttcttcttgcttataaggttttaaccagaagaatgctgtcatggtcttttctgttcttttggaaggaatgccccctctactcacctccacttgtctgcctgtatttctatttgtctttggttttcaacaattttaataagatttacctaaatgtgtgtggggggagcatggggtgttattctgctgttctgtgttctctgagatgcatggattcaccatttactctgtctccatttttgtgaaaacaattagaaaaaaagtcagtatgagcccagaaacaagcctccctgaagtgggcacaggaccacctgggggcgctcaggacccactgaacacaagagccagccccagggcaggtgcagatgcgggttaagttctggtttcctgtcaaccctgtggcttcctctccataaaacagtttcctttgtggcatatctctggattccttatcctgttcttcctgtgaagtctctgaagaagaaacatttgtcgtaacaagagaaaaactttctcacatgcaccaaaggcagagtcacctacagtcacttactcctgtttctcaatgtcaataagttaccaatgcttctgaagttaatcagctaaatctataaaaggtgcggtgtttaactcagcattacagcccagctcaacagaactccaaaggtcagccagcagcagccaggaaaaagtgcatgctgggcattggggcagagggagttaccatccagtgcaagagaagaaagcccccgtggtggtcattgtcaggactccaatcccacagttccaattgtaggtgatgccaggcaaaggaagagagaccccaccaatggttagtgtggatgtcgagtttgatgtttccacactcacactccaggtgaatatgaaaagatttattagctctatttctgaggtgtctgctgagagcagcacagtcctctcaagaaattacagattggaatttcctcagtagagcaggaaaggaggctggctcagggctttataatgatttggtggtggggtcggcgggggggggggggcgtttctactcaggagaaggagcttgtgtgatttaaacctcacactgacatcacatgagggagcttccatgatttcttactagatttcccatgtgtgggggacaaggatgagggagaataaaccttaattcatcagcatcaaggcaccaaaaataggacctgacactttattctccctagcagcttaagaaaatgagtgaaaaagagagataagagtccacccatgtgctgaaaagcatagctcttggtaaagacgagaaaaaggcactcctacgaagaaggggttgggcagaagctttatgctgaagggtttggctaaagagacataatcaacaggttacaggaggggctactgatgttcatggaggtggtcctcacacatgcatactgaacaaacatgtctgtaacgtatgacccctgttcacttaccagtggagacttagcatttaaattcattccagtcaggccctatgtgcaaacagcagaagcagagacacaaaggtactcagggtgcagcctctgtgaacggccagagccaggccatggtcagcggtctcggattaggagaaagttcctgatatcactgtagtgttcaatcaaagctggggttatggtttgtggaacaggggtcagttcatcagggggtgggctgcaattgtcttcatagtgcttgtctcagtgccggtgcttactgagccactagagaaaaaggtttaattgagcttctttaaaatcaacattttgaattatttatcagacgtttcaaatatgtcatgttgtttagattctattgctggagagttaaggtgatatttggggttttgtaactctgttttttcatacttcctgaattgcttatctgtttgcttttcattagctaaactatcgcttcttcttattttttaattcattctgattttgatgaatatttaattccctttagaatgtgaatataatgtacattgtgtgggtattttgattttggttcttggtttacttagtggcaaagactctgtaagagttccttgtctatagatagccattatttagtggctttctgaaatggtggttttagtaccaaagtactggacttgtgagtaggctcactgccccctgcaggtcctagatagtggaggcctcaggaactgtttctcatttggaatgcctttgtttcagcagattttgtgttgggttgttaagttcaccctccacattagtagatgtccttacagattagagctgactctggtagaagcagttgagtgcatgcttgatatctgtgcacagggagaagctctctgttgcctcaggcgatggactggtctatgaaatgcacagtgacctgagttccctgctcagcccctgagaggtggaccaagctggacacacatgagccaccgagcctggcaagcaaaagcgccagccttgatggaaatggcgagctgagcggcatctactcagtgtggtttcttttgttattaagagctttagtgtggtggctgtttcaaattcccgttgtagtagtaatatactgggtatgtgagcaggcccgtggtcttttgcggggttggaatcaccgaagtaatgagaagctaatctcattttcaactgctgtacactggtggtattgagtttgtatgaggtcatgcagtttgaacgtcaggccagtaggtggtgctcgcaggtaagagccggctatggtggcagcagaagggtttatgctttactggtgattaaagtgggaaacttggcgtgttccagatcttagagaaaagatttttagttatttctcattcaacctgatactacctgaaagtctctcgaatgtaacttttattttgtcgagatgggttctttctatacccattttttatgttttttttgtgaaaggatgttgtttcatcaaatgcgttttcagcatcaattgaaaaaagttatatgtggattaaagatcaaaatgtaaaacctaacactataaaacctctggataataacataggaaacagaatttaggaggtaagaactgacaaaggttttataatgaaaatgctagaagtagttgcaacaaaattgaaaattgacaaatgggacctaagtaaattaaagaacttctgtacagcaaaagacactatcgacagagtaaacaggcaacctacagaatgggaaataaaatatttgcagcctatacatctgacaaaggtccgacacttagtatatacatggaaatttaacaaacatacaagaaataaaaagtgaccaaaggacatgaaaagacacttcaaaaaagacctacatgtggccaacaagcataggaaaaaatgctgaatatcactatcattagagaaatacatatcaaaacctcaatgaggtaccgtctcacatcagtcaggatggctaatcttaaaaaaaaaataacagatttttaaggttacagaaaaaaggggaaatttatacacttttggcgggaatataaatgagttcaaccattgtggaaagcagtgtggtgatccctccaataacctaaaacagaagtttcatttgacccaacaatcctacaactggacatatacctaaaggaatataaacatgtaggttcactgcagcactatccacaatagcatagacatggaatttacctaaatccccatcactggcagaatgatagagaaaaatgtggtacatacaaccatggaatactatgcagctaaggaaagaatgaaactatgtcctttgtaggaacatgatggaactggcagtcaatactcttagaaaactaattcaggaacagaaaaccagatattatatattctcccttatttgttggagataaataaaagcaaatattcttccagggcctgagtcttccttattcaacaagtcattctaaattaagtgttcagcaagttgctgatactcatctaaatattctatttcatctgggccacttacatcactcaaaaagcaatgagagctatatttctaaggggggttctaggataataaatacctgaatagtgagaatatgaaggatatggaaactgggccacttatatcactcaaaaaggaatgagagctatatttataaggggggttctaggataataaatacctgaatagtgagaatatgaaggatatggaaactgggccacttatatcactcaaaaagcaatgaaagctatatttacaaggggggttctaggataataaatatctgaatagtgagaatatgaaggatatggatggtttttttttaactcaatgggcacataactgtgggagatactatattcctatgaagaaggtattcagacttcagagataagtaatgtttcctacattgtgcttgtgacttggaagcagtggattgaagagtgtgataagtgcccagaccaagcagaacagaaatcagcatgtaaagatgatgatctatggatatgatctaaaaccatgtaaatacttcaaataattctatttaatgcagtttgaaataaaacacaaacttattcaaaatacaaattacttggtaattattttgggagctatgagttcaccaagaaactcaaattcctatttctatttcaacccctgattcctactgtcaatgggagggaagtctcagaaccaatcacacatcagacggcaaatctgtcaaccaagagtctttccactgaaggacctgggaggtcaggaccctcaggaaagtgctggggaccctgtcttgggagtgcccagcagatctcagaactctccatgggtcctgctggacactcatgtagggtaacgagtggccaccttttcagtgttaccagtgagctctgagtgttcctaatgggaccaggatgggtctaggtgcctgctcaatgtcagagacagcaatggtcccacaaaaaacccaggtaatctttaggccaataaaatgtgggttcacagtgaggagtgcatcctggggttggggtttgttctgcagcgggaagagcgctgtgcacagaaagcttagaaatggggcaagagatgcttttcctcaggcaggatttagggcttggtctctcagcatcccacacttgtacagctgatgtggcatctgtgttttctttctcatcctagatcaggctttgagctgtgaaataccctgcctcatgcatatgcaaataacctgaggtcttctgagataaatatagatatattggtgccctgagagcatcacataacaaccacattcctcctctgaagaagcccctgggagcacagctcatcaccatggactggacctggaggttcctctttgtggtggcagcagctacaggtaaggggcttcctagtcctaaggctgaggaagggatcctggtttagttaaagaggattttattcacccctgtgtcctctccacaggtgtccagtcccaggtgcagctggtgcagtctggggctgaggtgaagaagcctgggtcctcggtgaaggtctcctgcaaggcttctggaggcaccttcagcagctatgctatcagctgggtgcgacaggcccctggacaagggcttgagtggatgggagggatcatccctatctttggtacagcaaactacgcacagaagttccagggcagagtcacgattaccgcggacaaatccacgagcacagcctacatggagctgagcagcctgagatctgaggacacggccgtgtattactgtgcgagagacacagtgtgaaaacccacatcctgagagtgtcagaaaccctgagggagaaggcagctgtgccgggctgaggagatgacaggggttattaggtttaaggctgtttacaaaatgggttatatatttgagaaaaaaagaacagtagaaacaagtacatactctaattttaagataaatattccattcaagagtcgtaatataagccaaattcacagagtggaaaaggccacactctataacgttgatacaaacattccatgaaggtgctactgtgaacaagttttcaaattggatgaatacatgatttggagcaaggttatttgatcatgtggtgagactaagaatgattcttaaaaagtgccaaaagtttccttcaaatgtttctgtcactccttatcataaagtttattttacagcagttttaggattacaaagaaattgcacaggaggcgtgagaattcccatgactccctgccctacacaggcacagcctcctccactacgaccatcctgcaccgcagtcacaaatcagttacaatggaggaatctccaaggacgcttggttctttctttttctggtgatctcctaatataacaagcctaagtatctcaagattccacggttttttcagtgttttctagaactgatattagtcagagggaaagtgggtaaggctattactatttgaactctttcttccaaaatccacaaaatatatattaatttagagcttatcttacttctggtttacaatgctccttcccagagagtaagatttttaagcttttagaggccagttcatgtctctaaaagaccagaaagttctggggaatcccataatgaacatcctttcattggaattggagaccctggcaatgagagattccatgtataatgccctagagttggattaggtgcactgtgagctcttgggtggtgagtctgagtaaggtggtttgtgcagcaaatgcaaacacattcatgggacccaggtaggaacaaaagcttccctctgcaaagggagtgtgcacctgaagcagccctcacagaggtgggcactgcttgcccttgatgagtgcacattagccagaggcatgatcatgattggtcttgcagataaagagcaccactgaggtcataggttatgaaaatgtttgtcatcctccagctgagcaagtccatctgcttgtttgtgggtgtcaactccatagagggtgcactttgggagatgacaagatgcgcacaaacctgctctcactaattatccactaccacacactcaagaccaacctgtgctccggaaaggaatacgtgcctgtggaaatagacagagcttaagtattttgtaacctggtgaacatactgcccaaagccacacgtttcaggaagattagctcagaaatgttcaccaattgactgaagggcagtggcgggtgaggtgatgggacagcctcagggctgcacatgaggagggctccctcccccatgcaggcttttcctccaggagctgcatcaggacctcaaggaagatcagggagaattctgagaacacccttctgtggagctgcctagagaagaagaataaatatgaaaaaatacaactctgagtaatgcatggatatttgttcatgaaaactctctctgaaagcttgtgaaggtctcgaaatacccctgattagctgaagacaaacatttaaaccctccttccacagggagttcaagcaggctggatgtgtccttctatggatgatcttccccaaccccttcctcttcccagctcatccctggctctctgtgtaaacagttctcatcagtggaatgtggttgatgaagtgacgtcttcaatttcctcatcttcttggtggtcatgttattttttttcatctgagggttaaaaactcacctgcatgcagcacatgacaggctaaaatctcttgtggacaaaacggtaacaaaggcacccaccagggttgagcatccgtgttgctgacaacgaccaccaggggtcaacgtcctcttcacaatcctgtgtcagagcatcactggaatgatttcattagcaacttcccaggagaatcagcttaaaaaatacttgtcccattttccatgcagatataacccatcccttttcctgaagaaacagagctcaatactaaatacactgaatgttgtttttgctggttttgtaagtttgtgactttatcactttctaatttctgagttaggtggaccactctacatatttctctcatgggtgtgaccagccttctggatgtcaaatataactgactttgttcgtgtaaatgtcaacacaagctcttcatggtttcggtgctcactgactactctaaacttacacaatgtgtttctttattagctttgttttctggtatctctacgtggcttattcatcacgcccattttatgttacttgtacaggtaattgattgttatttttaaaatttactattgcttactttaattaaataagtaggcaatagcttagaatagaaaataaggtaaagtaaaagtacatgcagtaatatttaatataagtaagcaggcagctgaaagcaagggaaatctactctgctgtgtaaaagggtatggagacctcacagtatgatgatcttctgcagtttaatccatactgctacataagtgacaacgtccactctgtttatatcagagcttcccctaatatgtacaatgaagactgagcccaggtacctccaaccagaatggccagcaccttttaccaagtgcctgaactgacagcaatagagatcacgtttgtctaaaaaaaaactcacactgtaaggatacccaccagtcatatggagacaattagaaaaaattaaagcccaagcctgataggtagtaatttgtacttagaagaattaacttttatctccacatgttttttttttaatcatagagaaactactagtggtagttccactgtccaagttactgaatatcttattcctagaatgagacactgcacaatgtgttctgacacgacagaacgtagctgtagttaagggacaggagatgtgatcacgggaacacgagtctgcgatccagcagttcttgctccttcacatttgcccagaaacaaagaccccagcagaacaatggaagcattgacttaggtctccacagtctgatgtgagataaacagcaggtagtttatgcctctgttttatagcaggaaatttaatctctaaagaagggccattttggagataatactattctccaggatgcttaaatgcccccaaacagagagcactgcagagccccgtggccaggagctacaacacctgggtctggaaaccactggacagaaatatgagattctcttaccacatgtatgatggaaccttgaagaatgtttccttccttctccataatcacagcctgcgatgaactggaggtcccagtacataaaaaaacatgtgtctgcattggatacagaattagtcccataaaataattgtgctactgtggtgctcacactgttggaccagctgaccaagaaagtgttgtaagagctgcagtgtctactgattcctaccatatttggggctacattcacatctatcaagggaaagagagataagaaaatctctctaggccgggcgcggtggctcacgcctgtaatcccagcactttgcggggccaaggtgggcggatcacgaggtcaggagatccggaccatcctggccaacatggtgaaacctccatctctcctaaaaatacaaaaaattagctgggcgtggtggtgggcgcctgtagtcccagctactcgggaggctgaggcaggagaatggcatgaacctgggaggcgtagcttgcagtgagccgagattgtgccacttcaactccagcctgggggacagagctagactccataaaagaaagaaagaagaaagaaagaaagagagagagagagaaagaaaaataaagaaagaaagaaagaaagaagaaagaaagaaagagaaagaaagaaagaaagaaagaaagaaagaaagaaagaaagaaagaaagaaagaaagaaagaaaggaagaaagaaagagaaagaaagaaagaaaaaggaaatctggcctagtctattgatttattttcatttcttcaaaatgaggtaaaaaaatcgcatcaactaaaatgcggacgatgatgaagtgatcaaagacaacagccactcagtgtttcaggtgtgttttaacccaaagtcacacaacatgtgagaagctgaactccggagccaggggcatctctgaggagaatgtggaaggtgggcgggaggaaacagtgattcatgtctagggaaatttcagggctgcctgctctaggggaaaggaaagcctgagcctctcccacagtgtgctctgttaaaaattttggctgacttattgtattcttcgacacaaatatttttgtttcgtcctcttttaaatttttttatctctattaaaattctcactttgttcttgcatgctgccactagcttattaaacatgtttctaatatttacttcaaattttctgccaggacatccatatgtttttttattcattgatgccagattctggacctctatgttgtctgtctgtttggaccatgttcccgtgtttcttcattttccttgacggtctttcttgctatccgttcatcataacaaacagctctttgctcatcataacaaagagccacactcttccaagcctaggctcatagagacaaccctcaccaatcactccatcagtgattgcggatctctcaaaacttcataatgacttcataatattccaacttctgtctctgttcttagtggcccccaggtttagagaacgttgggttgtgccaggactcccaaataggagaggtagaaactatatactcaagtagcctcttgaacagtgtaccattagacacagttttattattgaggtatgattcatcaaaataatgttagttcaagcgcctctcaaccagtcatctaacattgaaatgttataatttcttatttggatctctctggagtttatcttttgaatatttaggtaaaattacaaactagtataaagctatttggcaaaattatctgctgcagaagtttcatcttctgtgtatctctttttgcacttaaatatgtttttattagtcatgtatccagaatatagaaatatgtcttaaagttccttcatttttttaaggttatggggttttcagaagaggtgagaaccttctttatttataaaatacctgattccacattgctggatagtttcttctttaatttgtctcctcctctcacattatactatattaagcaaggagaaatcaaaacacaccatccacactttgcttagaaatccccaaagctaaattttaagtatcacttactaattctaattttacccattgtaacttaattaacatgaaatctataacaaggttacacatactttcccgttctaataccatgttcgtgacagaaacaaagcaggtgtcttctctgcaatgtggtcatctgaggtctgagatgaggggtcacacaggtattttataatatttaagggtttggacaacagtagtgataacaattctgaacagcactggctcctaattgaaaggttataggtaaatttaatgctgcaattttatattaacaccttgtccgaatgaagctcagaggaagatgccacatcccaggtcacacagtgaggaggaatggagctgtgctctgctctccacaccacctacaaatcccaggccccagcccaggttccactggcgcacggcacctagagcacagttcccaggggatgatctcagggcacctgcttcctcgggcagggcgctgccttctctcagttgtgcacttgctcctcctgcaggttctgtagtgagcacttgcattgccgtgatttatacatgttctctcccctaatatggaaaaaatatttattaaattttcaactcattttctctgatgcacactgcattagcagaaaggaataaatcacattccttatcctcccataaagccaaagattcccgaagacagagctgatgtgatgtactcataggtggatctctgcccctcaagggaggccttggtcttcaagtttcagtaattctaggaagcgaaggacacctacatctcctgctccctgctctgtagctcacctgagaacagctttctcattggaatgtcttgtgtttaaggaataagagtccatgtttcaggttcgggagcccaggtgcacctactggatgcagcccaggattggagacactttccagaagacaacatcacctgagacatgaccagtcccactgtttcactttcacaatttcaacttcctcagaagaaaattaaaattgctgagacttgttcataagtgttgtgccatgtccttactctgttttcttgcctgttcatttatgtcataccaggtgtctgttatatgtaataagatcaaaattctgcctccagtaacacatcaatggagacctttgattgtacttttggtttatgcactgacacatagattatgatgttcatcacattcatttttatgtcaaaggaaatctgcataatctgaatgccaatactttttggaatctgctaagtaactgaaattgaaaaaaaaatacccactcaagaacctggatagacagccatgtccagaatggcagttgacacttgtttaactggaagagaatctacagaagccacaagttgttgagggcacttacatgataagcactatagttgtcttaaagacagatgtggactcagtaaatgtgactgttccagagggtcttatatttctatgttttatggactttctcaccagaaacctccagattctaaaaaatactatccaaatacgtttcttatttgtcagattggagaagattaattactgaaaaatattacgggagactttttcaaaagcttctacatggaaggacttttcgagaaccttgtcctatgtaaaggaagacaaatctcccattccagatttctctcccattcttccattattatagaaatgagcaaagttagccaataggggtaagatgtaagtaaatagtccagggacactgaaaccacaaaagggagtaatggccaaagtagcttttcccctggagattcctggtcaaagtcacagcccagaagaggaagccgatcgcatctctaggtttccattgtcaaaacaggcagtgcttgcctgcactgcacaatccattctaaccagtgtgatagctctggattaaagatggaagtgtggcaatgcacagactctatgtgagaagaacactggaaaactaaaggacaaaggcagagagtaggacaaggacgacaaagcaatctgaagcctctgacatcaccatttttaagatcaaggtcttggaaactccctcattgacctttagatctctaggagaaaaaagtcagatacctgggcctagtgtcagtgtaggaggaattttctataggctaggcattaggaagaagggaaaattcttccttattaggaagttattgttatagtgttatagtgttattggaatagtggatatggagtgggctttcatctcgatcaatctgcacctgctggtattttccaatgctacattcacctgcaagagcccaatgaagaaagaaggcactcccaaatcttttgcaagtttttgtattcactgtgggtccactgcttaagtgcatctggagcttcagagaaggggctctgtcctgtgtcatagaacccttgctttgagtctcacggcagagttcaatctgtttagtaaagttgatcaattatttcaagagatggtgtcaccagcatatggtgtcactgagggagtattctacactagcacacagccatttcacgctgggctagagaagctggggggaaatgctttgtgagccccaacaggaacctccttgcaaggcaagggctgggcgggagggggcactcaggagccactcagcacgggttccagccctgcagctggtgcacaggaggctgctgagaaggtttcctctcaggggctgggtcttcctttgggagaaaaaagctaaaattcaataagttgctggtgtgcccttaaatattctatcacatctgagctgctcccacaattcaagagaaggagaactatctttttaaatattctatcacatctgagctgctcccacaattcaagacaaggagaactatctttttaaagtcggcttctaagattataaataccttaatagtgagaatatgaagaatagggatggtcttactaattcaatgcagagagaattatgggagtcactatatttccatgaataataatttcagatttcaggctggggctggtggctcatgcctgtaatcccagcactttgcgaggctgaggtgagcgggtcacgaggtcaggagctggagaccatcctggctaacaccatgaaaccctgtctctattcaaaatacaaaaaattagccaggtggggtggcatgaacctgtagtcccagctactcgggaggctgaggcaggagatttaatcctacaagacctacagcctcagacaatgctgctgtcagtgatcgtgggaagcagagtttgcagtgagctgagattgtgccactgcactccagcttgggcaacaaagcgagattccatctccaaaaaaaaaattcagatttcagtgttaagtaaagttgcctacattgtgtgagtgacagggcagtggtggatccgagagtgtggatctgagagtgagtcagaaatcagcatgtaaagatgaggatctatgcacatgaactgaaagtatgtaaacagttcatgaaattctaataaatccagtaggaaataaaacccaaacttatccaaaacacaaattcccttgaaattattatgggagcatgagttcataaagaactcctaactcctgtttcaacttctgaatcctagtgtccatgacataagaaaatcatctccaattatgcatcacagggcaaatctgtaaactaagagtttttctgttgacgatcctggggaatcaggacaccaggaaggtgctggagaaactgtctcaggagcgccccagggatctcagaggaacgtgctggcactcacgtgggacatcagcgtcacttgctcagagtcatcagtgagctgtgctggtgtctgacgggtccagcatagggccaaggcacctgctctgtgtcatggaccgagatggtccccagaatgatccaagtggtctctgtgctaatctaatgtagtttcacagtgagaggccgttctgagggggcttcttcttcagtgaaaggacctctgtccacaaatattcctaaatggacaggggcatgcatttcctcaagcaggattagggcttggaccatcagcatctcactcttgcaaggctgatgtgtcatttgtcttccctttcttatcatggatcaggctttgagctatgaaatgccctgtctcatgaatatgtaaatacctgagatccactgaggtaaatatggtctgtgccctgagagcttcacccaacaatcacatcccgcctctagagaatcccccgagagcatggctcctcaccatggacaggacctagagctaatcttcctggtggcagcagctacaggtaaggtgctcccaagtcccagtgatgagaaggggattgagtacagtcaaggaggctttcatccactcctgtgtcccaccctccaatgggtgtctgctcccaggtgcagctggggcagtctgaggctgaggtaaagaagcctggggcctcagtgaaggtctcctgcaaggcttccggatacaccttcacttgctgctccttgcactggttgcaacaggcccctggacaagggcttgaaaggatgagatggatcacactttacaatggtaacaccaactatgcaaagaagttccagggcagagtcaccattaccagggacatgtccctgaggacagcctacatagagctgagcagcctgagatctgaggactcggctgtgtattactgggcaagatacacggtgcgagaacccacatcctgagagagtcaggaaccccagggaggaggcagctgtgctggcatggaggagatgacaaagattattagattgaagactttcttagaaaatagcattaagtcatttacgaaaaggaacaatataaatgtgtatttgagaaattgtaattatttgagagatttcttatgcaacatttattctgtaagcaaattctagggattggagaattaatcaaattaataaagctgacatagaaattcctctgaaggtatctttgtaaacatcaatttctgaatcagtgttgtaaatgttttggaacacagacacaagatcacattttaactctacttttgtctctataaaaaatgccaaaaagagtctcattttgaccatgtacctctttgaattcccaccatcaatgaatgattgttcttgggtttccacattatattaccatttatcattatgagaattgtgtgttttaaccattataataggtgagtaatggtatctaatttttgcttaaatgcacatgcccctaataaaattcatatttaacaattttcatataatttttggtgagatgcctctcctgatatttggttcattttcaatagcactgttttcttttgattagttgtaagtttacttgcatattgattataaaagttaattaacaaattaaaagaattcatttaacaaatatgtgacttggaagttgcaggggtttgtcctgcacaccctgacacaatgacgaatgaataaagtgcactgacacaaagatattctgctttgccagctcgactgagcatctgggccacttagtcacagccaccgcctcgatcagtcagggagacttacatttattcagtaaagattaattgacaaaggccgtgagtaaacaccactagaaggtaattgacattgtggacctcttgagtggaaagcaattaagcacccgcggtagatcaaaggttagtcttaggaacacatgagtaaacaagctagttagataagctcctcacattcctttgtttctactctactttatgtaactaaaggtaaggggactaggctgccttcagccagatttattaccaaagttatgcaaactcacaggccttccaagagggtttgtggctattagaactaaaatgtttcccaccagcctgactggaccaccacatctccccattttttgttttctacatcaggtcttttggattggagcgtgcagatatgcgcagcaacatgtctgtcaggtgtggcagtcattgctcttattctggctttgcatcctagaattagcaaataacataaaacaatcatgagtagaattagcaacattcttttccagtcagagtgacccccaggagcggggtctaaccaggagagatgatctcacacacccttccatatgactgtttgttgggggtgtagatctattgcgtgaagagattctaaaattttagtttgaacttactttacgtctgctgttaaattgtcatgaaaggttccccagaggtattgttttacctcatcctaactatgtattgatagattccgtggtagagaagtgatacagatatgttcatgttcccagtcacagtttaaatgctgtcagaatgccactgcatcttgtcgctccctgacatattctaaagcagcctcaagggctagcagacgtgtgataattttttgatctataccttgctgtaagagaagttcattagacacatttttggccagattatctaaaaaggcagcagtttacactaagtcaataatacatgcaacagcaacactagctgttgccaggatgactatggctgagactataaaggccataagtgtaactatgaatcttttgtgtctgacctgggacagggcacgttctaaggttgcaagggcataggaaccttgccaattgcatgccagattgactggtaagaatgcctcagattttctctttaataccatggcgctagtaatttttaagttagatatactgtgattagtgatacatgaggcaaaccaagcctgtccctgcatccaggtcacaaacgtggagttttgaggtgtaatggaaatgttagttcccataaggaaatcgtatggatgggtagtgcaaattaggcactgatcagtgtgattatgaataaagcttatagcatagttgcaacgggaaatatggtatgtcccatgccaggtgttaagggaggtgctaagatgtcccagacaccataaagtaccttggggcggcatggactttacttggggccttggatatgccatccccccttggcacaaattataggggaaaagacatggctatgaaactgattgatgctctgatggatgaaggtattagtaaggctgccctgcaatcagccgctgggactccagtctaagatgttataattacctaactggaggctatgggctcgtctcccatgacagacctcccagctaaagtcgaaccgattactgtcccagctttgttccttagcacaggaaggaatgtttgggaaagaagcagcggcatggattgcattgctcagtttgaggctatctgcagctaagaatgttaaggcatttcctttgctatgatgtaaccatacttgtttttgggcaggtacacagtaagggttagagtctttataacttacacacactgggaggataatagtggattgacatatagtgttatctgccaccttagtccattgtgtgccattattgagggaccccacgtggggtaaatctatccctcctagccaagcagtcacgttactataggctgggaagggagtgtcttcccatttggcagggtgaaagaaaggtgtgtctaagatagaggcccaatagagtgtagcaggtacaggttgcagacaaagtgagagcataaaaaggattaataccctacatgagttgcaatgtacaacagaaatcatagcaccaaacacattatctggagtaaatggtgtctgcatttggagcaggattcgttcagcctcctgagttgtccttttcagtaccccccaggtaatgtctggggattgtgttgttcacagaagctgcatcgtccggggctgtaggtcttgtagggttaactccttcatttctggtactgggttgggtcctagcaatgtcctggtatggtttgatgcgtcgtgctggaacccaaagacgacccgagggggtgtggatacaagcgtaccctcttccccacattaataattcacttggaccacaccattcattactgtttacatctttccataaaactgcaggtttcatgtattgggaaattttagcaaagtgcttttctacagcggattcaaatttgtcttctaaattaaaaaaataaggtttgtgccaaaagtgttgcagggtctgtacccatactcccctgtttttgttttttgtgcatattttaagggtggagttggcaagttctactattgcttgtccttggggtttatatgggatacctgaggaatgtcggatattccacgtgtgacaaaattgttgaaattgtgagctggcctaacctggacaattatcagtcttaatttttgcgggttgttccataaatgcaaaagataaaagaagatgtttaatgacatatcgagtaaactctccaggcggagtatgtgcactacttaaatgagtgttgatatcaaaggatacatgtacctatctaagttttccaaattcagggatgtgtgtaacatctgtttgccacaacagattaggttctagggttaatacctgttgaaggaggagacgtgcctgtgagctggcgatctcagagactgtttagccagtctctgtataagttgagctggcgatctcagagactgtttagccagtctctatataagttggaattgtttagataagtttttccaattttggtggaaaaattggtgcaattgggtggcttggtcaagcagcgatatcataacttgaaggttggcttgattattgtcataagctaatggaccaggcagtgagctgtgggctggaatgtgtgtaataaaataggatgtgtactttgatttagcaattgctgaaatcagagaaaaagagtccacagggctggctccagagttgacttaattagggctgtaaaagttctctagacccaatattaaggactcaactttagctttctgagtgctagtaaacccagattgagtgaatgaattgtgtggtgtccaccagactgctgcttttccatatttaccagatctatcagtaaacagtgctaaagcattaaatatgggggagtaaactatttttgtaggtaacacattaactaggccttttgggaatgatgaaaatgggtaaattctaagggctgttagtagaatattacccataaaatgaataatcttgtagccaggaaactttttcctactagggagcaaagcttgcttttaattgctccctaactaacttaggggctttttgtaatgtctctccctttagaggttactgttttacttaaactggatttggagtcatgttaggaataagagagagataacagtggccattattagaaagaggtttctcaaattcttaaattttacttaactcttatcatagaattataatctgggatgtcgcttgtatacaaagaacataacaaattttgctttgggccgcctgcggagccagagagcggagcaggtgggtcccagggcggctgcggctttgtgcttgcttagaagccacttttcgccaccgcgtttcctctgtgccagctccctccccacactgctcagcagctgctgccggcagaggggagcttcctgcacttgctcctgcccctaatgccttttcttaacccttcgtgtacctgattgccttgctgatcttgcattactgggcagtctaagagctccccttttaatgctgcttgtcgaagacagggacatatagctgtagtgtatttcctctattttttctatctattgaaagagggggctcaggcaaaacctccgtttcctctttgttattttgggaagagcaggtggtaaggcaagtgacgtttcttcctccttcccctttttgggttcttctttgtataatgggactaaagccatccctactaaagcccatagtgttaaagatgatgctgggacccgttgcgcttgtgtgtaatgctgttcaagatttctccctacttgttcccagagctttacttctagctttccttcttctgggaccacagattatgtgagacaacagttttcattaggtgccttaattgagcctgcgaaactgatgctcccctagccttaagcaactgttacaatactttcatatgctgtttgtgttgagctgataactgctgtcccatgatgaaatctcagcctgaacaatctcccctgaacttggagatcccaagtgggcaccaatgacttactgttttactgacttgaccacgcagtcttcctcaaccttcgttttcatggggtctgtcacgctccctttgcagcgatcctcacatggggcaccggctgtgggggtctgtcctgcaggtcctgacacaacaacgggtgaataaagtacactgacacacagatattctgctttgccagcttgactgaccatccaggtagatcaaaggtgagtcttaggaccacatgagtgaacaagctagttagataaactccccacattcttttgtttctactcaaatttactaaactaaaggtaaggggactaggctgccttcagccagatttattactgaagttatgcaatctctcaagccttccacgaggacttgtggctattataactaaaatttttcccacgagcctgactgaaccccacaggaagtattttctccaagtctgtggttgccttttactcccttatcagtaggtatcgcagaaaaatgtgtgtgtttgtgtgtgtgtgtgtttgtacaaatttagattgaaaacatatataattttattcattcatagatcatgcctttggcattatatctgaagtttcattataaaataaactaatagtcattattttttccatatctctaatctcaggccacaatcaactcatgagtgtttaaacttcacctgcttgattggaggaccatcaatctaatgtatttggaatacttctgtaaggagatgtgttcttcttcctattattttttaattaatcatctattaatatcagtattggttgatggatgtccattttatactttgaaaaagatccatgctacatcattcatttaattgttcaaagcaccacagctttattaggtgctgggagctcattttgtttgaatcctgcatccttacagcacacctcatatttttgtttttgaacacttgcgtatttcctggtattaccataaattctaagcttgttttctttattacctttttttacatagaatcaaccacttttataaagattgcatgtttctgatgttaaagaatagtattaaaataaaacattgtgatactggctctgtgtgttgttaatgtggtatgagtacttctagaacctctcaaacaatggtcccagtaaacgtgcatgtttatgtgaacccaagtttatggactcattgaaactatttatgtatctaatcttctgtaaccatatcacattaaaaatgagaacacactggtctctccacccaactatgttagcacatgaacctttctagtcttctttctttgcgtttccataaccacccactgcaaagtgagaaaccccattccaccatatgtaattttattacttagctgcacagtttcaggacacatgcatagcagtatcaaaagtgtaaagctgtgcccttgatggaaccatgtttatctactagaatagagtgcttatgtgcagattttttacacattaaacttatagaatttcttcgttttctgagttgcttaggtcagcaacttcattttccacattcttcaatgaagtcatttcaattacattgtataatttcatttatttgaaattccataaatgcttagactatagtcaagtaaacagacagaggatgttccaggaatttagagagtgggtataaaataagcaaaaaaaaaaatgtggtgtttaggaaaaataaaactatttttagtgatatgcaatggttgagatatgatataactaatttgtctaagctaataattttgtgatagaaaatataaacttaaacatattcaattaaaaaaattcagcagttcattaaccccaggattaaatgcagactgtataaaattatccaataacttatttggtgagagtggggatgttatgagatacatgcaacaaagaatgaagtaattttccccatttgcatatacaatgtttccattcactgaagaccttttattttaaaaaaatcaattttctaccttacccttgtttttaattcccgacaagcaaataacccaaaggattcttttctttcattggttgagaaagattttcccctaacttcagcttagttcaggcatacgctgacctgaatgggcatttaccctcagatgggtacacacctgtcaatatgtggactcttctgtcagacagacacagcttcactcatgtggattcttccctcaaacacaaatgtccccacatggactatttcctcagactaccacatatgtccttacatttacactttcctcagaaaacagacatttcctcatgtggactcttgtctcagataagcaaacatgtctcagtgtgaatgaagtcttcactcagataagtacacatatttcaacactgactgtttcctgacacaagcacatatgtccaatgttaaactgtcttgcgacaaaatgatctcaagataatgataattataaactccaaccctgaaaatctgtagatctgcattttgtctattgtaacataacttcatctcattgtcagaaacagtcgtttgcagctataaatgcactgattacagtcagatttccattttctctggaaatgtatttcttatgttcttactggactaatttgttgataatgtttgctcacatgaagatacctgaacagtgtccacattagagaataaaaaagagcaatgggcagattaaccctgtgcatccagacgcaggaaccatttgactctgccttccctgaaatggagacacagaggatggatgagcaacgctgagtggtgcacctacgaccacaaagagaaagacctggaaatatgtcccatcccctcctcatgaaaggcagctcatcccctgttccttcaggccctggtgaggagccaccccatatctgtgtctttcttcagtgttcacactatggagtctgcactgatctgggtttcccttctcatcaccctccatattagtgtcccttgtaaatcaggtccagctgtggctgctcatagggttgttctcagtctatttcctctgtgttcatagaagtcctgtatgaagttcagtggtggagtcagaggggtaaacgtagtacagcccagtggttcactgagactttcttgcaaagcgtctggattcaccttttctggcaacagcctgaggttggtccagcaggcttcacaacagggattgtggtggctggcaacagtgagtcaacaagtgggagtgctcaggtttactcttcatgagtacaaataaattaactggtccagcgacaccctttcacgtgcactctaccttacaatgactaacctgaaagccaaggacaaggttgtgtaatactgtgagcttcacaggagagagattatctgcacaagcccagacacaaaaatctgcagggagacaggagggaactgcatggtagatgctgctcagaagcaccagggggcactcaacacaagggggcgctcaggacaccaggcggcactcaggatacagctgggggcgctcaggacaccagggggccactcaggatacagcggggggtgctcggatccaccagggggctcttagggcaccagggggcattcaggaccactagggagccctcagggccaccaggaggacctcaggacacgtcagcgtgctggagccaccgggggggggggggggggggggctctgaggaaaccaagagacgctctgaaccgcgaggggaaggaagctcaggaccacgaggggacgctcaggacaccagggggcgctcagaacaccagtgggcactcagaacaggaagaatctcttagaaagcagctccacatcaggatcctgggaggctgtggagaaatgggaacactcataaactgttgagcatttaaattagtacaaccactatagagaacagcttagagtttcctcaaaacctgacgatagagttatcatataatctggcaatcctgctgctggtatatacccctaaaaaggaaatgtttttgcactaccatgtctgtaatagcactgttaaagcactgttcacaacagtcaaaatttgaaagcaacctatgtgccgattaacacatgaatggataaataaaatatggtacatataggatatgggttaatatcatgccataaaaaaatgagattttgtcatttgcagcaacatggatgaaactggagttcactatattaattgaaatgagcccagaacagaaagacaaaattcacatgttcccatttatttgtgaaagctaaaaattaagacaattgaactcgtggagatagagagggaaaagatggtcaccagaagctgggaaggtctatggtagatggggattattggggatggtcaatgggtagaaaaagtgattagaaataataaataacacataatattttataacacaacagaataaatatagtcctcaataacttaattatagattttaaaataaaagtttatgaatggaatgttggtaactctattaatgcttgagaggatgtataaaatattcttcatgatgtgattattatgcagttcatgctgattcagagtcctgtaccccataaatatatacgtgtactatttacccacaaagattcaaaattaaagtgtttatgtgtctaatattctgtaactatattacattaaacctaagaacacactggcttttacacactactgtcatccacatagacattcatagccttctttctctgcttgtccataatcccacactccaaaatgagaaaacctctcctaagatatgacattaatttacttagtgcacaatttcaaaatacacaaatcgtctttaggattgttaaactgacccttgttgaaaatatgtttatcaactagaatacagtgcttatgtggagcttatttatgttttacaatcgcaacatcaaattctttccaagtctcttgtgtccaatatttatgccccaccttcttcagtgtaattagttcaaaccttctgattgttgttagatatttttatacagctgtctttttttgtgtttcatgacctgctaaatactttcgaagttgtatgcatttaggttaacactttgtctcaaaaaatatgagttttcagaaattctttatgccatgtgtccatcattgaatatcataaaaatagtttcattggccgggcgtgttggctcacgcctgtaatcccagcactttgggaggccgaggtgggcggatcacgaggtcaggagatcgagaccatcctggctaacacaatgaaaccccatctctactaaaaatacaaaaattagccgggagtggtggtgggcacctgtagtcccaactactcgggaggctgaggcaggagaatggcgcgaacccgggaggcagagcttgctatgagcagagatcgcgccactgcactccagcctgggtgacagagcaaggctccctctcaaaaaaaaaaaatagtttcattgggattaaaaagtgtgtgtttcacctaatccacacaccttctccccaccttcctgggaaacctcaaatgtttactggatctatatttttatctttggcaaaacagcctggctgttctcttagcctcttttgcaaagcatcaagattcaccttcactgactacagcataaattgagcccagatggctgggggacagaggctggagtgggtggtaacagtgattgattcaagtggaagttctcagtgatattctgcatcagcataatgaagattcacaattcccagggacaccaattaccagcacagtctcccttaaaataatctacttggaagctgagggggctctcacaggggtaggcagtgtattactgtgagagacacagcgagggacatttctgtgagtccagacagaaacctccctgcagggagacaagagaggactttgtgataaatggtgcttaggacaccagggggcactcaggacagcagagggtgctcagcagagcagggtgcgctcaggacatggtgtgtgttgtagggggcattgctcaggatcaccagggggctctcagaaccaccaagggtcactcaggaaaccagggggcgctctggacaccagggggagctcagaaccaccaggtggtactcaggacaccagggggcgctcatgaccagcagggcatgcttgggactctatgaggcatgcaggagaagcaggccatgctcagggcaacagggggctcacagaaccacctgggggtgctcagaaccactaggggtcactcaggacagcagcaggcattcgggacaccatggggccctcaggacctgcagggggcgctcagaacaccaggggaaggtcagaaagacctgggggcacttggaaccaccagggggcactcaggacagcagggggcgctcaggaccactagggggcgctcaggaccagcagggggtgctcaggacaccatggggcatgcaggagcagcaggctgttctcagggtaacagggggctctcagaacaacctgggggtgctcagaaccaccagggggcacccaggacatcatgcggccctcagaacctgcagggggcgctcaggacaccaggggaagctcagaatgacctgggggcactcagaaccaccaggtggcactcaggacagcagggggcgctcagtaccacggggtgcactcaggacagcagggggcgctcaagacacagtgggatgctcaggaccagcaagaggcactcaggaccaccagggggcactcgggggagcaggaggcactcaggacaccagaagaggatcagaaccactcgggggcactcagaaccaccagggggcgctcaggacactgggggcattcagaaccaccagcaggttctcaggacacccagggacactcaggacagcaggggcgctcaggacaccagggagggtgctcaggacaccagggggctctcagaaacacctgggggtgaccaggactagcaggggcatgcaggacaccagggaaggggctcaggacaccagggggtgctcaggacagcagggggcacagaatcacgagggtgcattccagaccaccaagaaatactcaggaccaggggtaacagaaacacctaaagacacacaagaccaccaggaggcactcacgactgctcagagtgctgaggacaccagagcttcaggacgaacagggggtgctcaggccaccatggggggctcaggaaccaccagggtatcactcagacaacagggttctcttaggaggcagctccacatcaggtgcctggggagggtcagatttgcttttagaccttgctgatccctgatctggtcaagcgaaaaccttcccaggatctctcaccatttcttccttgtaacccatggtttctttcacgtacaaatcattaacttagaacaggaattcaattcaacttttaaccctccatatttttagaataacactagcagtaattgaatgttttgataataagaaattgcgtatgcctaattcaagctctggttccatgcatgggtttttgttttctttgctgtgtcagtcacactatagtcaatgcttttctaccaataactcagcataggcatagtgttaagtttctttttctttcatctgccttttgtggagatgaaacaccactttcagggctcagttcccccaccttggttgggttctggtgttctgctcctcacactatttctccaccttcccttcttctgtccaagccttttgtcttcctcagtctcctagcaaggaagcaacaagtccctttattttgcctcttccatgtctggtgaatctgttcacttctcttcatgatcattgaagtcaaccaagtttaggaggataacagttctccttagaatatgctcatctacctgcagactctctgccttcctcacccctttctagggtcctgcagacgtcacctccaccacatccactcctttacctaagtaccacagaatagtctctgcagctcctgctgctctctgtgtgctcagcactaaggctcactagtgctttgatgatgaagttcaaatccctaatgtgttagcaattctcagacaaccctgccattgtgagtgaattttggggatcctgggctgttttcagttccatattactggatgttctctagcatccaggagtactggcaaattaacatctagaatttgtattgcaaatttatacaaaatcaattgtagaaaaaaatcctaatttctaaataagaacatttatcctgacttttataaaaatacaatgtgaatttaaccaataatataatacaattttaaaagtgatgtttatcttatatgttattaagtttattaataattggctggtattttaaaagtatactgatagcaaaactgacaaataaaccaacacagattctatacataaataccattgtccatttaattaatgtgtttggccagaatggcatttacattcagttctaccgaggcatgtctttaaatgtatttgtttattggcattaggatagagaaacactcacacagaaaagcattatttgggactactacattatactataaaagagagtaaattcaattcaattaaataaataaaataaattgaataaattcatgttttggtttggtatttggataggtgttcatttttctattttcacatgtatatttcagtactgggcatatgtgtgtatgtgtatgcatgattatgaacttctaaaatacattactcccctatatagttatataaattgaagttttgcatgttaagagacagtagaaaccacaaaaggggaaaagttatagaaagcatttggaatacctagggcctacagaggagtcatattaaaatgaaaaataatagctgaatattttggaaatgacacatgcagtaagaaatgtctatatgaaattaacaggatattggcacaaaatttagaaaaaaataacatgattatgcccactattggtctatgatatgcctataataataacacattttatttatcatagaaaataaaataattatacaaatagcactctcattgcttgattttagtattaggtacttcacttgttttttgatagaaatgaacatttatcattttttgatgataatttctatattatcttctaaaattaatgtccataattatgattgacatgttataatttccagaaacctattttatcaattgtgacttgtatttttatgatagtatttttacattcatatacatttgattcagaataattgtagattaacaaaataatcataaagttaatacagtgtgttcccatctctaagtatctcctaagatgaacatcctccacaatcataaaacatggtgttaacacatttacgttgataactttaaatatattcaataccaggccttatttgagatttaccatttttccaataatttcttttgtaaaccaaaaataaaattctaagcttcctcatccaactaaatgaactcaactatcagccaaagatattttaaagtaaactttaaaacttgttccagcaataatgggaaaatgagaggtcagatatgcctcattatgtcctcctgtctttggaattaaggcacctgtggccagcattaacactaaaacaaagacccttagactgacaaaactatattttttctataaacactcttcatagtgaaaagataccaaattacaatatgattctagtatagcatcacatgacaaacagcaacgcctaaaaatctattctctatgaagtctgctacctggaggtttcatctacataataacaattatgagctccacaatctcgtatcttaatccagatactcatttgtaatgagtgtgtaacatttcaaccaattgccaatcagaaaatgtttgaattcacgtatgtcctggaagcacttgagtaagcttattctgcctttctggactgtgtaaatggtatagctcacatgtgttgattcatatctgtctataccttctgtaccactaaaatgtataaaatcaagctgtaaccaaaccattttggatacgtgtactcaggaactcctggagttgtgtcatgggccttggccactcatatatatctcagaataaactgtcttaaataattcacggtttgtctcttttagtggatactgtctttttcttttttctttctttttttttttttgttttttgagacaggatctctccttgctgttgtttttgtatatttgtttgttcccagattccaacaaggtcatcactttgaattgagttgtcatgttcctttattctcttctggcaaatcacagtttgtgtttctgaagttttctagtttaatattttatagataaaaatttatcaagtagattgatagtcctatttaggacacttatatctttacttatttgaacactgcttgtcaatcacaatgagtgttgatttctccgtcttctatacatgttattatattttctgttccaaatccattcattaagtatttttaaatgtattttggaaagttgatcctattactttatgtaatatttctcttgagtcccaaaggtcttctttttatgattattttgtcttaaattaacatagctatttaagttttcttttggtttatattttcatgatatatatttttccatctttattttttctatttctgaatatgtaaagaaattttcttggagataaataatagttgggtgtttttttttagtcaactatgaagaattattttttaatgatgttactcttttgtccaattattcttgttttaatttgtatttttacaataaagtttattgtttctattaacttattatttaatcattctgtgactaacattttatgggttaccataaggataacaataaaaagtttctataattgaattctaattcaaaaatttaattcccattcatatatactacagagatattataactctatatatctaattcctctttcctatcccatgttttttattttctgtttgtatctatacatgctataaaatgtaatattggcatttttataattgctttccacacttacataatgaacaaaatacaaatgcaaaaactgtatttcaacctcatttttccattgttgaccatcttctttgtgcatattttcaggtgttggatctatgtcacatggctattcatctagagactctgctaaaatgtctacggaaagattcatgtgctggaaataggttttctcaggttttattggtccgacagaatatttatttgtctttgatttattgtctccagagacaatgtcaagaatatgctatatctgcaaatgggcgatctgtaaaccaagaacacatcagtatatcactgtgcaagaggagcacatgagggaaagccagtgtgtgcccagacataaacctccagggacacatgggcgaattagctgcagggggagcttgggacccactgatgagagtcgaccccagagggaggtgcacagaaaggttaagaactgctttcctgccagtatatttttaaaaaaacaaaacttccatctgacagtttctccagagaacttccctaattttagcattctgtgcctaccaatgccatcactaaataggtttttaaaaaatattgtaatatgaggacatattctcatatggacaaaacgcaaattgacatttacagaaatgaaaagtcctcaaccgtggtcgctagaattggagacctgtagcagctcagtgggacctgttgagtcttctccaatcacactcagaacagagaccttagtgcatctccctgactagaataccctttaggtatcgagataacagcctaaagatggtaaatcatgagagtctcagatgtccagatgacagacatgggtctatgggaatagtactgtaactgacagtaactaattttccataccgccagatgtcctattcaggagcagctacagcagtcatgcctaggtgtgaagatcacacactgacctcacccatgctgtctctggccacttcatcacaaccaatgcttaatattggacgtggatctgccagtccccggggaatgggttgaatggataaaatgcatggctagtgctgctggaaacccattcctactgtggcaaatggcagcatctcttttaaaaggctaaataatattctattctgtatacataccacattgccattatcctttttgtttgtttgtttgtttgtttgtttgagatggagattcactcactctgtcacccaggctggagtgcagtggcgtgatttcaggtcactgtaatccctgccttctgggctcaaacaattctcctgcttcagcctccggagtatctgggattacaggcatgcaccaccactcccggttaatttttgtattttttgtagagatggtgtttcaacatgtttgtcaggctggtctcaaactgtgacctcaaaaaatcaacccacctcagtctttgaaagtgctcagattgcaggcgtgagccatagcatccagccacttttctgcatttttttttcattgacacttagattatttcaatatcttggctcttgtgaatagcgctgcagtaaacataggagtgcagatatctccacaaggtggtgattttttctatcttgggtatattcccagaagggaggttgctggtcatacagtagttctagttctaattgatttaagatcatcttactgctttccatagtggtggagattcagattagtgtagctattatgaaaaacagtttcaatgttggggagtgactgaaaaacaaataatgcttgattatggttctccatgagagtctctaataaacctaatggaagttcagaaagtttcctcaccttgttaagaaaacatttgttttgctcataattctctttcagcccagagttggcagtatgtagaatggaggctgttggctcgtttaaggattctgaagcaaagaacagtaatgagagatgacaatagagaaaaagagagagaaggagatgctgaatcatcatggactcattccacctgcaagcctttcactgtaaagctctattgctaaggatcctgaggattctatactcccatgaatgcataatcaggatccctcaattcaaattttattggcagagacacactgggacccctctaggatatgtgccctacattactggctcaacatgccgcactgagaatcctgcattaactggctttatttgtagtggtgagtaaagttcacagttttcagtcatccatgaaggggagattttttttttggttcatataatttttgcagaaattcaggtattagtgaaaaccaataagattgaggatttctggatattttagcaacactagggatgatggccattttgtagaaaaatttacatttttcaaactgacctacatgttaggctgacataaaaaaatccaactacacagcaatattatggcaacacttcaatacacttggtggtgaaatacctcagaaatgaaatgttacacagattaattgagttaatgaaactgttctgaactatgataaacatttgtttgcacccagatttgcttgaattcaatttgattattatattcagctgctgccctaacttatttgaatgagtaagttactatttaaatgaccctgtctgtttgatttgttatatatacatctgaattaaagaacttaaaggacaggtttgtgctattattagaaagagatattctggggggcccttgtttgctccaggaacctccacatttttaacttagaattaatataaattccttgtgaattgggtcagtcttcaagagacctaatctctaaaacatatacccagaaccttctccagacagaccatccagaggaagaatctttccagtaatttatctccatggtggaaggtccttcattgtcatgcagaaccctctgcccaggcttcctttattatgcaaataattaatattagccagtagggtaagattaaacaaaaatagaccggagatgctgcagacagggaaggaagtaatagaccaaaatcagctttattaatggagactgcttttaaaggtcacagccaagaaatggaagaggataaaatcaatgagatgaaattgtaagaaactttgtccagttcaatcaagccatcagcaaccagatagcttcagtggacattatgtgtattacaacatggctaaagattctagattacacaaggattttctctatagtttgcatattgacaaagtggaagatggcatgggagatctggtggcaaacacttaaggtgcaataatagctatttttcctatatcatgacaatacatggcatgcctctatattcatttcattccaaagaagtccttcagaaggtcaagtaaatggagaatcttacatgcatggcccaatgcagtctccaagaagtgattttgaatgtacagctacaccagttactgcaatgctgtgtctgaccttcccagcatctaagatattcatgagtatcaagggggagatgggtctaggtgaaagaaaaggaagtagtcattcttgagaagaatggtatggccaagataagcctgaactctctatcttcttccatttgctgcagcttcttattgcccgattgaggtcactcgcccatggtggtaatgacatcagcaatgcagtacattctctggtggctttgtatctggtttataatgtgggagatgtttcctcaagagtggtgacgccagtatggcttctgctctctggtggtgatggcatctgcattagcctaggggtttggagaaagagagttattcagaccatggggaagaatctgacactgtcacaccgcctggtgccttcagtactggactggctcctgccctcattggtgattgcatcaaatattggcctcctcatcagtacaacacattgtaacagtcttctttgtacctggctttaatccaagaaagttgttgacttatggctctttcattatattgtatggcctggtttgtcacaatctttatttctggaattatcagtgctgccatcttggctgacttcaagtatgtcatcctcacagtttgaagctgcttgacattaacatttttgtcaatgtttgggactaccttacatattccggctctctgaaagaatgattagcgttagggaaggctgacactaaatttgggagccagagaaggaaagtgttactgtgctacagttgttttgtgataaatatggttaggttaaaaatgagctatgtaatgtagccaggtttccactgagttccactttgcttcttggctgtctattcctgtgcaagtttctatatattttgtatcaggcttcaattccattatgttttaaatgttgtctctaaagataaacaaagattttttaaaactaccaaacatgcagccatttgacagagtgtgcgctgcatttttagtctcaccatcttctgccctaacaagcaccgaatctaacaacacaaatatcatggaagctttccttggagtagctcctgtaattagaatcattggtattctgccctcctgtcagtggtggaacgttctattggcacatgtggaaacctcttagagggatgagtttctttgaacacaataaaattttaagttaggaataacttatttgaaagcaattcattgaaggttattgctaagaagaagttagaagcagtcttttggcagtcatttcttcaagatgtatggcagcgtaggatggatatatgaagtggaataggaacttgggctagttaaatggaatagcctccaatgttaatctgtttaccttttaactgaatgaaaaagcctatagttgtaagaaaagaaaaaacaatacagtgctcccctgtcccacacattaccttctcatcagtataattaatctacattgaagatgagtgtggtaatgcagagactctatttagggaggagaacatagggaaatgcaaagacaatgggagaaaaaagtcaaggacagtagagcaattcgaagcctctgataccaatagcttgaggaccaaggtcatgactcaacttttggtggacacagagtcacttctcttagggaaactgcagtattctaaggtgacaatatgcaaacatgatgaatgtacacttgctacatctccaattgtgtactgttttccttacttctgtttgaagaagggagtcgtatactcaggtctagtatcagtgtagggggtgctccctatttgcaagatactagaaaaaaatggtaagttagaggcccattgttataaaaatctactagctccgtgtcagtgtgtgtgtgtgtgtctgtgtgaatgtgtgtgttattgaaacagaagacatggagtgggcattgatccacaagcatagatacctacaggcactcttagatgtaatatttaactgcaggagtctaaataaaataaaggattcgccaaaagtcttgaaaattttggtgctgactatgtgtccactgattcaatgcatcctgagttccagggaagggaatccccaattctttcatagagttgactgggtctcctaaggtcaatgttttcaaacgatggtgtcagtaacatatggtgtcactgaaagagcattttaaactagggcatggccacttcctatagccctagagacactgagaggtaaatgccctgtgagcccagatggaaacctccatgcagggcagaggcagtgctgcagggggcgcccaggacccacccagaacaggctccagccccagagctggtgcacaggaggctgcagagggagtctctcacaaggactgagtgttactttactgaaaaccaaaaaattataacatgctaaataagaattttatgaggactatttatgtatatttaaataccctaatgtatttagaaataaataaatcaataattcagtgagaaccacatttaaaaggcaaaattattactgctttgagatattttactagtaaaaagataaagaacaagaatggttttattaaataaaaatgtacacatttcagagacacactggtcccgagagtaagactgcggagagcaaatcctggaaagggcggaggctgtccatgtgccatgggaacttgggctcacgctgagaaccatgtccggtgtgagtcagcttcttagcggagaaattctcccttcacaaatttccgggcatataaagggaaacatgtcattaaataagaatgaagatttgtacctcagcatcccacagttgtgtggtccatgtgagatctattttctctttctcgtgctggatcaggtgtaatgctatgaagtagtagtcctcatgaatacgcaaatcacctgaggtgaacactacagataactctgtgccctgagagcatcacccaataaccacatccctcctctagagaagcccctgagagcacagctcctcaccatggagtggacttggaggatcctaattttggtggtcgtagctgcaggtaggataattctcagtccccaggactaaggtgactgggtccagtcaaagggggttttatccactcccgtgtcctctccacaggtgcccagtcccaggtgcagctggtgcagtctggggatgagatgaagaaggctggggcatcagtgaaagtctcctgcaagacttgtggatacacctaccttcaccagttactctatgcactaggtgcgccaggcccatgcacaagggcttgagtggatgggaaggatgtgccctagtgatggcagcataagctacgcagagaagttccagggcagagtcaccatgaccagggacacatccacgagcacagcctacatggagctgagcagcctgagatctgaagacacggccatgtattactgtgggagagacacagtgtgaaaactcatatcctgagagtgtcagtaaccctgagggaggaagcagctgtcccagttttcaggatatgacaggatttatggggtttaatgttgtttagaaaataggttatataattgaggaaaagaagaaatagaaagatatatgcattctaattatataagaaatattcttttcaaatctcaccctataagcaaaattaacagagtgggaaaagcagcaatcaatcaagctgaaacaaacattcccatggaggatttgtgggggcagacgttttaaaattgaatgggtaaatcatttagggcaagattgcttgatccaatactaagactaaatgtaatttctgagaaactgcctatctttttatattaaatttattataaagcagttttagggttacagcagatgtaaaaagtagaaacagagagctcccatgtacccctgcccaacacatacacagccctccccatgatcagctccctgaaacagagtcctaactgcgttatgtgggatgaacctacatggacacactagttctttcctttcctggtggtcccccggtataacaaacataaattattttgaagcgccacgggttcttcaagtgggttactgggaatgatgccagttagagggaaagtgggtggggccattcctttttgcactctttcttcaggaatccataaaatgcacattgacttagagctcatctgactcctggttttctatgccccttcccagagggtaagttctccaagcgtgggaggaaggtccatttcactaaaaggccagaagcttctggtgaattccataatgcacaaccttttttgagaagtggagactttggacatgagggatttcatgtatgatgccctggagttggattaaatacagcataagctcttgggggtatttctggaggaggccctttctgcaggaaattagaatacatgcaggggatccaggcaggaagaatcacttcctttgacatcgtttggcacctgaaggaagccctctcagcattgggcactggtcccacttgctggctgcactttagccagaggcctgcgcctgatcattcttgcagtgggagagccttactggggtcacaggttataaaaatgcctgtcactctccagctgagcaagtccatatgcgtgcttgtcagtgtcaaccccatgatgagtgcactctggaaggtgacaatctgcacacaaacctcctcccactagttacccactactatacactactttaaaaattaatacttataattatataatataatatatattatataactatataaaaatgattatgatgatgacatttggctgttgcaatttctttaggatctctgcatctctcttcactagacatgtaagtcttcaatttcttgtccctgtgacacgttgcccagtgtttgaagtcaaagttgtgccgagtacctgagtatgtcctcagagaagatctcagcaatggttgattgttctacagggacttttccaggagacctgtcccagggagtcatgaggttcctctggaaatactagcccctgcaggagatgagacggaagcaggagaatcaagagcaggtgacaacattgtcagcaggaggctccagatgctttccagacacagtgaaccttcacccacttgccacactgcacagggagtttgcaggggcacaatgaggtgcctgtctgtgggatgttgggggacaaagtgaaaacctgagctcagcatccaggaaagtatgaactccagccctgataatatgtagcctgtgttttctttccttctacgtgaacactttgccttattgttaagaacagaggattctagctctaagtgcacggattgcagacagctatgactttcctccgggccaggctcctcttaatgtacttcttggacttatttgttgatgaaggttggttccattaaataccaaaacagggttcatattaaagaaaaatgaaagagtgacaggtagattaaacccgagcatccagttccagtgattctttgaccctgccttcccaaaaatctccgatatgaacaatgacaatgccctccatggttagattatattataaactagattgagctagagtgtttggtgtattaagtcactattttttttagcttccctgttagttttttgtttgtgtgttagcatttactttaaaattctattaatcagttctctagtaggtagaaattcatctgagagtttcttctcttgttgtccactttgataagatttccagaagacataagaaccctttttgtttgcaaaaatattccaaagttttacactaactaggaacatatatacttaattctaatttttaatttgtttaaaagctctaataagtgcactgttttctgccttttgagttaatttcacaacacataggagaatatatcctaaatgaaagtttgtgctaataatacaaattattggtaaataacctctgttttaattattgaggtattatccattaatatataatcttaaattgatgttctcaatgggactcttacctaaagaatatacaaaatattttcctgatcttgacataaaatagatgtgaacacattcttagtattcagccatgtctcctgtctatcacattatgaaccacatgctaactttgatttacttgggacttgttctaatttcaaactagttatttttttatcttcatgcagctggattattatgtgtggctattttatcagagaatgataaagacaattttaacaattttcactgcaggcacgtctaggcaagccccctgtgcacaatgaccttcgtgggttggacattctatggggactctcccctgtctgcctaggagagttatctgcctcctccctctatcattttcctctttgaataagcgcatctaactgccgttagaatacagacaaaggccaaccttaactgctcccagctgacaggggatgctgttttgggaagatctcccttgaggtctgtctaagggacctagtaaaagggagccattatcccaggcttcacttggatgaccatttggagttgatgcctgaaggtgagaagagacaaaccaggttattagaagacatgtatcaaaaccaaacaaggtggtaaggacagtttgaaaaaaaattccaaggctgctgacacacccagataactggcggctgtagttatgcctgctaagatttgggtgcatggggcttggctttcgttagctccctaggacttattttcccaaacaaagaaacctccgggttagggggaccctatttattccagtcacctggcatgatttgcaggataattgctcagaattaaaatattcgtccagatgtttatatagcccatgcctgtgtttcttctgagctgcagccagagatcattggttcgttcacagcgataagcagagttagtctaaaatggaggcaaatacttaaaacaattggaagagactgtaatttaaagacaaatgtatgatatgttttgaaacataatttttctctctccagttctgatttttgtcagaaactaatcattataggactgagtgatttgcaaaataaactttagtcttgtggttggtctgatcatttgcataaagtggagcaataataattaataataattctgtaggaaaagcctgcaagcaccaggagcttcacagtctaacagtatgagcacatgcatcctccagcaactcactgaatattttcaagtcagctggttcttagcttaaataacatccagttggtatctgtcccaggaacactaatatatggttctctctgcaggcccctctcgccacagatttaaggtttatttttttcctctgtgatatcaactcagatatgttgaaggtttttcccacatttgtggtttttcaggtttgttgttaataaggtcagaataagatcatagtttactcatttttttacattcccatgctgagtagctacttttctctataaaatccattagctgagagaaaaaataacattttcctaacggtgaacaattaaatagtttgacatatatttgtgtaccagtatataatgcagcttcgaatcaaggtgtgcctcaatcataaaaaacatggctaaattctcaaagaattgtgctgagtgaaagaagctaaggaattaagagtaaattttatataattcattgtagaaatattagaagatgccactaccataaattaaaatgaagaagacttaaatttttctgagaaaatggtgttgggaatgatgcggatgtgatttaagtttcagaggaataaggaaaaagatttagggattaatttaattattcaaaagttgattgaagtgccgagtgaatggctgcaaacatagctctacatttttcaaatcattccctataaatctgaattaattatttatttattatacttgaataaagcaataacgaagaaataaatgaatatttttgctaaaatggagcaataaaaagactgatattgacagaagaaatatgactgacttctgaaaacacacatgaaccatggttctctctgcatatttaggtgaattacagaaagttgtcataacagatggggaatcctgcagacttcactaggcatggtccacgctgccctggagttgtctcaggggagctgcctcctccggtgattagagcacaggcccagataataggattacatttttttagatgtgtaaacttagacgcactgcacagctgctgtattctctatgtaaattatcttctgtaaaatacaacattaaaggctgcattaaatatattgtgtaaatatgtaaaaataaaatcagattatgagagctaaatgttaatcaaggcacaatcacataatataaaattatattttcctgaatgatggaattactaccaatctcccccaggagacttcatctgcactgggcccggcctctcctcagatgtcccatcacagagcttgctatataatgggggacatgcaaatagggccctccctctgctgatgaaaaccagcccagccctgaccctgcagctctgggagaggagcccagcactgggattccgaggtgtttccattcagtgatctgcactgaacacagaggactcgccatggagtttgggctgagctgggttttccttgttgctattttaaaaggtgattcatggagaactagagatattgagtgtgagtgaacacgagtgagagaaacagtggatatgtgtggcagtttctaaccaatgtctctgtgtttgcaggtgtccagtgtgaggtgcagctggtggagtctggaggaggcttgatccagcctggggggtccctgagactctcctgtgcagcctctgggttcaccgtcagtagcaactacatgagctgggtccgccaggctccagggaaggggctggagtgggtctcagttatttatagctgtggtagcacatactacgcagactccgtgaagggccgattcaccatctccagagacaattccaagaacacgctgtatcttcaaatgaacagcctgagagctgaggacacggctgtgtattactgtgcgagagacacagtgaggggaggccattgtgcgcccagacacaaacctccctgcaggaacgttgggggaatcagcggcagggggcgctcaggagccactgatcagagtcagccccggaggcaggtgcaggtggaggctgtttcctgtcaggatgtgggacttcatcttcttccaacagtttctctaatgaacctctctaattttagaattctgtggttcctaatgtcatctctacatattttcaaaagatcattttaacatgaggacataacctctcatgcaccaaatgcacattgatgcttacaaagatgaaaagttctcaaccattgtgaccaggatcgcagtcctgaggaagctcacgggtgtctgatgagtctcctccattcaggcccaggacagaaacctcagagggattcctggaccagaacggcagggattctgatcacagccaatagagaggctgggccagggtcagtgtcctgtagaagctcacagggttcaagtctgacccttctcctgaccctaaagccaatgagcatcagcactgatctggtgctgcttttgctcccaatacatgttctttctttggagtgtttgttctcccttttttatttgcttttctttcttcctgaaaaagaaacacatggtctctgtgatctacactccagggctcaaggcattttcttagaactcaggcaaggctcaggcttggctactccagccacgtgggagaggctgacgggatttccttctctctccatattctcagggccctcctctgtgttgtgtgtagactcatctgggaatgcaattggctgttagtagtgaaggggatgaactcatttgatcaaaatgggatgtggatgtggaattaaccctgttctatgcacactgtcagagtcatcttcttcagaagtagtgttagaaagagcttgtgaaatttatcggcaacaaaatggatccccttgtgttaaaaccctaatgaatgaagctggggaaggccatgaaggagggttctaacacatattcctgataagatgaactgtcataaatagactctgcacagccacaaccttttacacggagaccaccacagccttaaaagctttatttctccaagtaaatctgccctgcaactgcctgttcaaccttacaccgctgtctcaaaatagctgctgtcaccctcctcatttttccttaattctcttttttattattttttaaattatactttaagttctagggtacatgtgctcaaagtgcaggtttgttacatatgtatacatgtgccatgttggtttgctgcccccattaactcatcatttacattaggtatttctcctaatgctatccctcccccttcccgccaccccatgacaggccccggtgtgtgatgtttcccaccctgtgtccacatgttctccttaattttttatcttccttttcctacctgaatgtacccatacatattttaattgaaatgcacatcctggaaaaaatattattatactttagagtctctttctgtctgttattcaggttgacaagctgcagacggacatgccacatttctgtgagacatagaggatgacagtttttggagatgtctaggaatctccaatgtccataagatcagccatcaataaatgcagactggaggtcccagagagaagtgaagctgctgaatcgccgtggaatttcattttctccagttctgctctgatggaatcaggcccaccaattttatcaatgacaatctacctaacttagagtcaattgataacagtattaatatcatctattaagtaaattcataactatatatatagtaagagagggagagagagagacagagtctcgctctgttacccagggtggagtgcaatgtcatgatcttggctcactgcaacctctgtctccggagttcaagcagttctcctgtctcagcctcctcccagtatctggaaatacaggcacacaccaccatatccggctaatttttgtatttttagtagagacagtgtttcaccacattggtcaggctggtctcaaactactgacctcaggtgatccacccgcctcagcctcccaaagtgctgggattacaggtgcaggccaccaagtccggctaatttttgtatttttagtagagatggggtttcacaatattggtctggctggtctcaaactcatgatctcagcctcccaaagtgctgggattacagatgtgagctactgtgcccggccaacatcacctatattaatgttggattgaataactacaaagtctaccctaaccaagtgtaccatcaaacttaccattacccagagggaagaatctttaacatgagatcgatttcttaagtgttttaaggtgcaaaactgaccactgtacaatcacccaattatgattttgctaatgagttgtagaagttgcatgtacattttggatattaacactttttcagatgcacagcttataattatattctctctttctgtgggttggaaattttttccatgctttgcagcatctttttgctgtgatgtagttctgcttgttcaattctgcttttattgtctgtgcctttaatttgaaatataggaaatcattcttaatattattttctgggtgggggaaattttacaattgcaagccatacgtttaagtatttcgcccatttagagtaaattttggtatttaatctaaactaaaattcttaattctttgcatgtgtagattcagtttttctaacaccctcttagggagagactttgattcatccattgtatattgttagttctcatgctgaaaatcagtttgctgtagatatattagtttatttctgagctctctctatatattaatgccaataccatcctgttattatttatggatcaaaatgtgcatatttgtgaatttcaaaatgttgttcagaacttgtgcatgccaacaactgtgtttctcctgcactcttgggctagtgaagctctcacagaccctctctctcacctgtgctgtctctgcattctccatcacaaccagtgcttcctgctggagctgcatccatcaccccccgcaaggaagggactggagcgaatcaggtgcacaggtcatgagggagtgcacattccaacccactcctcaagagtccagtcactatctccagatccacatccaaaaaacagtgtttcctgtagctgagctacctgagcaacaagtacacaaccatgaattttaatacaaaagacacaacgaggggaagtcattgtgagcccagatacaaacctccctgcaggggagctcagaaagagcaggaggcactcaggacaccagggaacactctggacacatcaaggcaggtgcaatggggggacaaggggctggagatggggtttggcatcaccatcgtatttcaccactggacacccaccaccgtgtttattctcatgtacctgattctgtgtattattagaaaatggcatttatataaatatatagccatatgtaggtgcatcaagttgtcctctccatcgtatgtggacctttccactaagactctgagtccctgtatttatatgagcacctcataaattatggtcaattttgtgggatctctatcttttctttctcccttcttccctccttctctctcactcacaaactcacacacacgcaaaattctacaacttcagttacgtgatgtgttgaagacagtttataatgtgcagcttttccagtttagctgatgttcatattgctgtgagaataggaacattgtgtttctcagctgtgtatttctctaaggtagcagcaacttttttttttaatttgacattttttaaaaattttattattattatactttaagttttagggtacatgtgcacaaagtgcaggtttgttacatatatatacatgtgccatgttggtgtgctgcacccattaactcgtcatttagcattaggtatatctcctaatgcatttttttaaatacccagatactgaaagcaatccaaatatcaatcagcagcttaatcataaacaaattgtggtaaattcattccctggaaaatcacccactgttacattctggtaccgctggatacgttcaacagcaaaggtaaagtcacaagtacatatgatgagtcaaataagacaaataaatacaagtacacacatacaattcctcttttataaattctataaaattaataccaatctaaagttacataaagaaaaccagtagttgactctgggtgtggtgtgagaaggaaaggtgtaggaacaagaaattacaggaaaacaagaggaaattttgagggcacttgagttttttctgtgttgagaaaggtaatggttatgtcactatttgtcaaattgtgcacattatgggatggctattatttgctaatttcacctcattaaaatatgccaaatttaaacacatataatttggtagaaaataagttagacagagatgaataaaatatatgagaaataaaaaaagaaaatcacagaacgttggcataaggacttcactcatcaaactgaagaaattttaaatttctcaacacagaattaaagatttaattaaagatatatgagaaatcaaagactcctggatatatacatgaataaaccctaagcctacctatatttttagggaaacactagaatacaacaaaataatgtcatgaattcattacataatgggcgttaatcaaaccccaccaggcatgtccagctgtgtcctggggttgattcagggaacaggtgtgtcctgtggttaggagaagtggcaacaagctcacagcatctgttctagttgacaccataaaaaggccaagagatcacaaccaaaatgtagtgtggatgtcacatctgtgagtgccgcacactcccccatgtgaatacgaaaaggttgattacctcttgaggtgtctgctgagagtagagctggtctctcaggaatgtccaaaatggctcgatagagcaagaaaggagactggctcaggttgctataccagtttggtggtggaggcagagtgagggttctcactcacagaaatgggtttgtggggtttgaacctccaaatggcatcaaatgagggagttcttgtgattcctaactagatccacctcgtgtcggaaagaaaggagatgatggaggaatgagccttaagttatcagcagtcagacatcaaaacaagtctgatgacttattctatgtagcaactataaataaatgaataaaaatagatcataatgaattattcataataaatgaataaaaatatgaataaaaatagatcagtgtccaatatgggtggacaaaaaccagtctacacaaaacaagaagactgcttataagaataagcaaatcataatgaaaaggaggaaaatgaggtgaaaggcacggggcaggggattacacaagggtcctgttccaatgtcttgtgtggagacttttcattacctaaaatcatccgcttgttctgaatgtcttaggtgagctgtctgctccaaaacatcagaagcgccagaggattcatgaggatattcagtttaatatcttctatttaaggtgccttacaatagtgtaaaattcttaattattattattataataagagatagggtctcactgtgtcacacaggttggagtgcagtggcacaaccatagctcactgtaaccttgaacctctggctcacacaatccttctttataagcctcctgagtagtgaggacatgagaccaagctgatttttttttaattctttcatagaagtggggtctctctatgttatccaggctggtcttgactactagtcttatgtgattcccctggttttgcttctcaaagtggtagaattatagacatgagccacgatattcggtctgaactgattctttagttgcaaaatatcaacccaagaattgactcccttaatttttttctgcagtgttttggttaatattgcctgataaaatttattctaatttgtttcaacagcagaattcttcctgacgttttttccaatatatgtattttcatggttgaagatcacaaaatactgttaaaacatgacataaaaaggcaaccttaaacttttggtgattggagttagtataatacaaaaattacgtccaatattgtgtaacacacacatgcaaaaagacgaaggtgagcaatgagggtaaactttctaaatgtatgaatcttccagctcccaagtcataggatagtaactgatgtggcctgagggaggtaccagagtgacacagtgctagtggcataactcttggccaagagactttcaatattttattaaagtttttatatttttttaatttaatgatgccatttttttcaacatattcagaatattgtgagtgggattgattctggatgatatgaacaatgggaatgccttctatgtttagataatattaaggaccaggttgagattgaaagtttgtagaaatgatgcaccataacattattctagtttccatactaggttttttctctttgcttgcatttcatttcaaatttatatgtcagatatctagaatgtaataatttatttaaaaatttcttttcttgtagtccattttgatggggcttccagaagatttgaaaacctcttctgcctgcaggacattttaaaattctgcactacagtaaaacatctgtatttaatcatggtcttcggtttattgacaagctctagtaagtgcaataacttctgccttctcggctgattttacatcagatagaggaatttatcttaaatgaaagtttgtactagcaatataaattatgagttaataaccaccacctttattatttaggtgttattcatcaagaaataatgttaaatcaaggctctcaacgggaatattatctaagggatgcacaaaatgttttgctaatctagataaaatagatgtgaacacactcttagtatccagtcatgtctcctgtctgtcacattattaaccacacggtaactttgacttcacttcggactcgttctaattttcaaattcgttacatattaagcttaatgtctctagactattctagcagagtgaagaaagacaagctagactgacaaacaacctaggatgacaaacttcttgtcactctctataagaacttgcttctccctgaacttcagacttgtcgcgtgttttgaaacattaattatcaaaagtattaaagaaaatttgcaaagctacatcttctatgtttatgttattgttgatgcaattgtaaaaaataaggaaaatgtattccttttctatgtgcgtttccaaacttaatagcagatttttagtaagacccagaataataaaaaattcaaatattgttcagctgcttaacagaaaaacaaattatggtaaatttgtttgctagaatgctatccagtatttagaataaataaatgtctgctatacccaactataaggtaaaatatcgaattacatatgttaagtaaaataagccaaacaaataagaatatatactgcattgatttgtataaattttaataaactaaatgactcagccgcaatgtatagctcaggagttgccagagaaatggtagaagaatgaaagggaaaaggaggaagaatgtagaagaacaaaaggaaatgttgagaattctcttgtccaccttgataacaatgatggttacattatatttatcaattgtacaatttaaatatgtgaaagtttattatctgtaaactaaaactctcaaaatttattacaagcaaacaaatggaaacttagacaaagaaggagtgatagaaagatagaaaaaatgtatattaaatttcagaaatacctaagaacttatctgcctgaaccctagttctcaccatatttttaggtgaatgctagaatgcagcaaaatcacacgtgttctcactacagaaagtgggttccacaaccacactaggcacgcccagctctgtcctggagttggctcagggagtaattggggccagtgatgaggagcacaggctcaggtactggggcttactcatccagacgtgagctcttagacacatacttagccctttctccatgcgtggttgacttccacatctgtacatggagaaacaattgactccgacaaaacataatttgcacaaatatgtaaaaataaaataggatgatgaattcaaaaagtttatcacagcataattttataataagacagcatattttctgagtaccatcgttgtcaccaaattcttgcagggcacagtcattttatctgggtactgccttctcgtcaggcttcccaccccagagcttgctatatagtaggagacatgcaaatagggccatctctctgctgaagaaaaccagcccagccctgactctgcagctctgggagaggggccccagccctgggatgcccaggtgtttccacttggtgatcagcactgaacaccgactaccaaccatatgaagtctgggctgagccggtttttccttgttgctattttaaaagataattaatggtgaactagagatacttagtgtgaggggacatgagtgagagaaacagtggatagtgtggcagtttctgatcacgatgtctctggaggtgtccagtgtgaggtgcagctggtggagtctgggggaggcttggtacagcctggggggtccctgagactctcctgtgcagcctctggattcaccttccgttaactactgcatgcagtggatctgccgggctccaggaaaggggctggagtgggtaggtttcactaaaaacaaaactaatcgtggaacaacagaatacgccgcgtctgtgaaaggcagattcaccatctcaagcgatgattccaaaagcatcgcctatctgcaaatgaacagcctgaaaaccgaggacacggccgtgtattactataccagagacacagtgaggggaggtcagtgtgagcccagacacaaacctccctgcaggggcgcgcggggccaccgggggcggtcaaaacccactgaggacaggacaggtcccaggagcagatgctggggtagttttcctttctcatcagctggagaagtcaggtttgtatttgcaggactctgcagcattctaggctgtgacattttatcacttgtatttattatgactttattatcgttagtatttaaattttagtaattattaaaattatatataagtacattttaaatatgtactttgaagatataaatattcctaattatttgcactgattcttccagagttttattaacatttgttgacatcagcaactacatagctatagggacataaatttataaacatagaaatatgtatcggcaagacatggtggtctgtgcctgtaaccccagcttgggaagctgaggcagaagtactgcttgaacccagaaggcggaggttgcaatgagccgtgatcgcaccactgcactccagccgggcaactgagactccatctcaaaaaactaaataaataaaaagaaagaaagaaaaaaagatgtacaaatacacagacctatgcatatatgtgtaggcattcatattaaacattaagataaaataattctaaaaacatgtcctgaagaatcaaaattaatgatgaactaaatataaattattagagtaattcataattgattttggttatttttaattgtttacatgttgtgattttacacaaaatattagtcatttatcctgataaaacaggtcaaaatgttatatcaagagtttatttactttgtattactaataatataaaatgttccacatatttttagccatgttttacttatctgtgaaatgtgtttattaatttttcattttaatatgtcacctttatctttctaatttcctggatttaattccactacagctgaatgcattttaataattattgtaatcacatttacattttttatttgaattttcatatatattttattaggattttaatatcaatataaatattttcctaccattgtctattttctatttttatgatataaaattaacataaaaatgcttagattttcaatgtacagcttgagggcttctgacaaatgtgcgcacaaataagaattatttgcttactttttagtgtatactgaggagtgggattgctgggtaaaatgatatctctgttttaagttctttaagaaatctccagtctgctttccaaaggggcaagattaacttatattcttctcatcagggtataagtgttctcttttctccagagtcccaccagcattcattgttttttgactttttcgtgatagccattctgagtggtgtgttgctgcacacctacaatcatctcatatttgataaggctgatgaaaacaagcaataaggaagggactccctgttcaataaatggtgctgggacaactggctagccatgtgatgaagattgaagctggacgtctactttcaacatacataaaattaactcaaaattgatgaaagacttaaatgtaagacctcaaaccataaaaatccttgaagacaacctaggaaatactcttctcgaccccaactttgacgaataatttttggctgagtatccaaaagcaaattcaaccaaaacacaaatagatgagtgggacctaattaactaaggagtttctgcacagcaaacccgccaggagatagatgctcaggacaccagagagaactcagttaaaccagggggcgctcagaacagcagagtgtgctcaggacaccagggggcgctcagaaccaccagcaggagctcagaacagcagagtgtgctcaggacaccagggggcgctcagaaccaccagcaggagctcagaacagcagagtgtgctcaggacaccagggggcgctcagaaccaccagcgggcgctcagaacagcagagtgtgctcaggacaccagggggcgctcagaaccaccagtgggcgctcagaacagcagagtgtgctcaggacaccagggggcgctcagaaccaccagcgggcgctcagaacagcagagtgtgctcaggacaccagggggcgctcagaaccaccagcgggcgctcagaaccaccagggggcgctcaggacggcaggggtcgctcagacaccacggttcccttaggaggcagctccacattaggtccctgggcagggtggggtttcctttttgaacttgctattttttgaccttgtaaagcaaaggtcttccccaggatctcttagtatttcttccttgtaactcatgtcttgtcttgttttgtttttgtttttgttttttgtttttggtcatctacaaaaacttaaacttagaacagttgattcagaaaggcaggaaagcaggcattcctctaagtctcccctgagacaaatacatatatgatttcttcctccccactataatttatgtaaaaatgaagattcactgagtcagactaaattgtgtattcagtggaaggataataaatgacacaaaagaatgcaacctattgtctcttatcttcttctaacctgcaagcccccattttcatttgtcctggcttacaggaaaaaaaaatgtacatttcacatgtattgactgatgtctcatgtctctgtaaaatgtataaaagcaagctgtacttcaatcaccttgtgcacatgtctcaggacttcctgaggctggttatggttgggttcttaactttggcaaaacaaatgtattagtctgttctcctgctgctgataaaaacataatcaagactgggtaacgtataaaggaaagagttttaattgactcacatttccacgtggctggggacacttcgcaatcatgtcagaaaaggaagggacatcttacatggtggaagactagagagagcttgtgcagatgaattcccctttagaaaaccatcagatctaatgaaacttattcactatcatgagttcatcatgggaaagacctgcccctatgattcaattacttctcactgggttcttccaatgacacatgggaaatgtgggactacaattcaaaatgagttttggatggggacacagacaaaccatattaataaacttcctaaattgactgagacctgtctcagatatttgttgtttatcctactcatgtacagccttcagagttccaaagcctatatcagttttccaggattgtttcccctttttgttggttatttcctcctttattttctatgtttagttccctttttctcccactattttttcatcattgggatgtgagacttcacaacatttgaaaggtaggtaacaatgagctatcttaacaacatgggacctgtttatctaagagtaatccattctatcaatgaaagataaaacaaaacaggagaccagaaactcatttggttgtaaaatgcttcctctgaatgattttgaaaaggaacaggtggggaaaatataaaaggaaaataaaaacttgtgctgtcaattcattatgtcatgaggggggaaaatcctaaaggatgatccatgcaagaaactgattttcctttcattcctaagagaatagctacaaataaaaagttaaatatcttcacagatagctactctttgttcattttactttatataaagtgctaacttagttcaggagaactacataatttttctgtttccctatgtgcttctctctcattacaacatgtaaattttcatactgtccctctttcccctctatccagctttccccccttttttgtattgaaagccctgaaaatcatctttggggaacggcactgaccacaaatttttctgtgattacttgtattttcattccaggcatgccctaactttggcaaaattaattttaatttgattgagatctgtctcggaaacctttggtttacactaggaaagatcccaaattacgagtcaattactataaagctcagccttcccactgtgtatgtgtgtgtgcatgtgtgtgtgtgtgtgtgtacacgtgtgttttaatttttgtgggctttgagccatgtagttctctctgtggacatactatttggcgtgatctttgaatagagaattctgaaagaaataagaggctcctatgagttctctgaaagtttctggactcaccatggatcttgactgtgtcattgcatctgacagtcccagggaacagactctctggtggtttcaaagaatctgtgcttgggctccccctgcagtttactgggtacagtaatgttaaatcactgtttcgagagacaatttcgaaagcattagatgctgctgagagaggattgtgaaccaggggacagccccttcattctgggggagcgacattgggagaatatgctctgtgagcccaaacagcatcctcccctgccgggtgagggcagagctgcaggacaggcccagaaaccactcaacacagatgtcagccctggagcagctgcagaggagtctgaggagaaaattttaccagcatctgaattacacttatttcaaaacaaaaatgcaattaaaaagttaaaataagtaattaatgtccaggcacagtggcttacacctataatcccagaaatttgggaggctgaggtgggaagatttccaggagtttgagatcagtctgtgaaacatagtgaggcttcatctttacttttgaaaataaaataaaataaaacataaataatttagcaaaaactaccgatgtgtcttccatatcccatcgtacttagagcattgatgtaacccaatgagtcaatgagaaccaaatttgaaaggagaaaattttagagttttcagatatcttaagagttggaagatgtagaacaaaactaattttatcaattcaatgtgtgcaaacatggagagacacactcatgccagtagttcaacttgcaaagggcaaaaaccaaaaaagtttgaagttgctagtgatccatttgtaggtgagatcattttgaggatcatgtcctgtgagaggctgtttctctattagaggagttctgtgctcatgaagtgctggacatgctaggggacaaatatcagtaaacaaacatcagaacttgaatgtcagcttccccctgctgcattctccgtgtgtcatctctctgttatttctcatgctagatcaggtctttagctatgaaatattccacctaatttacatgtcaatagcttgaagtctactgagtttaattcatattttttctatatgttacagttacagtttgtccacaaggacaaggtttgtccacaagtttgtccacaaggttacagtttgtccacaaggactcaatcatagaagtgcagagtccttttcgggccacatttaattcactttatcagtgcccttcagtatgtggttcctgagaatttcacatgacaacacatttaccacactggaatttaagcaatccaacacatgtttgtagctttatcttgtaataggctgtatttcatatggcagcctctgcttcagtttagctaacactatggctttgtttctctctacaagaacttgtttctcccaagatttccatgtttgtgaaaggaaaagaaatctctgggacccccaaatcactaagccaaagggaaaagtcaagctgaaaactgcttggggcaaacccacctccattctttccctaaaatgatagctactaactgtcaggcctctgagcccaagataagccatcatatcccctgtgacctgcacatacacatccagatggccggttcctgccttaatggatgacattccaccacaaaagaagtgaaaatggcctattcctgccttaactgatgatactatcttgtgaaattccttctcctggctcatcctggctcaaaagctcccctactgagcaccttgtgaccccctctcctgcccgccagagaacaacccccctttttcctttacctacccaaatcctataaaacggccccacccctatctcccttcgctgactctcttttcagactcagcccgcctgcccccaggtgaaataaacagctttattgctcacacaaagcctgtttggtggtctcttcacatggacacgagtgaaactaaggttttaaaaaactacatacctccttcaaaatttgaccacaaggaaaaaccttgtggaccaacaacagacagagtcatttctctgctcacataagtcaaatgcctatctgattgccaccatttctctattgttttgctaagccagactaaggcctacgtgactattcctgtaaattgtgcattcagttaaaggctaatcagaaactcaagagaatgcaagcatttgtctcaaacctacctgtgatctggacgctctctccccacttcagaaagtcctgcctttctgaaccaaaccaatgtacatcttacatatattgattactgtcccatgtctccctaaattgcataaaatcaagctgtgtcccaccaccttgggcatatatcgtcaggactccctgaggcggtgtcactgccatgtccttaatcttggaatacgaacttcctaaatctattgagattagtctcaggtactctttggattacaggtttgttttttatttcataacttcaattatctgaaatactaaacaaaatttgccaaagtgtacattctcttgttgctgttgttgcaaaaaatatatttatgtaacttatatataatttatcatctatgtgtgttaccaagctgagtagcagatttattagtaagacttagagagagtaatgaaaaattcaaatgccagttagtaacttaatagaaaaacaaattatgctacatttgtttgctgaaatgctacccattatttgtaagaaataaacacatgcaacataaaagatttaattctcagtatttctattgagagaaataatccacatacataagagcatatactatattttttcattcttataaattctagaatataaaagctagtcaaaagacatgtgaaaacatcagtagatttataaagaaatggtagaagaagggaaggagaaaaaccaaaaaaatataaaagagcaagaggaatgctgaggggagttgacttgtcaccttcttaaaaatagagattttatttttcaaagtttactattgtacagaataaatatgtgaattttcttatctgtcaattaaacctcataaaatttattacaaaaaaactgaaattttagacaaaaagagggtgataggaaggaacaaataaatatgttaaatgtcaaatatacctaaaaatttatttgtctgacccctagttttctccgtatttttaggtaaatgcagcaaaatcacacaagttgtcgtggcaggaagtggattctgcaaaccacactaggcccgtttatctctgtcctagagttggttaaaagagcaactgaggccagctgtgaggagcataggcccgggtactaggactcactcatgccagatataagcccttagacacatacatagcccctccatgtgtgggttcacttttacatctgtacatgaagaaaccactgattcctaaataacataatttatacacataggtaaaaataattaaaaatgtgatagttattaagtgtttatcacacaacaatttcacaataaaacagcattttcccaaatgtaatcattgtcatcgaaatccccaaggacactctcatctgccctgggccctgccctctcctcaggcatctcaccccagagcttgctatatagtaggagacatgcaaataggtccctccctctcctgatgaaaaccagcccagccctgactccgcagctctgggagaggagcccccgccctgggattcccaggtgttttcatttggtgatcagcactgaacacagaagagtcatgatggagtttgggctgagctgggttttccttgttgctatttttaaaggtgattcatgaggaaatagagatattgagtgtgagtggacatgagtgagagaaacagtggatttgtgtggcagtttctgaccttggtgtctctgtgtttgcaggtgtccagtgtgaggtgcagctggtggagtctggggaaggcttggtccagcctggggggtccctgagactctcctgtgcagcctctggattcaccttcagtagctatgctatgcactgggtccgccaggctccagggaagggactggaatatgtttcagctattagtagtaatgggggtagcacatattatgcagactctgtgaagggcagattcaccatctccagagacaattccaagaacacgctgtatcttcaaatgggcagcctgagagctgaggacatggctgtgtattactgtgcgagagacacagtgaggagaagttaatgtgggaccatgcagaaacctccctgcgggaacgctggggaaagtcatctgcagggggcgctcaggagccactgatcagagtcagccccagcggcaggtgcagatgaaggctgatttcctgtcacgatgtgggacttcatcttcttaaagtttctctactgaacctaagttcggaattctgtgattactagggtcatttctacatatttttaaaatgattgttttaatatgaaaacctattctcctatgcagaaaatgcagattgatcctcacagaggagatgaaaagttctcaaccatggtcaccactgtcagagtcctgaggaagctcagggcttcctggtgagtcttctccagtcagactgaggacaggaactccagaaagaatcctgactagaactgaggtattgctcctcacaagagaactcaagctgcggggggtctgttcctgcagacccctgacccggtggcggatgaataaaacgtacactgacacacagatattctgttttgccagttcagctgagggtccgaggcaacttacagactccaagaagaatcctgtaaagaacggcagcagtggccctgagcagctcgcactccaggcgtgtattgagtatagaattaacaacagaagctctgacaacacacttgtggataattaacatggttaagagagtagttctacgaatgattaaagctcagggactgcggtctaaagtaaataccattagggggcaataccctggttagttaatggaggtagggtaaccagacttaactggggagccctctattgtccctagtatttaccctatgcctaacgctctaaggtaagagctgcccaccttcagcctgttcaattattacaagctatgtaacctttcggccttctagagaggtatatgactattccctataactttccttaatattcccctttaatatttccgccaccatcctgagtgaatcccagcaaggacagtctttggggattctgattacagaaaaaagagagcctgggccagggtcagtgtcatgtagaacctcacaggtttctcgtaggacccttctcctgacactgaagaatgcaaatcagaatcaatactgatctggagcttcttttcctaattcatttactgtcttttttagatgttgttctcatttttccatttgcttttcctgctttccgaaaaaggaagatgtttttgctgtggtcaaaattccagacctcaagcccttttcttggcgctcaggtgggtctcaggctgtggctgctgcagtcacgcaggagagtctggtgggactttcttcactcttcgtcactcaggaccctccactgtgttgcatggagactcatctggaaatgcaagttgccagtgggaactgaagggacaagcttgtctggttaatgtgggatgtggatgtgtttctaatcctgttctgaaaaaccgtcacacagtaacgttcttcactagtggagaaggaagtgggtgtgaacgttgtcagaataaaaatggagccacgtgtgttataatctttacaggcgaagctggaagaggtcatgaatagagggttctcatgcacacatccctgataacaagaattaccctaaaaatactctgcacaaccacaatcttgaacaaaggctaccacaacaataagagaattaatactgaggggatatctgccctgcaactccctgttcagccttaaactgattctacccttgttattgattcttctaccccaggataattgtctcaaaatagctcaggtaatcttctcatttatccttcagacacttgtctttctttaccaacctaaatgtgaccatggataatcccattgcaatgctcattttcaaataaatacgatttgattttggagaatctctttctctctgatgtttaggtttgacaagctgcagagggacacaccactttcctgtgagatgtaggggatgacagttttgggggatggctggaaacgtgcagtatccttagggtcagccatcagtaaatgcaggctggaaatcttagaaagatctcaagctgcttaatcaccacggagttttaccttctccagatctgttctgatggaatcagggccaagtttgttattgatgataatctacctaatattgagtcaactgatcacagttttaataacatctatttaaaaattcacacctggattagtgtttgatcaaataactacaaagtattgcccaaccaagcataccatcaggcagactgttacccacagagaaaaacattgaacatgagtttgaggttctcacattgttaaaggtgtaaaaccgattatgtttaaattatgctatttttattattgttattgagttgtagatgtttcatttacattttggatattaacgctttttcagattcatggcatattatccaattctgtgagttggaattattttgttactttgcggaatctttttttaaatctagtcccacttgtccaattctgtgtttttttatttgtttgaatgtaaaatccagaaaaagattgctaattttttgagggttgagagttttacaattgcacgtgtttcatttaagtatttaatgcatttagaattaatttttttgtttattctaacctaaaattcttaattctttgcatgtaaatatccaattttcataacacgctctttggaagacactataatttagcaattatatattgatggttctcacgctgaaagtcagctggccatcaatatgtgggtttatatctaagctctctgtatgaatttatgcgaatgccattctgatttattactgtatgtttctaataaatgttgaggcctggaagtgtaatacctcaagctttattcttgccttgttacagatattagaccaaaatattctaaaattttactattgagtataataatagctgtggcttttgttaattggtttcattatgtacaagtagttttcttgtcttcctactttgttcagagtttttataatgaaatcctgaatttttttcaagtgttttctgtgtctgatgaaatgttactgagatattttttctttagttttttaattaatcaactgaattgattgatttgagaatgtcaaatcatctgtgcatctcagaataaatttgagttgatcatggtgtatggtcttctataaaatctttagaatttattttactattgttggggggttaatttatgtctactaatgatattggtctatgattttcttttattgtggtgcctttgtctattactggtagtactctaacggtagcctcatagaaagagtttggaaggtgtgttgcagactacctttaaaatagattttatcagtggagaaacggtgatagtttttttcttcagttttctgttgggaagagttttgtttgtttgtttgttttttgtttttttgttttgttttgtttgttttttgagacagaatctcgctctgttgcccaggctggagtgcagtggcagaatctcggctcactgcaagctccgcctcctgggttcatgccattctcctgcctcagcccccaagtagctgggactacaggcgcctgccaccacgcctggctaactttttgtatttttagtagagatggggtttcaccgtgttagccagaatggtctcgatctcctgacctcgtgatccgcccgcctcggcctcccaagggaagagttttatgttgtttaaaagatattctgaataacttaacctgcttaatgggcttacataatattcctttcttccattctttttaaagaactgcttacctttcctaattatttttagggtgatttttcacataaagattgtgcaatacattttgaggtgagacttagtggattttctctaatgaattagaaataataaatcacttaattgactattgtattaaggttgatttgttgaatatttgctaaaggccagttctttaagctgtgccatgtactaaatccctaaccgactattttattcaggttggtttgttgaatatttgttagagaccagttctttacactatggcatgtaataaattccaaatggcagtacgtcattgtttacttagcttttgtgcttatatttttcagaggaaaaaaaatactgtaaattgtaaatacccaatacctaacagtattgtatgcaaatctgtgactgttggcagtgtcatctctgagaaacagataaagtttatttactatatataaaaaaagagtttggaaggtggactcctcaccaatttttgaaagagttagagaagcattagcattaattctttaaatgttaagactaattttatgatgtaacatataacctatcatggagaatgttcaatgggtgcttgagaaggatgtgtattacatggctcttggttggaaggttctgtaaatgtctttcaggtaaatttgttcaatactgttgttcaagttcagaggcttattaagaattttctttctggatttgcaatacattattgctaagtgaggtattaaggttttcccttatttttatatagttttctatttctctctatatatatatcttaaagtttgcttaatgcatttatatttgtatttgtactgtgtaaaaagtaaaataaaataataattgcttagtgagtttcatggcacaatcacgttatgaataatcatattttcccaaatgctgtcattgccactaactcctccagatacatggtatattatccaattctgtgagttggaattatttcgttgctttgcagaatctttttttgttaatctagttccacttgttcaattatgctcctccgggagtctcacatctgctctgggcactgccttcttctcaggcatcccacactggagcttgctatagaggaggaggcatgaaaacagggccctccctctactggtgaaaacaagcccagacctggccctgcagctctgggagaagagccacagccctgggattcccaggggtttccatgtggtaatcagggctgaacacagagctcactatggggtttgagctaaccagaatttttcttgttgctattttaaaaggtgactcatagagaaatagagtgagtgagagtgagtggatataagtgagaaaaacagtagatgtgtttggcagtttctgaccaggacgtttgtgtattttcaggtgttcagtgtgaggtggagctgatagagtccatagagggcctgagacaacttgggaagttcctgagactctcctgtgtagcctctggattcaccttcagtagctactgaatgagctgggtcaatgagactctagggaaggggctggagggagtaatagatgtaaaatatgatggaagtcagatataccatgcagactctgtgaagggcagattcaccatctccaaagacaatgctaagaactcaccgtatctccaaacgaacagtctgagagctgaggacatgaccatgcatggctgtacataaggttccaagtgaggaaacatcggtgtgagtccagacacaaaatttcctgcagaaagaagaaaggattctgggccgaaggggacactcagcactcacaaaacaggtggagccccagggcaggtacagaaaagcagtcaagggctgctgtccttcaggatctgtgctttcctctgcatgtagcagttcccctcgaatcctctgcacttttatgtttctgtgcccaccatgaggtccctggattacaaaactttaatttaaaagaggaaacattcttatatgtcccaaaaacaaaagtaagtattagaggcacaaaagtgcacaggcggccaggtgaggctgtagacactgccaccccgcaatgccagtctcacaactagcactggagagtagtgggcattcagtggagcttcctacctatcctgtggtccgagctaagtccagcaaggccattggtgccttccagagcacagtagtccatcaggaatctcccatgtgtcccagcagcagccttgcctcagtatctccactgtgcacagccattgtctgggagggagctcccaggatgagtgtctttggcacacaccaggtggcgggtgttagagtgcagtacagcagctggctgcctggtctattgggctccctgatgttggagggatttgaggtgcattctcaggcccagcaccctctttgtgaatttttatataaaaaccctgattttacttcattttctcagatgacatagataactaaaaacagaatctgcaaagaaattgtaattttcaactttaccccaaattcattgtttcttaattctgtgcaagatccaaacatatttttggcttccacatgagaaattgttctgtttaaactgaaatcatttcttctcatattctttcttttgggccaagtacagagatcttgttgaaaataagttgggttctttccacacactaaccctcacctcccctagagaaagagcagagattgtcctcactctgagtctaggggaggagctgttcctgtacaattcagagcctgcagagaccccccccccccgccaggtgcagcttcagtgagtcagacatttctccatgtgggcgacctccagtgcctgtgactgcttctcaggcctaattgtgggttaagaattaggacactctttaagttatcacatctgaatcctattctgaaaatcaccataaagagagatagttcaatggctattctcctgacataagtttctctttattacttggttccaagtatggagaaacatgtgacccaatatttgtctgaatccaacatcagaatcccctgcatttctctgggaaactcccggatcgaacacaggtgagctctttattctcacagaaatgtatgtagttgggaatttcaacaaattgtccagaacctgtgcctgccaacaactgtgtttctcggtgcactcttggcctggtgaagcccccaaagaccctctccctcatgtgtgtcatctctgcattctccatcacaaccagtgcttcctcctggatctgcatccatcaccccctctctgggagggaatggagtggattgggtccatagatgatgaagggagcacacattactcccctttcctcaagagtccagtcaccatccccagatccatgtccaaaaacagttcttcctacagctgagctacatgagcaacaatcacatagccatatatttttcagcaatagacacagtgagggaatacacagtgtgaactcacaccaaaacctccctgtggggatgcataggacagaaggggttgctcaggtccccagggggctctcaggacaccaagggtcactcaagaccattgtagaggcacgcaggtagccgggggctctcaggaaccatgggggaaaatcaggacaccaaagggtgcttggtacagcagggggctcaggacaattgtggggattcagaaagaacagcttcaaggctcagcttcagggcaggtgcagctggtgtgaaaaggggctggatgaggcgttttgtgtcaccatcatgaaacaccaccagacaccctccactacatctgttctaatgcatgtgtttgtatgattaggaaatgatattgatataaatatataaccatagctaggtgtgtctttttctgccttccgtcctcccttcttctctctctctcacacagaaatttacatacacccaccccacaacacacataaatctataacttttattacctgatgtattcaataaacctgattaatgtgttttgcagcttcattgtttatggtgttgtagcaataaaaaccatctgtttcccagctgtgtacttctctaagctgagtagcatctttgttcataatacccagaatgaaaaacaacccaaatgtcaatcatcagcttaactggtaaacacattgtggaaaagtcattcattgacatactacccactactaccatcagctaatgttggctatgctccaaagcatggttaaattcacaagtacttcagatgagtaaaatgagccaaagtgataaaagtgcatacataggatacaactttcataggttctatagaaccaaaagtaatctaaagttgccaaaaaaaaatcagtagttcactgtgaatattgtaggagaagggatggtctaggaaggaggaattatggaacaagataaaatgttgagggaattgacttgttatctatgttgatagtgataatgtctatgacaatatttgcccaattgtacacttcatgtggagattattgtttttagtttagccccattaaagatagtattaattagaacaggtataaattggtatcacaggaattaaagataaataaaatacatgtaaagtcagagaatcctgaatatacacatgaatgagcactggacatctctgtatttttagagaagcactagaatacagcaaaataatggcacaattttacatcactaagaaagtttatcaaacccaccaggcatgttgtattagttcattttcacactggtataaaaaactacttgagactgggtagtttacaaggaaaagaggtatagttggctcacagttctgcatggctggggaggccacaggaaacttacaatcatggtggaaggtgaagaggaagcaaggcacgtctcacagcccagcaggagagagatagaggaggggaagtgacacatacttttaaatcatcagcggttgttagaactcactcactatcatgagaacaacatggggaaactgcccccatgatccaatcacctctcacctggtccctcccttgacatgtggggattagaatttgagatgatatttaggtggggcagaaaaccaatctatatcacatgtccagttctgtcctggagttgtttcagggatccagtgtgtcctgttgatagaaacagtgacaccaagttcatattatcagttgtagttgacaccatgcaaagccaagagatctcaagtgagatttagtgtgtatgttgtgtctaatgaagtcacacactcagagcaagtgaatagggaaaagttcattatctacactgtagaggtgtctgctgagtgcagggcaggtctcccaggaaaatctaaaatggcttgaaagaaaaccaaaggagactggctcagggtttttataatggtttagtggtgggggcaaagtgaagcttcccactcacagatgggggtttatagggtttgaaactcccactggcatcaaatgaagaagctcctgtgagtctgaactagattcatcttgtgtggcaaaaaaggagacgatggaggagtgagccttaagtaatcagcagtcatgcaccaaaagatagagtgacaacttattccatgcagcaggaataaaaataatgaataagaaagaagacaagggttcagtatgggtggacaacacccagatctgcagaaatgagatgactttagaaatgtaagcaaagaataatgagaaaaagaagaagtggatggaaaattaaacaggggcctggtctaatgtcttgggtagaagcttttcacaatcaaggactatcagcttattctgcaggtcttaggtcagccatctgcttaaaaacatcagaaacgccagagggtctatgaggatgctcagtttaacatctcctatttgagtagctttacagttgtgtggaattcttaattgattcttttttgtttgtttttagggacaggctctcacactgttccacagcttaaagtacagttgtgtgatcatagctcaccttaaatttgagctcctgactcacacaacctttccatcttagctttctgagtatctacaactagatgggcacaccacccctaccctccttattttttaaacattttttcatagaaatagcatctctttatgttgctcaggttggcttcgattgcctggtctcataggatttccctcactttgcttctggaagtggtgtgattatagggaagatccactgcatctgacctgaatttattctttagttgtaaaatatgaagccaataattaactgcctgaatgttttctgcagtgagttagttaaaagcatctgataaggttccttcctatgtgattcacgagcagtattttccgctgatgttccttccagtttccttgctgaagatcacagggaattgtggaaaatatgtagcaaaaaggcagccttaaactcttcattgttagagtggatatcacacaggaatcactttcagtattttgtaacacatgcatgcaatagagcaaacatgatctctgggggtaaagtctataaacgtatgggccttttagctaccaagtcatagggtaataactgatgtaccctgaggactggaccatgattccatagtgctagtggaagaacccttgaccaagggagttttacattttattaaaatatgtagagatgccactttttaaacattcccagaaggttgtgagtgggattgactctgtctcgtatgaacaaagacaatgccctccatgattagataatattataaactagattgagctacagtgtttgctgtattgaatcactgtatattttattttttagctccatgttagttttgtgtctgcgtgttagcgttggctttaaaatgatattaatcagctctgtagtaagtagaaattcatctgagagtttctttccttgttttccagtttgataggatttccagaatacataagaaccctctctgtttgtaaaaatattccaggccaggccagtggctcatgcctgtaaacccagcactttgggaggccgaggtgggggggatcatttcaggtcaggagtttgagaccagcctggccaacatggtgaaacctcctttctactaaaaatacaaaaattagccgggcatggtggtgcttgaggattgcttgaaccctggaggctgatgttgcagtgagccgaaattgtgccactgcactccagcctgagagacacagcgagagtccatctcaaaataaaagaaaacaaaacattccaaagttatgcacaatctagaaacatatgtacttaattctcatttttaatttattaaaaagctctaataagttcaatgttttctgccttctcagttgatttcacaacacatataataatatatcctaaataaaagtttgttctcttaatacaaattactagttaataacccttactttattattgaggtattatccatcagtgttcatcaatgctctcaatgggactcttacatagagaatatacaaaatattttcctgatcatgacataaaacagatgtgaacacattcttagtattcagccatgtctcctatcatgttataaaccacatgctaactttgactttattggaacttgttctaatttcaaactagttattttttatcttcatgcagctggattattatgtgtggttatttattccgagagtgataaagacaacattaacaattttcactgcaggcatgtctaggcaaccccctgtgcacaatgaccttggtgcattggagattctatggggactcttccctacctgcctaggagagttctctgccttctacctctatcattttcctctttgaagaaatacatctaactgtcgttagaatagagacaaagacaaatcttaactgcttccagctgacgggggatgctgtttggggaagatctctcttggaggcctgtctaagggaccccaggaaaagggagccattatcccaggcttcagttgcatgagcatttggagtttgatggtctgaaaacgagaaaaggcaaatcagattattagaagacatgtatccaaacctaacaaggtggtcaaggtggtaaggacagtttgaaagaaaattccaaggctgctgacatgcccagataactgcggctgtagttatgcctgctaaggtttgggcgcatgaggcttggcttttgtcagctccctgggatttattttcccaaacaaagaaacctccaggttaggggcaccctattcattcccatcacctggcatgatttaaaggataattgcttagaattaaaatattgatacagatttttttatattccccatcgctttttgtttcttctgggctgtagccagagatcattgattggcgctcaggaataagcagtcagtctaaaatgcaggcaaatacttaaacaactgaagagattagaatttaaagatgatcgtatgatatgttttgaaatacaatttttctctttccagttctggtttttgtcagaatcaagtaattgtaagactgagttgtttgcaaaataaactttagtcttaaacttggcctgattatttgcataaagtgcagcaagaatattaataataattctgtaggaaaagcctgcaagcaccaggagtttcacagtctaacactatgagcacgtgcatcctcacgcaactcgctgaatatttccaagccagcctgttcctatcttaaatgccatccagttgtatctgccccaggtacactaatatatgggtcctgcttctctgcagcctcctctctcctcagatttcaggttttgtttattgtttgttttctctctgatataaactcaaatatgttgaaggtttttttgtgtgtggttgttcaggtttgttgttaatgagatcagaataagataatactttactctttttatttatttatttatttattttttgagtcggagtctcgctctgtcacccagactggagtgcagtggccctatctcagctcactgcaagctccgcctcccgggttcacgccattctcctgcctcagcctccagagtagctgggactacaggcgcccgccaccatgcccggctaattttttgtagttttagtagagacggggtttcaccgtgttagccaggatggtctcgatctcctgaccttgtgatccgcccgcctcggcctcccaaagtgctgggattacaggcgtgagcctccgcgcccggcccatactttgctccgttttatattcccatgctttagtagctgcttttctctatcaaatccattaactgagagaacaaatcacatttagttacaggtgaacaattaaatagtttggcatatatttatgtactggaacataacgcagcttgaaatcaaggcatgcctcactcatataaacaacatggctaaattctcaagtaattctgtttagtgaaagaaactaaggagttaagagtaaattttatatgatacatttgtaggaattttagaagatgccattattgtaaattaacacggagaagatttgagtttgtctgacaatacgctgttgggagtaatgtggatgtgagttgaatttcagagaaataaaagaaagatttagggattaatttaattattcaaaacttgattgaagtgctgagcaaatggctgcaaacataggtcaacatttttcaaatccttcactataaatttgaattaattacttattaattacacttgaataaagcaataacgaagaaaccaataaaataacatttgactaaaatggagcaataaacagatcgatgttaacacaaggaatatgactgacttatgaaaacatgcacatgaaccatggttcactctacgtattttggtaaattacagaaagttgtcataacagatggggaatcctgcagacttcactaggcatggtccacgctgccctggagttgtctcaggggagctgcctcctccagtggttagagcacaggcccaggtaataggactaatttttttagatgtgtaattttagacacactgcacaactgctgtgttctctgtgtaaattatctcctgtaaaatgtaacattgaaacctgcattaaacatattgtataaatatgtaagaataaaataagattatgagagctaaatattaatcaaggcacaagcacataatataaaattatattttcctgaatgatacaattattccaatctgtcccaggacacttcatctgccctgagcccagcctctcctcagatgtcccaccacagagcttgctatatagtgggggacatgcgaatagggccctccctctgctgatgaaaaccagcccagctgaccctgcagctctgggagaggagcccagcactggaagtcggcggtgtttccattccgtgatcagcactgaacacagaggactcaccatggagtttgggctgagctgggttttccttgttgctattttaagaggtgattcatagataaatagagatgttgagtgggagtggacatgagtgagagaaacagtggatgtgtgtggcagtttctgaccttggtgtctttgtgtttgcaggtgtccagtgtgaggtgcagctggtggagtctggggaaggcttggtccagcctggggggtccctgagactctcctgtgcagcctctggattcaccttcagtagctctgctatgcactgggtccgccaggctccaagaaagggtttgtagtgggtctcagttattagtacaagtggtgataccgtactctacacagactctgtgaagggccgattcaccatctccagagacaatgcccagaattcactgtctctgcaaatgaacagcctgagagccgagggcacagttgtgtactactgtgtgaaagacgcagtgagaagtcagtgtgagcccagacacaaacctcctgcagggtacctgggacaatcagggaaagcctgggacactgtatactgggctgtccccaggggcaagtccaggtgatataagcctgggtttcctgtcatgatctagggttgcattgttagcaaattaccccagggaccatctctagatttccaattctgtaataacatttgatgtcgtctctgactgcacaatgtcccctcaactttgtatcttttttttttttgtaacaggaggacacatcctcaccctgcagaagcctgagtgtcactttgggggcagaaatgacctgccttgatcacattgatcactgtcctgaggaaaataccccacaggggaccccgatgactccagcaaaggctctgcctcaaaaccattgaagagtccttcctttcattagaattgaccacagcacctgggcttcagcacaagccataccacagacgtcacaaagcagcagcttgacacctgatccaggtgcattttctcacctttagaagctgagagaggggtgtattctcaaggtcaacacactctttgtgggtttttacacagaaaacctgcttttactttatttcatttgaagataaatgaacaaatgtgcatctataaatgattgtaattttcacatttattccaaatccaatatttctgaattctgcatgatgtcctggcacagggttgtgttttctacaggtatttttcatcaaaccaagaaaatgcattttccactttccgtggtttttctccatgtgcagaggccttgagtagagcacgtctgactgtgtttgttttcacgctgctgataaagagaccttgagtagatcacgtctgactgtgtttgtctgttttcacgtggctgataaagacataccagagactgggaaacttacaacagaaagagttttattggacttacagttccacgtggctggaaaggcctcacaatcatggtggaaggtgaaaggcacatctgacatggcggcagacaagagaagagagcttgtgctgggtctcccctttttaaaaccatcagatctcatgagactcattcactattaagagaacagtgcaggagagacacaacccccataactcagtcacctcccactggtccctcccacaacattgagaattatgggagctacacatcaaaatgagatttgagtgaggacacatccgacccatatcattccaccccaggttccctcccaaatctcatgtcctcacatttcaaaaccaatcatgccttcccaacagctccccaaaggctaaactcatttcatcattaactcagaagtccacagtacaacatttcatctgaggcaaggcaagtcccttccccttatgagcctgtaaattcagaagcaagttacaagcattgggtaaacacacccattacaaatgacagaaattgcccataacaaaaaggccccatgcaagtccaaaatccagcagggcagtcaaatcatagagctccacaatgatcacctgtaactccccttctcacatccgggacatgttgatgcaataggtgagttccgatggtcttgggcagctccacccctgtggctttgcagggtacagcctccctcctggctgctttcacaggctggtgttcagtgtctgtggattttccaggcacaaagtgcaaactgtcagtggatctaccattccagggtctggaggatagcagccctcttctcacagctccactaggcagtgccccagtaaggactctgtgtgggagctctggccctatatttcctttcctccttgccctagcagaggttctccatgaatgatccaccactgcagccaacttatgactggacatccaggtgttttcatacatctcctgaaatctaggcagaggttctcaaacaccaattcttagcactctgtcgataatggttcattttggtggcctgttcattactggtattttccaaaggaatctcacttgaatctttactcttttgcattttgtctccatgacaatgttgggaagttttacctccaccatcataacatgatctagtgatctcacacatttgtggcaaacaatacctacaaattcagaagctctttgcttttctttccatgaaatataattctttctgttctgtgtataagcatatcttagcaactctgtgcacacccacatagatgtccacaagcctatgaattattctctgtaaataaaaatttatatcaatttccctcaatgttcataattctcctgagggtgaggaagctccttctcgatctgttcaaacaaaatgcccagaaaccatctggtaggtaaggagttcacctggctctggtgtggggtctgtctctttccctctgttgtcacacaggtcagcccagttgttcaggtcctaagaagaaagcccaggtttgtcctgattttaaaacacatcaaacttctgatgactctcctgttacccacatccatggaggatagattatttattatataattcaccaaactaatgtcaaatgcccaagttgcaataccacacatcctagggtatgttcatgcaattcactggaggagaaagtctttcagagacagatggatctgaaatgataaatatgtgggtaaggactctgggcttgagtatcattgtccagccatgtttcacaagtgtgtcctgtcaggggaaggacaagagttccttgtgttctcagagggaaggggtcacagagttcctctctggttcccaggaaagataatcgcactaatcttcatgatcttcatgagactatcctccagtgctgacctgttatagagtttttgtctgaagttctcactgcaatccccaatctacatattttcaatcagaagtgtttagagggcaggacatatcttcacggacacacattgagaaggatgtagatatgtcccactaccttctcctgagatctcagacagaatcccagatttcaaaaggacacagaaggacagctctcaggtgcttttaaaaaatgacccacttccagggacagggagcttccctataaccatggtggatgttctgaactacaataaacattggatggatccaggattgtttgaagtcactgtcattattacattcagctgctgtttcaatgtgtctgaagtagtaaatgacaatttagatgacaatttatatgaatcttcaagggtagaacaatattgaccatattccaaaatctgtccttgatccatgatcacactcatctcccagaccaggtccttcagcacgtctctttacctgaaagaagaggactctgggcttggagaggggagaccccaagaagacaactgagttctcaaagggcacaggcagcatcctactcccagggcgagcccaaaagactgggggctccctcctcctttttcacctctccgtacaaaggcaccacccacatgcaaatccttacttaagcacccacaggaaaccaccacacatttccttaaattcaggttccagctcacatgggaaatactttctgagagtcctggacctcctgtgcaagaacatgaaacacctgtggttcttcctcctcctggtggcagctcccagatgtgagtgtctcagggatccagacatgggggtatgggaggtgcctctgatcccagggctcactgtgggtctctctgttcacaggggtcctgtcccaggtgcagctgcaggagtcgggcccaggactggtgaagccttcggagaccctgtccctcacctgcactgtctctggtggctccgtcagcagtggtggttactactggagctggatccggcagcccccagggaagggactggagtggattgggtatatctattacagtgggagcaccaactacaacccctccctcaagagtcgagtcaccatatcagtagacacgtccaagaaccagttctccctgaagctgagctctgtgaccgctgcggacacggccgtgtattactgtgcgagagacacagtgaggggaggtgagtgtgagcccagacacaaacctccctgcatggacgcggaggggaccggcgcaggtgctgctcaggaccagcaggtggcgcgcggggcccccagagcatgaggccgggtcaggagcaggtgcagggagggcggggcttcctcatctgctcagtggtctccgtcctcgccagcacctcgctgtcaccagggctcctctttctttattatctgtggttctgcttcctcacattcttgtgccaggaaagaaacgaggaagacaaattttcgtctatagttgaagcttcaccaattactaggaacttgcctacaagttcctgcatgacccattataacttatcgattaaaaaatatatattctaatgcttctcaccatctcttgatttgtatcatcaactgaattgtaccctctttgaaattcatatgatgaaaccttaaattcaatggatctatattggaattttaatgaaataattaaggttaaatgtggtcataattgtaagaccctaatgcaatagacgtgttgtctttataagaagaggaagagacaccagagacctctcacttttcacgtgcaggcagagaagaggccatgtggagacatagtgcactagaaggtggcccagtgcaagccaggaagaagccgcgccaagaaccagccctgccagcacactaatcttcaacattcagactgcagaattttaagaaaatcagtatttgttgtttaagccacccactcctgttgtcttcttatgaagatccagacagactaataccacataactctgttagtgctgtcccctggatggagaattagcctcctgaggctgggcacatctctcagatttccacataaaacaggtaaaaaatagtagttctgatataaaaacttgtcatgtccctgttggccaatttctgggcaaggtcttttaaataagccaagtttgcggggaaatggagaccatatgtttgtgggactctaaccgtggaatctactgcattgctctagcagaatcaaaaattgaacaccagtgagctctttattctcattaaaatgtgtgtctttggaaatgttaacattctgtccagaatctgtgctcacaaacaactgtgtttcttagtgcactcttggcctggtggagccctcgcagaccctctccctcacctgtgctgtctctggattttccatcacaaccagtgtttcctgctggagctggatccacgagtccacatgggaaggactggagtggaccaggcgcacacgtcatgaagggagcaaaaattcccacccactccttatgaatccagtcaccatctccaaattcgggtccaaaaaacacttgtttttacagtggagctatgtgagcaacaagctcacagccatgttttaaagaagagacagagtgaggggaccacggtgcgagctcacacccaaaccttcctggaggggtgcacaggacagcaggagtcccgatgatggaagggggtggtctggattccaggtcactctcaagatcattgtagaggcactcagctcacccgggggctctcaggagccatcgaggtaaatcaggacaccagaagagactcggtacagcagggggctctggaccattgtggggattcagaaacagcaggttctaggctcagccttagggcaggttgagatggggtgaaaaggggctggatgagggtgtttgtgtcaccataatatttcaccactagacacccgccactacatgtgttctactgcatatgagtgtatgattagaaaatcatacttctataaatatataaccatacgaaggtgtgtcaagttttcctcttcaacttctatcggccttgttcgtaaggactaattccctgtaattacttgaggacctcataaattgtggtcaggtttgtaggtttcctctctttccttgtctccctttccccttattctctctcacacaaatggacataatccccactccacacgcaaagaaatctataactttcattacctgatgtattgaataaaattgattaatgtgcagctttcccatctttgttgttgttcatgctgctgtaagtataagaaccatgagattctcagctgtgtacttctccaagctgagtggcagctttgcttatcatactgagatggccaacaatccaaatgtcaatcatcagcttaactggtaaacaaattgtggaaaagtcattcattggcatactactgactgtgaccacaatatactaatgttggatacgctcaacagtatggttaaattctcatatggtgagtaaaatgagccaaacaaataaaagtacacacatatgataccacttttatacattctcccatccaagtactaaccaggcccgaccctgcttagcttccgagatcagacgagatcgggcgcgttcagggtggtatggccgtagacacacttttatacattctatagaataaaaactaaagttacataaagaatcagtagttcactgtgaatattatagaagggaaagtgtagacaggaggaattacagaaaagagaaaattttaagcataattgacttgttatctatattgataataatgatgtctatgataatatttgtacaattgaacacttcatgtgaagatctttttttttagtttaacatcattaaagatagtactaactgtaacgtgtgtaatttggtagaaacggagtcagacagagataaaatacataaaaagtcagagacacctgaatattcacatgagtgagcctgcacttctctatgtttttatgaaaacactacaatacagcaaaataatgacatcattttatgacgtgaagggggtttattaaaccactccaggcacgttgtattagtttgttttcccactgctacaaagaactacctgagtttgggtaacttataaagaaaataggttattgactcatagttctacatggctggaaaggcctcaggaaacttgcaatcaaggcagagtgtgaaggggaagcaagagacatctcacatggcagcaggagaggtggggagaaccaccacacactttaaattatcagatctcctgagacctcaatctgagacctcaatcatgaaaacagcatggaggaaccaccccatgagcccatcccctctcaccaggtccctccctggacgtgtggcaattccaattcgagatcagatttgggtggggacacagaaccaaaccatatcacatgtccagttctgtcccagagttggttcaggaatcagatgtgtcctgttaacaggagctgtgacaccaagctcccagcaccacttgtagttgacgtcatgcaaaggccaagatatctcaactaagatttagtgtggatgtgatgttggatggtgacacaccctcagaccaagtggatatggaagggataattatctctattctagacgtgtctgctgagagcagggcagttctctcaggaaagtgcaaaatggcttgatagaacagggaaagagagggcctcagggtttggtggtgggggcagattgagtctttccactcacagaaaggggtttatagggtgggaaactcccactggcttcaaataaggaagctcctgtgattctggaccgatattcaccttgtgtgtaaaaaaggaggtaatggaggaatgagccttaagctatcagcagtcacacaccaaaatacagtgtgacaagttattctatgtagcaactataaaaataatgaataaaaaacgagataagggttcaatatgatgggcaacactcaggtctacagaaaatgagatgagtgtttataagtcaaagcaaataataatgagaagcaggaggagggtgtgcagaattagacaggggtccaggtccagtgacttgggtggaaaccttttgctattaaggattatcagcttagtctgaaggtcttaggtcagctatctgtttaaagacatcagaaacaccagagaatctttgaggatgctcagattaacatctcctattttagtagccttgcagttgtgtgaaaaccttttttatcttatttcattttattatttatttatttatctgttgagatggaatttcgctcttgttgcccaggctggagcgaaatggcacgatcttgactcaccgcctcttccacctcccagattcaagcgattctcctgcctcagcctcccagtagctgatattacaggcatgcaccaccaggcccagctaattttgtatttttagtagagatggggtttctccacattggtcaggctggtctcaaactctcaacctccggtgacccgcccaccttggcctcccgaagtgctgggattacaggtgtgagccactgctccgggccgaaaatcttattcattcttttttgtttgtttttagagacagagtctctctctgttgcacgttgaaagtggagtggtgtgataacagctcactgtaaatttgaactcttggctcacagagtatgttcctatgtatcgtgcaggtgtgtctgtgtgtgtttacccggcttggggtcctctaatttttggatctgtagttaggtgtttcacattcttaagatatttttcttaagaaatatatcttaagatataagtatatcttaagatatcattaattcttaagatattttctctgtttctaatttctatttttgaaatttgaaatatatctacactatactttttgatgttagttcttaaatttcttcactctttttccctttgaaattcactttgtgtaatttccagtaacggagttgaagtccctggtttcatttaagagctgagcgaattctactgctgagcgtgcccaaggtatattcaactttatactgcatcacttttgataattttatgaatttccatttgattctttcttagtatttctctctgtcagtcacctatctagtcttgcactgtgtccacattttctttcagatacttttaacaaattcaattactttaaatatcctacttaataagatagttctagtattgtgtcatttacaaatatcaattctgaggatttttccattatgactttggtgttttttataacttatatgactttgatgaatgttataatttttgttgataaccagccatatttggacccttgatattgacgtattattttattttgtgcatttctgcctgtatttgaccacaccctatctgtgctgggccttgattgtggagatgtctgtgcatctcttcagagctacatttgacatttacttttgcaacggctgtagcagttgaagtgtgttcttctatgtccactggagacttcagatactctagtgataccttgttttcatgcctgcttggctttgtctattcacctcattccattctacagagaatctccttcacattcctagggtggattaaagtgttatatttaactgccaattgtgaaattggcggaaggcattagactaaaggaagaaactgacctctcgttgggccataattctagaaagccgttgtgatcctgagtctgagtgtgaccttccaagttttcccgaccctcctgcaagtgagatactggtctgtgtgttcttgcctcttcccctggggtagagtcctcctgttttccccagttgttccctcccacagctctcacaatctctgttggtgtccccatcttccagatctgctgccatgacctgcagattaaggctctgattccataagaaactgaggggagctgcttctcaatagatctttgatggggacctctgttcccatatcagttcatgaggggctgctccagtgccctaggatgctgattttcatggcttgctcctgcagggtaatatctgagtttcatagtgggaatcagagagttgggtctggatgcatttcagaagtgtgggctctcattctctcccagacagtcactttgggaaggatagattcttgtgactgtaaaggttcttcaagagaatagcacaactcttcagtatgttgtcccttagaatttctcactacaacacgcttaacacactcgacttcaagcaatgcaatgtgtatttgtgctccatcttgtaatggcctacgttgaatacgacagactgtgcctcaggtaatttcatatcttgactttattactctgtacaagaacttgcctctccctagatttcaattttttttgttttaaaccttcagttatctgaagcatttaataaaatttgcgaacttccatcttttctgtttatctgttattgctgatgttattgttttaaaaataaatatatatttctcattcatgtacatttttaagctgagcagcatatttttaagtaaaacctggaataataaaagaatccaaacatttttcagctgccccaaaaaaaccaaattatggtaaatgtgttcactggaacactactcatcacttataataaatatatttctggtacacagagcaacaaagaaaaatatctaagtgtttatgctgagtaaaatacgccagacaaataagaatatgtaccatattactccatttatgcaatttcttttaagtgaaaaagaatctaaagcaatatccagaagatcagtagttacctggaaaaagggtagaccaaaggaaggggaaaggaggaaacttacagaagaacaagagaaaatgttgaggggagttcacttgtccagcttggaaatgatgggttacatcatgttgatcaattgcacactttaaatatgtgaagtctattatctgccaattaacactcgcaaaatttattgcaagcagacaaatgaaaaattagacagagagaggatggtataaagatagaaaatatatattaaatgtcagaaatgtctgagaatttaactcctgaccctagttccgtccttatttttaggtgaatggtagcgtgcaccaaaatcacacacattctcagtacaggaagtgggttccacaaagcacacgaggtatgtccaattcttaccaagatttggttcagggagtaacagtgatgaggaatcacaggcccagataccggggctcactcatctcagacatgacctcgtggacacacacttagcccctcctccatgtgtaggttgacttccacatatgtaaatggagaaaccattgactcctacagaacataatttacagaaatatacaaaagataaaatagtgcaaatacttatcacaacaaaatttcctaataagacagtgtattttccaaataccgtaattgtcacccaactcctgtggggccgtgtcattttatctggggtctgccgtctcctcaggattcccaccccagagctctctatgtagtaggagacaagcaaatagggccctccctctgctgctgaaaatcagccaaatcctgaccctgcagctctgggagaggagcccccgccccgggattcccagctgtctccacttggtcatgaacactgaacacagaagacacaccatggagtctgggctgagctggattttccttgttgcagttttaaaaggtgatttatggagaatgagacacactgagtgtgactggacataagtgagagaaacagtggatttgtgtggcagtttctgaccagggtgtctccgtgtttgcaggtgtccagtgtgaggtgcagctggtggagtctgggggaggcttagtaaagactggaggggtctctgagactctcctgtgcagcctctggattcaccttcagtagctctgctatgcactgggtccaccaggctccaggaaagggtttggagtgggtctcagttattagtacaagtggtgataccgtactctacacagactctgtgaagggctgattcaccatctctagagacaatgcccagaattcactgtatctgcaaatgaacagcctgagagccgacgacatggctgtgtattactgtgtgaaagacgcagtgagaagtcagtgtgagcccagacacaaacctcctgcagggtacctgggacaaccagggaaagcctgggacactgtatactgggctgtccccaggggcaagtccaggtggtataaggctgggtttcctgtcatggtctagggttgccttgttagcaaattaccccagggaccatctctagatttccaattctgtaataacatttgatgtcgtctctgactgcacaatgtcccctcaactttgtatcttttttttttttgtaacaggaggacacatcctcaccctgcagaagcctgagtgtcactttgggggcagaaatgacctgccttgatcacattgatcactgtcctgaggaaaataccccacaggggaccccgatgactccagcaaaggctctgcctcaaaaccattgaagagtccttcctttcattagaattgaccacagcacctgggcttcagcacaagccataccacagacgtcacaaagcagcagcttgacacctgatccaggtgcattttctcacctttagaagctgagagaggggtgtactctcaaggtcaacacactctttgtgggtttttacacagaaaacctggttttactttatttcatttgaagataaatgaacaaatgtgcatctataaatgattgtaattttcacatttattccaattccaatatttctgaattctgcataatgtcctggcacaaggttgtgttttctataggtatttttcaacagaccaagaaaatgcattttccaatttccctgtttttcctccatgtgcagagaccttgagtagagcacgtctgactgtgtttgtctgttttcacgctgctgatgaagacataccagagacgaggaaacttacaacagaaagagttttattggacttacagttccacgtggctggaaaggcctcacaatcatggtggaaggtgaaaggcacatctgacatggcggcagacaagagaagagagcttgtgctgggtctcccctttttaaaaccatcagatctcatgagactcattcactattaagagaacagtgcaggagagacacaacacccataactcagtcacctcccactggtccctcccacaacattgagaattatgggagttacacataaaaatgagatttgagtgaggacacatccgacccatatcattccaccgcaggttccctcccaaatctcacgtcctcacatttcaaaaccaatcatgccttcccaacagctccccaaaggctaaactcatttcatcattaacacagaagtccacagtacaacatttcacctgagacaaggcaagtcctttccacttataagcctgtaaattcaaaagcaagttacaagcattgggtaaacacacccattggaaatgacagaaattgcccataacaaaaagaccccatgcaagtccaaaatccagcagggcagtcaaatcataaagctccacaatgatcacctgtaactccccttctcacatccgggacatgttgatgcaacaggtgagttcccatggtcttgggcagctccacccctgtggctttgcagggtacagcctccctcctggctgctttcacaggctggtgttcagtgtctgtggattttccaggcacaaagtgcaaactgtcagtggatctaccattccagggtctggaggatagcagccctcttctcacagctccactaggcagtgccccagtagggactctgtgtgggagctcgggccctatatttcctttcctcactgccgtagcagaggttccccatgaatgagccaccactgcagccaacttgtgactggacatccaggtgttttcatacaccttctgaaatctaggcagaggttctcaaaccccaattcttagcactctttccataatggttcatttttttggcctgttcattactggtatttttcaaaggaatctcacttgaatctttactcttttgcaatttgtctccatgacaatgttgggaagttttatctccaccatcataacatgatctagtgatctcacacatttgtggcaaacaatacctacaaattcagaagctctttgcttttctttccatgaaatataattctttctgttctgtgtataagcatatcttagcaaccctgcacacacccacatagatgtccacaagcctatgaattattctctgtaaataaaaacttatatcaatttccctcaatgttcataattctcctgagtgtgaggaagctccttctcgatctgttcaaacaaaatgcccagagaccatccggtaggtaaggagttcacctggctctggtgtggggtctgtctctttccctctgttgtcccacaggtcagcccagttgttcaggtcctaagaagaaagcccaggtttgtcctgattttaaaacacttcaaacttctgatgactctcctgttacccacatccatggagatagattatttattatataattcaccaaactaatgtcaaatgtccaagttgcaataccgcacatcctagggtatgttcatgcaattcaatggaggagaaagtctttcagagacagatggatctgaaatgataaatatgtgggtaaggactctggacttgagtgtcattgtccagccatgttgcacaagtgtgtcctgtcagggaaggatcagagttccttgtgctctcagagggaaggggtcacagagttcctctctggttcccaggaaaggtaatcgcactaatcttcatgatcttcatgagactatcctccagtgctgacctgttatagagtttttgtctgaagttctcactgcaatccccaatctacatattttcaatcagaagtgtttagaggccaggacacatcttcaaggtcacacattgagaaggatgtagatatgtcccactaccttctcctgagatctcagacagaatcccagatttcaaaaggacacagaaggacagctctcaggtgcttttaaaaaatgacccacttccagggacagggagcttccctataaccatggtggatgttctgaactacaataaacattggatggatccaggattgtttgaagtcactgtcattattacattcagctgctgtttcaatgtgtctgaagtagtaaatgacaatttagatgacaatttatatgaatcttcaagggtagaacaatattgaccatattccaaaatctgtccttgatccatgatcacactcatctcccagaccaggtccttcagcacgtctctttacctgaaagaagaggactctgggcttggagaggggagaccccaagaagacaactgagttctcaaagggcacagccagcatcctactcccagggcgagcccaaaagactggggcctccctcctcctttttcacctctccatacaaaggcaccacccacatgcaaatcctcacttaagcacccacaggaaaccaccacacatttccttaaattcaggttccagctcacatgggaaatactttctgagagtcctggacctcctgtgcaagaacatgaaacatctgtggttcttccttctcctggtggcagctcccagatgtgagtatctcagggatccagacatggggatatgggaggtgcctctgatcccagggctcactgtgggtctctctgttcacaggggtcctgtcccaggtgcagctgcaggagtcgggcccaggactggtgaagccttcggagaccctgtccctcacctgcactgtctctggtggctccatcagtagttactactggagctggatccggcagcccccagggaagggactggagtggattgggtatatctattacagtgggagcaccaactacaacccctccctcaagagtcgagtcaccatatcagtagacacgtccaagaaccagttctccctgaagctgagctctgtgaccgctgcggacacggccgtgtattactgtgcgagagacacagtgaggggaggtgagtgtgagcccagacaaaaacctccgtgcagggaggcggaggggaccggcgcaggtgctgctcagcgccagcagggggcgcgcggggcccacagagcaggaggcccggtcaggagcaggtgcagggagggcggggcttcctcatctgctcagtggtctccctcctcgccagcacctcagctgtccccaggggtcctctttctttattatctgtggttctgcttcctcacattcttgtgccaagaaagaaatgaggaagacaaattttcgtctgtagttgaagtttcaccaattactaggaactttcctagaagttcctgcatggcccattatagcttacagattaaatatatatcaagcttctcatctcttgatttgtgtcatcaactgaattgtgccctctttgaaattcatatgcagaaaccttaaattcaattgatgtatattggaattttaatgaaataattaaggttaaatgtggtcataagtgtaagactctaattcaacagacgtgtcgtctttataagaagaggaagagacaccagagacctctcacttttcacgtgcaggcagagaagaggccatgtggagacgtaatgcactagaaggtggcccagtgcaagccaggaagaagcctcaccaagaaccaaccctgccagaacattgatcttcaacattcagactgcagaattttaagaaaatcaatatttgttgtttaagccacccactcctgttgtcttcttatgaagatccagacagactaataccacataactctgttagcgctgtcccctggatgcagaatcagcccgctggggctgggcacatctctcagatttccacataaagtaggcaaaaaatagtagttctgatataaaaatttgtcatgtccctgttggccaatttctgggcaaggtcttttaaagaagccctgggggctttgtcacaaaagttgccttttatcatttattaggacataactgatgaacaatgagtaccagttggatggagactgaccactgaccatcttctgctgtctcctaagtatgccacagaaaaccacaccaacattactctatgtcttcaactttctaaatttgcactgattggtatttaaggcaggcccagcgttgaataactcctttagtttttgcttctctgggaaaggtcttatctatcctggccttggtcttcaagtttcagcaattctgggaagccaaggacgcctctatctcctcctccatgctctgcaactcacctgagaacagctttctcattggaatgtcttctgtttaaggaataagagtccctgtttcaggcttgggtgcctgagtacacctactggatccagcccaggattggagaaactttccagaacacatcacctgagaaatgaccagtcacactgttacactttcacaatttccgcttcctcatgagaaaattaaaattgcagagactttttcataagcgttgtgccatgtcctttcttgttttcttgcctgttcatttatgtcagaccaggtgccacatctatgtaatcaggttagaatcctgcctccagtaacacatgaaaaggacctatggttgtacttttggtctttgctccaaagtgtaaagattacaaaagtcatcaccctcattcttatgccaagagtcatctgcacaatctgatcttcaatacattttagaatccatcaaatgaatgaaattccattttttaaattaccaccccaaaaactagagagatgggcatgtccagaatagcagttgatggttgcttaactggaagagaagtttcagaagccacaagctgttgaaggcacttacgtggttagcactatagacgtctgcaagacagatgtggactagggtgaaatgacagttccagagggccgcactctcctcagtcttctggaatttccctctagaaatctccagaatctaaaaaatacaatccaaatatgtttcctatgggtcataactggggaagtttaattactgaaaaatataccaggagccttctccaaaagatcctacagggaagaacttttccagaacctcatactatgtgaagggaagaaaaatctgcccattccagatccctccccacttcctccattattatacaaatgagtaaggttagccaatagggtaagatgtaagcaaatagtccagggaaactgaagccacaaaaaggagtaaagatgaaaattcagcttttcccctggagatgcctggtcaaggtcacagcccagaaaaggaatctgattgagtctctaggtttccatggtcagaacaagcagtgctgacccgcactgcacaatcctttctaaccaggatgatggctctggattaaatatgagagtgtgccaatgcacagtctctgaggagaacatagggacactaaaaaagcaatggcagggagttagacaaggacagtagagcaatatgaagcctctgacgtgaacatttttaaaaacaagatcttggaaactccctcattcacctcagcttcttttatcatgaagactttccaagattcttaactgagacaaagaaaataacaacctgcatgcacttccgaagtctccgcttgtatcctgtttgctttagatctctaggagaaaaatgtcagacacctgggcctagtgtcaatgtgggaggcactttctacagatgaggcgcaagaaggaagggaaaacgtgtgttattggaatagtggatatgaagtgtgctctcatctgaaagcatctgcacctgctggaaatctcagatgcaacattcaactgcaagaaccaaggcacacccaaatctcctgtaagattttggattcattatccactgattcagtgcaactggagcttcagagaaggggctccctcctgtgtcatagcatccttgctttgagttcattagatttagtaaggctaatcaattgtttgaagagatggtgtcagcagcgtatgctgtcactgaaggagtattctaaaccaggacaaagccatttcatgttaggcgagggaagctggcggaaaatgctttatgagccccacaggaacttccttgcaaggcaagggctgggctggagggggcgcgcaggaaccgcccagcacaggttccatccccggaggggtgcacaggaggctggggacgaggttccctctcagcgcctgtgtcttcctttggcaacaaaaaaaatcctaagtgttcaagaagttgctgatgtgtctttaagtatcctgttccgtcagagcctttcctataactgaaggcaaccagaactgtgttttaaagtcggttccgaggactgcaagtatcttaatagtgaggatataaaggataggaatggttttactaattgaaaggatacagaattgtggggttccgaggactgcaagtatcttaatagtgaggatataaaggataggaatggtttcactaattgaaaggatacagaattgtgggagtcactatgttcctatgaataaaaaattcagatttcagtgttaagtaatgttgcctacattgtgtgagtgacagggcagtggtggatctgagagtgtggcaggtgcacagacctagtgagtcagaaatcaatatggaaagatgaggatctatggatatgaactgaaagtaagtaaacagttcatgaaattctattaaatggagtaggaaataaaacccaaacttatccaaaacacaaattccttggcgattattttgggagcagtgagttcatcaggaaccccaaacttctcttacgtcttctgattcctgttgtccatgagatgagaaattcagctctaattgtgcatcacagggcaaatctgtaaaccaggagtgtttctattgaggatcatggtggatcaggattccaggcaggtgctggagacactgtctcaggagcgcccagatgatctcagggggacctgctggacactcacgtggaacatcagcagtcactttctcagagtaaccagtgagctgtgctggtgcctgatgggactaggatggggtcaaggcaccttctcagtgtcatggagagtgattgttccagaaatcatccaggtggtctctacgctaatcaaatatgggttcacagggaggaacatgtgctctgggtgcttggtcttcagtgaaaggacgtctggccaccaaaagtttgtaaatggagcagggcatgcatttcctcaaggaggattagggcttggagcatcagcatcccactcttgtaaggctgatgtgtcatttaccttccctttcttatcccaaatcagggtcttcagctatgaaatgctctgactcatgaatatgcaaataacctgagatgcactgaggtaaatatggatatttgtcagccctgagagcatcatccagaaaccacatccctccgctagagaagcccctgacggcacagttcctcactatggactggatttggagggtcctcttcttggtgggagcagcgacaggcaaggagatgccaagtcccagtgatgaggaggggattgagtccagtcaaggtggctttcatccactcctgtgttctctccacaggtgcccactcccaaatgcagctggtgcagtctgggcctgaggtgaagaagcctgggacctcagtgaaggtctcctgcaaggcttctggattcacctttactagctctgctatgcagtgggtgcgacaggctcgtggacaacgccttgagtggataggatggatcgtcgttggcagtggtaacacaaactacgcacagaagttccaggaaagagtcaccattaccagggacatgtccacaagcacagcctacatggagctgagcagcctgagatccgaggacacggccgtgtattactgtgcggcagacacagtgtgaaaacccacatcctgagagtgtcagaaacgccaggaaggaggcagctgtactggcatggaggggatgacaaaggttattagattgaagattttcttagaaaacgacttcaagtcattaaagaagaggaacaacataaatgtgtatttgtgaaattttaattgagagatttttcatacaacatttattctgtaagctatttcagggattggaatatgaatcaaattaataaagctgatatagacatcctctgaaggcatcttcgtaaacatcaatttctgaatcagtgttgtaaatattttggaacacagacacaagatcacatttttactctacttttatctctatttttaaaaaatgccaaaaagaatcttattttgtgcatgccccattttgaattcccaccgtcaatgcatgatagttcttggttttcctcattcaagttgtcatttgtcattaagagtgttgtgtgttttaaccattctaataggtgagtaacggtatctaatttttatttaaatgcacatgtccctaaaaaattcatatttaacaatttttatataatttttggtgagatgcctctcgtgatatttggttcattttttaaatgcattttttatcagttgtaagtatgcttgcatattgattataaaagtcatttaacaaattaaaataattcatttaacaaatatgcatcttggaatttttttctccaagtctgcagttgtcttttactcccttatccctgtgtattgcagaaaaatgtttgtgtgtgtgtgtgcctgtgtatgtacaaatttagattttaaaaatgtacatttttattcatttaaagatcatgtctttggcagtatatctgaaatctcattgtaaaagacacaatagtcattattttttccatgtctctaatcttaggacacaatcaactcatgagtgtttaaccttccctacctgattggaggactatccacctgagacatttggaatacttctgtaaggagatgtgtccttcccattatttctttatttagtcatctattgatgttcctattggtttatggatgtctatttcatactccgaagaagatccttgttacattacttgttttattgttcaaaacaccacagctttattaggtgctgggagctcatttagtttggatcctgcatccttacagcacacctcatctttttgtttttagacatttccctgtttccaagtattacaataaattctaagcttgttctctacgttaccttttttgtacatagaatcagccatttttctaaagactgctcgtttttcatgttaaagaacagtattgaaatttaaaaatgtgatcctgggtatgtgtgttgttaatgtggtatcagtacttcttctaggatatctccaccaattggcctagtaaatgggcatgtttataggaacccaagtttatggacacatcgaaactatttatgtatctaatcctctgtaatgtgattacattaaaaatgagaacacactggtgtctccatccaactatgctaccatatggatgtttccagccttccttccctcactgtccataaccacccactgcaaagtgaggaaccccatcccaccatatgccattttattacttagctgcacaatttcaggacacatgcatagcagtatcagaaatgtaaagctcgttggaaacatgtttatctactagaacagactgcttatgtgcagtttctttacactgtaaacttatagaatttcttcattttcaaagttgcttaggtcagcaacttcattttccactctcctcagtgaagtcatttcaatgacaatgtataatgtcatttatttgaaattctttcaaagccaaaactatagtccggtaaacatatagaggatattcaaggaatttagagagtgggtataaaataagtaaaaatggcactgtttaagaagagtaaaattgtttttagtgatatacaatggttgagacacaacacaattaatttggctaagctcatacttttgtgacagaaaatataaacctaaatatatacaatttttgtaaaaaaactttagcagttcattaaccccagggttaaacaagactgtgtaaaattatctaataacttatttgatgagggtggggatatcatgagacatatgcaacaaagaatgaaggcattttcctcatttgcatgtaagatgttaccattcactaaagacctttaataaaaaaaaatttctacgtgatccagtatttttttccttctgtcaagcaaataactcataggattcttttctttccttggttgagaaagattttcctacaagcttcagcacacgtcaggcatacactgtccctgaatgggcatttaccctcagatgggtacacacacctgtcaacatgggggctcttctgtcagacaaacacacctttactcatgtggattcttccctcagacaaacacacatgtccccacgtggactctttcctcagattacaacatttgtccttacatttactatttcctcagaaaacagacattgcatcatgtggtctcttgtctcagacaagcaaacatgtcttcagtcagataagtctgtggatttccacattgactgtttccttacacaagcacctatatccaatatttaactgttttgtgagaaatttatcccttttctctggaaatgtatttttatgttcttactggacatattttttaataatgtttggtactatgaagatacccgaacactgtccatacgagagaataagaaagagtaataagcagattaaccctgtgcatccagacccaggagtcctttgatcctgcccttccgaaatggagacacagaggaaggatgagcaatgctgagcagtgcacccatgaccacaaaaggaaagacatggcaatgtgtcccctcccctcctcatgaaaggcagctcatcccctgttccttcaggccctggtgaggagccaccccatgtatattcccttgatcagtgtccacaccatggggtctgcactgatctgggcttcccttctcatcaccctcaatattagtgtcccttgtgaatcaggtccagctgcggctgttccacatggggccgttcttccatttcctcagtgtttgcagaagtcctgtgtgaagtttattgatggagtcagaggcagaaaattgtacagcccagtggttcactgagactctcctgcaaagcctctgatttcacctttactggctacagcatgagcttggtccagcaggcttcatgacagggattggtgtgggtggaaacagtgagtgatcaagtgggagttctcagagttactctccatgagtacaaataaattaacagtcccaagcgacaccttttcatgtgcagtctaccttacaatgaccaacctgaaagccaaggacaaggctgtgtattactgtgagggacacaggagagggaatatctgtgtgagcccagacacaaaaatctctgcagagagacaggagggaactgcatggtagatgctcctcataaccacaaaggggcagtcaggaccatcaggaggagctcaggacacctgggggtgctcagaaccatgaggggtgctcaggacatcgggggctctcagaaccatgaggggtgctcaggacatcagggggctctcagaaccaccagggggcgctcaggacacctgggggcgctcagaagcatcaggggtgctcaggatatcagagtgccctcagtaccacgagggggcgctcatgacaccaggggcactcagaaccaccagggggggctcagtacacgggggttctcttaggaagcagctccacatcaggagcctgagaggctgtgattgcgttttaaacctgggtgattcccgacctggtcaagaaaaagtctcccccaggatctctcaccatttcttcttggtaattccatgatttttttttacctacaaaacattaagttagaacagggatttaattcaacttttaattctgcagattttccgagtaatagtagcaatgttccctcaggacaatttttaaaattggctatttatatattttatttatgtaaaatgatactatcttgaaaatagtaaaatttttaaaatcatacctctaatcccagcactttaggaggttcgggcaggcagatcagttgcgctcaggagttttagaacagcctggcaacacatttagatcttttccatacaaaaagaaaaagaaaaagaaaatagctaggtgtggtgctacctctggtaccagctatttgaaagtctgaggtgggaggatcccttaagcctgggaggttgatgctgcagtgagctgtgattgtgccactacactccggcctggttgacagagtgagaccctttcttaaaaatacaaactgtttcaataagtagagctttgtgtctttgtgctgtaataatcagttgtatatattttctaactgtaactcagcatatgcatggtgttctgtttctttttctttcatttgctgttggtggaaattaaacacctctttaaacgctcttgttctcccctttggttcgcttcgggtgtcctgtttaacagactatttcttcatcttccctttttctttgaaagtctttttctttctcagtttccatgcaggataaagaaagtccctttactttctgtcctccaagtctggtgaacagctcccttctcttcataaccactgaagccaaccaagtttaggaggataacagctctccttagaatatgctcgtctacctggagactctctgccctcctcacccttttctagggtcctgcacacatcacactcatcccatcccctcccttccctaagtaccacagagtgggctctgcagttcctgcttccctgtgtgtgctcagccctggggctcactagtgctttgatgatgacgttcaaatccccatgtgcttagactctctaagaccaccctctaggaagatgccattgtgagtgagtcctggaaatcatgggctgtgttcagtttcatattgctggatcttctctattttaaaggaatactggcaattaagattagagtttgtattgaatattcatgccaaaaaagttttctttcaaaacttttcaaataaaacaatttttcctgcctagtttgaaaactacaatgtaaattcaacaaataatataatacaattttaaaggtgacgtttgtcttattggttattcaatttattaaaaacagaagatatttaaaataaattccattgcacatttaagtgatgtatttgacaagaatggcatttacatacatttttaccaaaacacgtatttaaatatatttgtctttttaatattggtagaggcagacatacacgtagaaaagcatcattttgtactacaatctcaaactgtaaacacaatttaaattcagttaaataattagaataatatgaaacaggccgggcgtggtggctcatgcctgtaatcccagcactttgggaggccgaggcgggcggatcacgaggtcaggagatcaagaccattctggctaaaacggtgaaaccccgtctctactaaaaatacaaaaaattagccgggcgcagtggcgggcgcctgtagtcccagctacttgggaggctgaggcaggagaatggcgtgaacccgggaggcggagcttgcagtgagccgagatcccgccactgcactccagcctgggcgacagagcgagactccgtctcaaaaaaaaaaaaaaaaaaaaaaatgaaacaaataggtgcgttgttttggtgtttagatatacattcacttttgcatgggcacatgtatgtgtctttgctgggctgttgtgtatgtatgtgtgcttgtatgaccatcaagttttcaaatacatcattaaatttcatagttacattcgtcttggccaggcacggaggctcaggcctgtaatcccagcattttgggaggcttaggcaagcagatgacttggagttaagagttcaagaccagccttgtcaacatgccaaaaccccatctctacgaaaaatacaaaaattagccaggtgttgtggcacgtgcctttagtcccagtgcgacagggaaatgctgggtcagaaatcccacacaaagtctctacttggttaccacctaatggaactgtaggaagaaagccaccatccttcagaacccagaatggtagatccactgacagcttgcacagtgtgcctggaagagccagaaacactcagtgacagcccatgagtgtagccagaagggagattgtgccctgcaaagccacaagggcagaactgtccaagaccatgggaacccaccagttgcatccggtaacctggatttgagacatggagtcaaagaagactattttggaacgttaagatttgactgcccagctggatttcagacttgcacgtggcctgcagtttggaccaatttctcccatttgcaatggctgtatttacacaatgcctgaacccccattgtacctaggaagtaacttgcttgttttttattttacaggctcatagatggaagggagttgccttgtctcagaaaagaccatgggctgtggacttttgagttggggctcaaatgagttaagacttcaggggcctgttggaaagtcatgaatggttttgaaacgtaaggacattagatttaagaggcgccagtgttggaatcatatggtttggctgtgtccctgcacaaatctcatcttgaattgtatctcccacaattcccacgtgtcgtgggagaaacccagtgggaggtgattaaatcatggagggagttcttctttgtgcgttattgtgatagtggatgactctcatgagatctgatggttttaaaaaacgggagttccctgccctctctttgtctgctgccatctccatgtaagataaaacttgctcctccttgccttccaccatgatgtggaggcctcccaagccatgtgtaactgtaagtccattaaactttttcctctataaattactcagtctcatgtatgtctttattagcagtgtgaaaacagactaatacagcaaatatcaatctcttaaaatattttgttgttctgcatgtaatatagcacagtctaatatgggaggtaaaataaatcatccatggaccttcagatataagtcatagggtaattatgcctgtgtccctgaaggagtgaactagaggttatacacactagtggcactacctttggcaaagggtgttcaggggtttctgaaagttctgataattttaattttaaaattgaatttactatgtatttcttcatcaacctttccagaagatttttggcagtaagaacagcctagtattggagtaatactgatgaattagagagttattttgtaattattctcctgagatttgcatgaatcaattgatatagaagttcgtatgtcccaagttgaaacatcagaatcaagaaggcttcatcacccttaatggctgtggtttttggcaaggcagtacttcaattcagccagaaagagagacaacaataaaactttcaaatgcaggggagtctgacctcagtctctctctcttataaaggcaaaggcaaagctgtgccacatcaagatttttcttcaagccttcagagtcaacattgggaatggaaaagccaatcactttgtccttagagaaggcgaagatctgagaggaatgcagagttgtgttcatgaaggtgatgacattgttatttcttctcctttgcccagtgactgctttcaagttgagtgtttcagatgtcagacctgacttatagggatggttgtgactgcacgtgtctgacaggggctgagactctatatctctaagtgtcctgtcctaggagcagctacaggagtcagccctagactggaagtgccctcactgaccctctgcctcacctgtgcagcctctggccagttgaagaaagttttatccctggaacatcttttgtcaaaaccactccaactagtattcatgacctatggtccacaccctcaagtacacagacatgatcatgctatgacttggtgtctagaagatccctgcacttttaattttacctctaatattagactccactttatcacatgcggacacagcagaatattttaagactttcatatgttatgctgaaaaattcaatagttcataaaagtctacttcccatcactgccagtgtttactactgagtaaggatctgccatcccctagggaggaactataatggatggtgtgccctgttagtggttatgggaatgaatccatcttgtggcaaatggcagcatcttcttgttttgcaagattaaatagttttctatggtgtataaatacaacattgtctttatccatttgtctatctactgacactcagattgtttccatatattggctaagattaatagtgtttcaataaacataggattcaactatcttaacaaggtggtaatttcatctgctttgggtatatttctaaaagcagaatttctggtcatataacatttccagttttaattcatttggtgcctttatattgctttccataattgtgaaaatatagagtggtatagccattatgaaaaacagtttcagttttgaggtatgatccataaacaaataatgtttgattatggctctccatgagaatttctaataaatatgatagaagtcaagaaagcgtctcacattaaagcaaggattaattttatcccttactccctcaaaagcaaaagattggaagcatgcatgatggaggctgttagcagggttcagaatgatatcataaaaggaaactcagttggataaaaatgttgggctttcagtcataggtatgtcgatactcaatatgaaaccgcgaagtcaaatgaggatctagaatgtgttcacttgaaccaacagcacattctcagacgcacctattgctgcatcacaagggtgatgaacttttgaaacaagtaaagtgtgagtgcacagtaagtgataaagttatcacctttacatgaagtttgttcaatatgccaaaggcttgtacagattaatcatacacaaatatacacaatgtatttttgcatacacagatgtctagaggatgattcttttagggaaaattcttcaggtcacagaaatctgtgtaagttggaggtcccatgaaaaagtatctctttataaatactggtctattgctcaattagggaaaatgatctctgttggagaaagcttccaatttgggagatttcttcattgcttcttgagttgtaagacatgaaccaaaaaattgactggagttttttggagtttcatggctggagtttcatggctgtgttgttaaaaatttcttatacggtttctttcaattatttgagatcagtttttctgatttttttctccagtagataaattttcacaagatctcaggaaaccatgtctctggtgctttagtttgaaaaactaacttcctaggtaaagaagcttctgtctaaccatgatgagctcatttcttctgcataccatgaagtttgagaccccattgtccagaatcatgaaaattttacactccagtttactgaaaatcttgactttgaatttaatattgattggcattgacaaaaatggttcattcttggatgtgtcctaagttgctcacccaacatatcagtggactgagaatcttccattagctccctctgtccatagcactgagtctattgacaatctttgcagtcctctatgaaggagagtcctgaggttcatcagattcttgtagacactcagatgaaccaaaggaattaacggaattgaggactgccagccatttccacaacactaggaataattaccatctaagtgtaaaggtctacatcattcagaataccctgcatgacaggctgatgcaaaaaaaaatccaaccctgcagaggcttcacagcaaccctcacagttccttcagggaagaaataatctccaagttcagtgagtcagtaaagctgttctgagctacagtaaacattggattgggcccagttttgtctgagttcaatgtgattgttatactcagctgctgatcctatatggactgagtatggataatttaaatgagcctggctgcgtggtttgttatatgaaaacctgaactaaatataaataaagggcatgtctggactagcatgagggtgagagattctgggagctccaccccccttactcttattgccctttcctccaggaacctccaggtcctcagggtgagaatccacacagatcccttcatggctctattgccaggagaccaaatctctgataaaatcactcagaccttcttcagacagacaacccagggaaagggcatttttacacccttatgtatgtggggaaaggtaatccatacccattagaagcccctgccagcagcctaactttatcatgaaaatgggtaaaattagccaataggggtacatttaagaaaattttcctgtgatgttccatccagaaaagagcaaaaatcagcttcacacctggagacttcctgtatcgggcacagctcagagaaagaagatcaccacagaattaaaatgcaactgtaagaacatgtaatgcttccgtgttccacacattatgtctcaccagtttagtcaatatggattaaatatgagagcgtggcaatgcacaaactctatctgaggaggaaagtcagagaaaaaatgttaaagaaaatatggcaatttgaagcctctgacaccagcaacttcagcaccaaggaaatgatttcaccctcattggcctcaaatttacttttcatggagcattttcagggttccaaagtgagaccaggtgaattcaatgtgcatgcacttctcaggtgtccacgtgtattttgtttattttatttctatttgcagaaagtaaacacatattcagccttagtgtcagtgtagggagtgctttccatgacatgaataccagaaaaaaaggaaaaacatggggccaattaatgtaaaaattagccactgtgtgtgtgtgtgtgtgtgtgtgtaggtgtgatttgaatactagagttggagtgggcttctatccacatgcacctgcacctgcaggtagtctcaggtgcaataatcaactgcctgaccctaaaggaaacaagaatctccccaaacccctgaagagtgtttgggtttaccgtgtgtccagtgattcagtgcctctagagctccaggaaggggctcccccggtgatgcctgagatcttttcttcaggtctcccctgcagagttcctctgggtttcctaagggcaattcactatttcaaaagatggtgtgagaagcacatgctgtcactaaaggagaattctgagccacggcacagccactttatactgggctagagacactggtatgaatatactctgtaagtttagacagaaagcctcgtgcatggtaggggctgggctgcagggggtgctcaggataaacgcagcacagtctcccgccccagagcaggtgcacaggaggctggggaggggttcctctcagggcctgggacttcctttgaaaatatctaaaataagtatttcacaagggctgctgttgtttgtataaatatcctattcaattgtgagcatttatcaaactggatgttgtaatgacaaccacttttacaatggggatttcaaactcccctagatatcttaatagtaagcagctggaggtcaagaagagatcctttcttttaaataagtgcaatttttggagaaacatactcattcccaaaataacgcattcacatattaaggtctagaaatggctcaagttgtccctggtgcattcgaatgtgggttcaaagtgaggtgcgtgtcctgagggagcttgttctccagtggaggaagctctgtcaacacagagttcagggatgtgtaggggtcgtatcgcctctaacaggattacggcttgaaccctcagcatgtacaattgtgtcgtccatctgtcatgtatttgctctatctcatcctggctcaggaattgggctattcaatagcatccttcgtgaatatgcaaatcactaaggttaatacagatatctctgtgccgtgagagcatcacccaacaaccacacccctccttgggagaatcccctagatcacagctcctcaccatggactggacctggagcatcctcttcttggtggcagcagcaacaggtaagggactccccagtcccagggctgagggagaaaccaggccagtcatgtgagacttcacccactgctgtctcctctccacaggtgcccactcccgagtgcagctggtgcagtctgggcctgaggtgaagcagcctggggcctcggcgaaggtctcctgcaaggtgtctggttaaactgtcatcacctatggtatgaattggatacgacagaccccaggacaggggcttgagtggatgggatggatcatcctaccctggtgaacccaatgtatgcccacagattcacacacggtttgtcttctccatggacacctctgtcagcacggcggatctgcagactagctgcctaaagactgaggatgcagccatttattactgtgtgaggtacaccgtgtggaaacccacatcccgagagttttagaaaccctgaggaaggaggcagctgtgatgagctgaggcagtggtgcagcatgtctctaaacttccattttatctaagtttgcattgagttccgctttaatattagccaggaatgtgggatagacgggtgctcctaagaggtccttaatttgcccattttgatgggttttccagaagacgtgagaagccactttgttaacaaagcatcccaaagccatgccctgctccagaaacacgtgtacccatttcctggtctttggttaactgacaagctctcatcagcgcacctgggctaatttctcatcaggtagaaaaatgtgttgtaaagcaaggctaacgttgtgatagcaattcctgctcaataaccttcagcatcgttgttgttgtgttctatcaactaattacgtgacttcaaggttctcattgggagtgtcttataaatttaagggatatatagaagttcccctaattaaaataaaacaattgtgagcacaacctcagtgttcaaccatgtctccacccttcccaccattcaccccaaagaaatgttcacctctcctggaagtcgggttcattttcaaattagttattttttattttactatatcaagattattgtatgtgactactgtagcagaaagtgaattatgggaacttgaagtaaccaacgaaagataaattcagaactaattaaacaagatgtcagaacgtgattggctctagtcttttaaaattcagcaggttatgtaaccaggctttaaatttacacatcttcctgttaccttcacggcacagtcaactcccattatgtaagaaatggcaactgcattcccaagcgtcatccaaaattgtaaaaatagactgggtgaggtgaggagttgattgtttaaattccgctctgaagaagcagcatcaactcaacaaaccaccgcttttccctcagtgactagagctatgtcgcaggccacatggacctaaatatccttgatagagataataggactacataaattgggctgatcatttttatgctgtaaaattaataggtgagtctgcactccagcctgggcaacaaaacaagtcttgcctgtaaatacaaaagaaagataaattaataggtactgactttgacatttcggataataatattttcataaaccgaatttaattatacccacattgttacctacaccttcactgaaaagttcctagttatcatgagttccatcaacactccacgtgttcaaatctggacatccaagagagtctggagaataaaatgcaatgagggcagtgaaacttgcatatattcagcacctcttaactcaggaggactcaatacaccctggaacactctgcttttctgaatggctcacaatgactccagctcactctccaacctcctcaaacatctggcttctgtttgccctaagttcacgctctgctcttagtctgtgctctgaagtctttgcaaaggtgaaaatgagctgtcagatggaacttccttctcacctcagcatggaatttactgtttcatttaatgaccactctttccataatggttgatttctttcagcctgttcattactggtgattttcaagggaatctctattgaatttttacatttttgcatttttgtctcggtgacaatgttgagaagtttttacctctagcatcataacatgatctagtgacctgacacatttgtggcaagcaatacctacaaattcagaagttctttggttactttccacaaaatataattatttctggtctgtgtatgagcatatcctagcaaccttgtactccacacaggtagatgtctacaagcctatgaattaatctctgtaaataaaaatttatctcaatttctttcaatgttcataattcttctgaggatgaggaagatctttctggatctattcagacaataggcccagagaccacctggtatgtaaggagctcacctggctcacctggttccccctgttgtctcacataaggtcaagcccacttgttcaggtcctaagaagagagctcagttttatctgattttacaacactcccaatttctgctgactctcctgttacccacatccatggagatacattatttattatacaattaaccaaagtaatgtcaaaggcccaatgtgcaatattgcacatcctagggtatgttcatgcaattgaatcgaggagaaagtctttcagagacagatggatctgaactggtaaatatgtgtgtaaggactctgggcttaagtgtcattgtccagccatgtttcacaggtgtgacctgtcagggaagaaccagagttccttgtgttctcagaggggaggggtcccagaagtcctctctggttcccaggaaaggtaattgcattaatcttggtgatgagactatcatccagtgatgatgtactatagagtttatgtttgaagttgacactctatcgcaatctacatcttttcacacagaagtgtttagaggtcaggccacatcttcaggatcccacattgagaaggacagagatatattccactaccttctcctgagatctcaggcagaaacccaaatttcaaaaggtctcagaagggcagctctcaggggctatttaaaaataacccacttcgtgggacagggagcatccttctaaccatgatggatgttctgaactacaataaacattgcatggaaccagggtctgaattcactgtgattattacactccactgctgtttcaatgtgtctgaaggggtaaatgacaatttagatgacctgggtgtgtggtttgttttacataaatcttcaaggatagaacagcattgaacctattccaaaatctgtccctgatccaagatcacactgatctcccagagcagcatcttcagcacatttccctacctggaagaagaggactatgggcttggtaaggggaggccacaggaagagaactgagttctcagagggcacagccagcttcctactcccagggcaagcccaaaagactggggcctccctcctcccttttcacctgtccatacaaagtcaccgcccacatgcaaatcctcacttaggcacctacaggaaaccagcacacatttccttaaatttgggatccagctcacatgggaaatactttctgagactcatgggcctcctgcacaagaacatgaaacacctgtggttcttcctcctgctggtggcagctcccagatgtgagtgcctcagggatccagacctgaagatatgagatgctgcctctcatcccagggctcaccgtggttctctctgttcacaggggtcctgtcccaggtgcagctgcaggagtcgggcccaggactggtgaagccttcggagaccctgtccctcatctgcgctgtctctggtgactccatcagcagtggtaactggtgaatctgggtccgccagcccccagggaaggggctggagtggattggggaaatccatcatagtgggagcacctactacaacccgtccctcaagagtcgaatcaccatgtccgtagacacgtccaagaaccagttctacctgaagctgagctctgtgaccgccgcggacacggccgtgtattactgtgcgagatacacagtgaggggaggtgagtgtgagcccagacacaaacctccctacagataggcagagggggcgggcacaggtgctgctcaggaccaacagggggcgcgcgaggccacagagcccgaggccgggtcaggagcaggtgcagggagggcggggcttcctcatcagctcagtgatctccctcctcgccagcactcagatgtccccagggctcctgtttctttattgtctgtggttctgcttcctcacatccttgtggcagacaagaaaggaggaagacaatttttctgtttactgttgaggtttcaccaattactaggaactttcctacaagttcctgcgtgactcattttaccgtatatgtgtgtgtgtataaatatatacacatacacacacacaccatatatatacaccatatatattatatagatacacaccatatatattatatatatacacaccatatatattatatatatacacaccatatatattatatatatacacacgatatatataatatatatatacacaccatatgtatattatatataaacacaccgtatatatatatggtttctcaccatctcttgatttgtgtcatcaatggaattgtgccctatttgaaattcatttacccaaaccttaaatccaatggatctataccggaattttaatgatgcaattaaggttaaatgtggtcaaagtgtgagaccctaattcaataaaccagttgtctttataagaagaggaagagacacccgagacctctcacttttcgcgtgcacacagagaagaagccgtgaggagacgtagtgcactagaaggtggccctgtgcaagccaggaagaagccgcgctaagaaccaatttttacagctccttgatcttccacattcagactgcagaattgtaagaaaatcaatatttgttgtttaacccacccactcctgttgtcttcttatgaagatccaaacagactgataccacgtaattctgttagctctggttcgtggagggaggagcagccccctgaggctggacacttctctcagatttccacgtgaagtaggtaaaaatagtagctctcatataaaaatgtgtcatgaccctgttggccatttttgagcaaggtctctgaaaccagcccttgtgtgtgtgtcacaaatgttttcttttatcttttatttggacataacacatagacaaggcgtaccagctggatggagactggtcactgcccatcttctgttgtctccttaggatgtcacagaaaaccacaccaacatcaccaacgtcactgtttttcttcaaccacctcaaaccgactatagaaatgatccctgcagtataagtctatttcttcaaactttctaaatttgcactggaatctcttcctaaatggggagctacatggggtctgagttttgttcctttcttcccagtcttccccaagtgccaaggacagaatagacttaaaataaaatttggccgtcagtggccccaaccccacatcactttctaaaacccacatcctgcatccatccttctctggacacccctcatcgggctacctacgaatggccagaagctgccatcaccttctgggctgaggccacgagttatacacacgtgtgatttcagtcacacacactctactgcaggacacacctgtgttcttgaggcactcaggcaccctgctgatctcagtcattctctaataaattacacatctcttattaataaaggtccagatggtcccatcagctgcagagcagtggagtaaagctcatgggtgggtccgtcaggtagaagtcagacaatggatgggatggctggtcacttcccttttcactgatgtccccagtgaatattaatggaataaaaccatattaactacagagggacagaaaagaagactagctcatcaaggtatttaaggaccaggaactttatttggggggaaagtgaagacacttttaaatggaaagccctaaagcacatacaacagctgacagagtggccactgtgcacatgaaggctgaggagacggatggcagcgtccgttcctccaagatgtccctgggtgtgtgatggttggactccttatgcatatgaatataagagctggactcagggagaaaaaagggccatatctcataggaaaggaagcccaaaaaagcagatgggcatccctggagagagctcattagatttggtgtgtttaagacaaaaatttcttccaaaaattgtaatgttctaagctaaatatgaacctcttcaataaactgagaattaacaggagaatagagctatgagttgagagaagaaacaaatcatgagagagcagaaagcaaatccacaaaaaactgtcatatgacagaagtcagaatggagctggggcagctacttcattattctgaagacttgttgaccatgtggagaaggggcttgaacaaatggggacgttctccaaccttctgaatcagcctccttcttatgcatgagtaaaaatcatagttctgggtgtgaccttcccaaatttcctgtctgtacctcttcccccaggggtagagtgtcttcccaccacaatggtttctcaccagtgtcctcagcttctcctccattgaacttaccctgcagattaagaatttcttctagatgtagttctttgggaattttctgttttctttagtttctgttgactccaccacaccccataggtcacaggtttgattgatttcccctggagacagtggaggtggatccaggcgttcaacagtcctcgctgttcctcccttcctgtcagcaccacaggacagcagataagggagttgactgtagatttttcgaattcttgggaaaatcctgcaaggactagtagattcacactccaataccattagcacatgcatccaaaaaaaatactcacgaaatatttccaggttagcctgttcctctctcaatgccatccagtggcacctgccctgggttcaccaacatgtgggccccactcctctctgctggcatctctctcctcacatttcagtcttctcgttagctctgtgaaagcaactcagatatgttaaaaggttttcttcttcatttattcagtttttcaggtttgttgttaatgaggtcagaataagaccatagttttctcatttttcacattcccacactgagtagccactttctatataaaagccagaaactaagggaacaaatcaaatatccatatccactacaggtgaacgttaaacaatttgacatatgattatgaactaaagtacaatgcagaattagaatcaaggcatcctcattctcataaaagcatgtctacattctcaaataactctgctgagtgaaagtagctgaagaattaagagtgcaattcataaacttctaattgtataaactgcaaaaggtccaactattctaaagtaacagagcagatttgaaatttgtgagaaacgggtgttgaaagtaattggctggtgagatgaaattacagagaagtgacagaaagatttaggggttaacttaattgtacacaacctgattaaagtttgcacacatacgttaccattttccaaattgtgcagtgtagatttgaattaattattaattgtacttaaaaaaagcagtaacaaataaacacatgaatatgtttactgaggaggaacaaaaaatagatgggtatgaacactggaaacatctcagactcttgaaagtacacaggcttgaacactggttctctccgtatacttccggtaaacggctgaatacactaaaagaaaacagagatgtcctggcaggggtggaatcctgcagacctcactaggtgtgtcccacactgccctggagttgtctcaggggagcagtctcctctagtggtcagaggcacaggctgagataatggggttaactctgtccagctgtgtgactttgaatgcattgtataaacactctgttctgtatgtaatttatcttccttaaaatgcaacattgacacttacattaaatgtattctacaaatatgtcaaaaagaagatgatgactgctaaatgattatcaaggcacaatcacataatataatgatattttcctgagtgataagatgactaccaatctcgggggcactttgtctgctctgagccctgcccctcctcaggattcccatcccagagcttgctatacagtaggagacatgcaaataggtttctccctctgctgatgaccagtcctgaccccatagctctgggagagaagcgccagccctgggattcccaggggtttccatttggtgatcaggactaaagacagaggacccaccatggagcttgggctgagctgggttttcactgttgctgttttaaaaggtgaactagagagattgagtgtgaatggatacacttgagagaaacagtggatatgtctggaactttctgaccaggacacctacaagtttgcaggtgtccagtgtgaggtacagctggtggagtctgaagaaaaccaaagacaacttgggggatccctgagactctcctgtgcagactctggattaaccttcagtagctactgaatgagctcagattcccaggctccagggaaggggctggagtgagtagtagatatatagtaggatagaagtcagctatgttatgcacaatctgtgaagagcagattcaccatctccaaagaaaatgccaagaactcactctgtttgcaaatgaacagtctgagagcagagggcacggccgtgtattactgtatgtgagtcaccaggtaagaagacatcagtgtgaacacagacacagaatttcctgaaataagggaggagtctgggctaaaagggcactcaggacccacagaaaacaggggaagctctagggcaggtgcagatggtcatcatgggctgctttccttgagggtctgaggcttcctctgcatctaacagtttccctgggagcctctggacatttatgcttctgtggccacccctgaggtctctggacattctcatttgttgcaaaggcagatgtaagtattggaggcataaaaatgcacaggaggccagggagtctgtagacattgttaccccagaaggtcaatctcaccactagtgctggaggagggtgggagtttgatgaagctgccctaagtatcctgtggtctaagctaagtccaacgaggccatttgtgcctccctgagcacagttatccatcagagatgtcccatgtgtcccagcagcagccatgtctcagtgtcttcactgtgcacagccagtgtctgggaggagctcccaggatgggtgtctttggcacacaccaggtggcgggtgttagagtgcggtgcagcagctggctgcctgttctattgggctccctgatgctggagagatgggaggtgcattctcaggtccagcaccctgtttgtgaatttttatataaaaaccatgattttacttcattttctcagatgacatagataattaggaacagaacctgcaaagaaattgtaattttcaactttaccccaaatttattgtttcttaattctgtgtaagatccagacatattattgccttcctcatgagaaattgttctatttaaaatgaaattagttttttctcacattctttgtttctgttcaagtacagagatcttgattaaagtaagttgggttctttccacacactaaccctcacctcccccagagaaagagcagagattttcctcactctgagtctaagggaggagctgttcctgcacgattcagagcctgcagagaccccccccgccaggtgcagcttcagtgagtcaggtatttctccttgtgggtgacctccaccgccagtgattgctgctcaggtctaattgtgggttaagcattaggacacccttcaggtgatcacatctcagtcttattctgaaaatcaccatgaacagggatagttcaatgcctattctcctgacattagtttctctttattatttggttccaagtatggagaaaaatgtgacaataaatttgtcagaatctaacctcagaatccactgcattactctaggatactcacaaattgaacacaaatgagctctttattctcataaaagtatacgtatttgggaatttcaatgtgttctccagaacctgtgcatgccaacaactgtgtttctcagtgcccacttggcctggtgaagccctcacagaccctctccctcacctgtgctgtctctggattccccatcacaaccagtgcttcctgctgtagctgcattcataaaccccccaggaagggactggagtgaatccagtgcacaggtcatgagggagtgcacattccaacccactcctcaagagtccagtcaccatctccagatccatgtccaaaaagcagttcttcctacagccgagctaagtgagtcacaagcacacagccatgtatttttaacaaaagacacagtaaggtaaccacagtgggaactcacacccaaacctccctgtgggggtgcacaggacagccacagttactcaggaccccaggattcctcaggacaccaaggggcactcaaggccattgtagatgccctcaggtagccaagggttctcaggaaacatggaggaaaaccaggaccccaaaaggtgctccgtacagcaggggactcaggacaattgcggggactcagagcaggctcaaagctcagcttcagggcaggtgcagctggggttgaaaggggctggatgaggggttttgtgacaccatcatatttcaccactagacacactccactttgtctattctaacgcatgtgagtgtatgattagaaaatgatatttatataaatacataaccatagttagctgtgtcaagttgtcctcttgctaggtgtccatagctaggtgcatcagccttgtccataaggactaattccccgcaattactggagaatctcataaattgtggtcaattatgtcagattcctctctttttctgccttcctttctcccttcttctctctctctcacacagaaacttacatacacccaccccacaacacaccaaaatctataacttttattacctgatatattcaataaacctgattaatgtgcagcttttccagcttcgttatttatgctgttgtaacaataagaacaatgtgtttcctagctgtgtacttctctaagctgagtagcatctttgtttataatacctagaattaaaaacaacccaaatgtcaatcaccagcttaattggtaaacaaattgaggaaaagtcattcattgacatactatccactactaccatcaactaatgttgggtacactcaacagcatggttaaattcacaagtacttgtgatgagtaaaatgagccaaagtaacaaaagtgcatacataagatacaactttcataaattctatagaacaaaaagtaatcttaagttacataaaaatcagtagttccactgtgagtattgtaggagaggggaaggactaggaaggaggaattatagtacaagacaaaattttgagggaattgacttgttatctatgttgctcgcgatgatgtctatgacccatttgtaaaattgaacacttcatatggagattattatttttaatttaactccattaatgatagtactaattatagcaggtataatttggtatcaaaagaattagacagagataaataaaatacatgaaaagtcagagactcttgaatatacacataaatgagccctgggcatctctgtatttttagagaaatgctagaatatagaaaaataatggcataattttatgtcactaaaaaagtttatcgaactccaccagtcatgtggtattagttcattttcacactggtataaagaactacctgcgactgggtagtttacaaggaaaagagatttagttggctcaccgttcttcatggctggggaggccacaggaaacttacaatcatggtggaaggtgaaggggaaacaaggcacatctcccagggcagcaggagagagagagaggggggaagtgacacatacttttaaacaatcagtggttgttagaactcactcactaccatgagaacaacatggggaaactggacccatgatccaatcacctctcacctggtccctcccctgacatgtggggattacaatttgagatgatactttgatggggatacgaaatcaatctatatcacatgtccagctctgtcctggagttgtttcagggatccagggtgtccggctgatagaaccagtgacaccaagctcacaccctcagctgtagttgacaccacgcaaagccaagagattacaactaagatttagtttgaatgtcgtgtctgatgaagtcacacactcagagaaagtgaatatggaaaagtttattatttgcactctataggtgtctggtgagtgcagggcaggtctcccaggaaaatctgaaacagcttgaaagaagaggaaaggagactggctcagcatttttatgatggtttggtcctgggggcagagtgaggcttcccactcacagaaaggggtttgcagggtttgaaactccccctggcatcgaatgaagaagctcctgtgatttcaaactagagccaccttgtgtggcaaaaaaggagatgatggaggaatatgctttaaatcatcagcagtcacgcacccaaaaatagtgtgacaacttattctatgcagcaggaataaaaataattaataagaaagaagataagggttcagtgtgggtggacaacacgcaggtctacagaaatgagatgactttagaaatataagcaaaggataatgaaaaaaaggaggggaaggggaattaaacagggtcctggtctgatgtcttgggtagaagcttctcacaatcaaggactaccagctcattctgcaggtcttaggtcagccatctgcttaaaaacatcagaaacgccagagaatctatgaacatggtcagtttaacatttcctatttgagtagctttacagttgtgtggaattcttaactggttcttgttttttcttttagatacaggctctcaccctgtcacacagtttaaagtgcagtggtgtgatcatagctcgctgtaattttgaactcctgactcatattcttcccatcttagcctcttgaatatctagaactagaggggcatgccactcatcccctccttattttttattttattttttcatataaataaggtctctttgtgttgcccaggctggttttgattgcctggtctcatgggatttccctcacttcccttctgaaagtggtgtgattatacagatgatccagtgcatctggcctgaattgattctttaattgtaaaatacgaacccaataattaacttcctgaatgttttctgcagtgagttagttaaaaggatctgacaagattccttccaatatgattcaagagcagtattgtccactgatgttccttccagtttccttgttgaagatcacaagagtctgtggaaaagaggtagtaaaaaggccgcctcaaactcttcgtggttggagtgggtaccacacatgcaagcagtaggacaaggatgatctctggggtaaagtctataaacatataggccttttagctgccaagtcatagggtaataactgatgcagcctgaggagtggaccatggtttcatagtgctagtgggagaacccttggccaagcaagttttacattttattacattttattaaagatttgataattttaatgtaaagatgacattttttaaacattcccagaagattgtgagtggtattgattctgtctcgtatgaacaatgacagtgccctccacggttagattatgttataaactagaatgaggtagagtgtttggtgtgttaaatcactatttttttagcttctatgttagttttttgtttgtgtgttagcatttgctttaaaattctattaatcagatctctagttggtagaaattcatctgaaagtttcttccattgttgtccattttgataggatttccagaagatgtaagaaccctctctgtttgcaaaaatattccaaagttgtgcaccatctagaaacatagttacttaattctaatttttaatttattaaaaagttgtgataagtgcaaagttttctgccttctgaattgatttcataacacacagaataatatatactaaatggaagtttgtactagtaatacaaattactgattaataacctctacttttattattgaggtattatccatcaatatataatcttaaatcaatgatctcagtgggaatcttacctaagtaatatacaaaatattttcctgatctcgacacaaaatagatgtgaacacattcttcatattcagccatgtctcctgtctatcacattatgaaccacatgctaactttgatttacttgggacttgctctaaattcaaactagttatcttttatcttcacgcagctggattattatgtgtggctattttatcagagtgataagatacaatactaacaattttcactgcaggcatgtctaggcaagccccctgtgcacaatgaccttggtgggttggacattctatggggactctcccctgtctgcctaggagagttatctgcctcctccctctatcattttcctctttgaataagtgcatctaactgccgttagaatacagacaaaggccaaccttaactgcttccagctgacaggggatgctgtttcgggaagatctcccttgaggtctgtctaagggacccagtaaaagggagccattatcccaggcttcacttggatgaccatttggagttgatgcctgaaggtgagaagagacaaaccgggttattagaagacatgtatcaaaaccaaacaaggtggtaaggacagtttgaaaaaaaattccaaggctgctgacacacccagatatctggtggctgtagttatgcctgctaagatttgggtgcatggggcttggctttcgttagctcccttggacttattttcccaaacaaagaaacctccgggttagggggaccctatttattccagtcacctggcatgatttgccggataattgctcagaattaaaatattcgtccagatgtttatatagcccatgcctgtgtttcttctgagctgcagccagagatcattggttggttcacagcgataagcagagttagtctaaaatggaggcaaatacttaaaacttatttcttctctcagttaatggattctatagagaaaagtagctactcagcatgggaatgtaaaaaaatgagtaaactatgatcttattctgaactcattaacaacaaacctgaaaaaccaattgaagagactgtaatttaaagacaagtgtatgatatgttttgaaacataatttttctctctccagttctgatttttgtcagaaactaatcattataggactgagttgtttgcaaaataaactttagtcttatggttggtctgatcatttgcataaagtgaagccataataattaataataattctgtaggaaaagcctgcaagcatgaggagcttcacagtctaacactatgagcacatgcatcctccagcaactcactgaatattttcaagtcagccggttcttagcttaaataacatccagttggtatctgtcccaggaacactaatatatggttctctctgcaggcccctttctccacagattaagggttttttttttttctctgtaatatcaactcagatatgttgaatgctttttccttattagtggtttttcaggtttgttgttaatgatttcagaataagatcattgtttactcattttttttaaattcccgtgccgagtagctacttttctctatagaatccattaactgggagaaaaaataacattttcttatgggtgaacaattaaatagtttgacatatatttatgtactggtatataatgcagcttgaaatcaaggcatgcctcaatcataaaaatcatggctaaattctcaaagaattgtgctgagtgaaagaagctaaggaattaagagtaaattttatataattcattgtagaaatattagaagatgccactaccataaattaaaatgaagaagacttaaatttttctgagaaaatggtgttgggaatgatgcggatgtgatttaagtttcagaggaataagaaaaaagatttagggattaatttaattattcaaaacttgattgaagtgccgagtgaatggctccaaacatagtctacatttttcaaatcattccctataaatttgaattaattatttatttttatacttgaataaagcaataacaaagaaataaatgaatatttttgctaaaatggagcaataaaaagactgatattgacagaagaaatatgactgacttctgaaaatacacacacatgagccgtggttctctctacatatttagataaattacagaaagttgtcataactgatggggaatcctgcagacttcactaggcatagtccacactgccctggagttgtctcaggggagctgcctcctccagtggttagagcacaggcccaggtaataggactcatttttttagatgtgtaattttagacacactgcacaactgctgtgttctctgtgcaaattatctcctgtaaaatgtaacattgaaacctgccttaaatatattgtgtaaatatgtaaaaataaaatcagattgtgagagctaaatgctaatcaaggcgcaatcacgtaatatacaattatattttcctgaatgatggaattaataccaatctcccccaggacacttcatctgcacggagcccggcctctcctcagatgtcccaccccagagcttgctatatagtcggggacatccaaatagggccctccctctgctgatgaaaaccagcccagctgaccctgcagctctgggagaggagcccagcactgggattccgaggtgtttccattcggtgatcagcactgaacacagaggactcaccatggagttttggctgagctgggttttccttgttgctattttaaaaggtgattcatggagaactagagatattgagtgtgagtgaacacgagtgagagaaacagtggatatgtgtggcagtttctaaccaatgtctctgtgtttgcaggtgtccagtgtgaggtgcagctggtggagtctggaggaggcttgatccagcctggggggtccctgagactctcctgtgcagcctctgggttcaccgtcagtagcaactacatgagctgggtccgccaggctccagggaaggggctggagtgggtctcagttatttatagcggtggtagcacatactacgcagactccgtgaagggccgattcaccatctccagagacaattccaagaacacgctgtatcttcaaatgaacagcctgagagccgaggacacggccgtgtattactgtgcgagagacacagtgaggggaagtcattgtgcgcccagacacaaacctccctgcaggaacgctggggggaaatcagcggcagggggcgctcaggagccactgatcagagtcagccccggaggcaggtgcagatggaggctgatttcctgtcaggatgtgggactttgtcttcttctgacggttccccagggaacctctctaagtttagcattctgtgcctatgaacgtcttctctaagtatttgaaagagattattttaatatgaagagcagttctcactcgcccaaaatgtggattgatgcttactgggatgaaaagtccccaaacatggtcaccccgataagagtctgagtgagctcagggcttcctgctgagtctcctcctatcagaccaaggacagggacctcagtgaggttcccccgtcaagaacagtctttatggatactgattgtgggcggcaacccacccaggtgccgacgcaagagaccgaggacacgagctgttccagtacaataaaatataaaacaagaatagttataccagatatagatcttagatatgattatatatgaatatcattaatcattagttggtagcaattactctttattccaatattataataatcctcactctacaatcataacctaggaaaagccaggccatacagagataggagctgaggggacatagtgagaagtgaccagaagacaagagtgcgagccttctgttatgcctggacagggcgaccagagggctccttggtctagcagtaatgccagcatctgggaagacgcctgttgccaagcggaccatggtctagtggtagactcagtgtcaaggaaaaacacctgctacttagcagaccaggaaagggagtctccctttccccggggagtttagagaagactctgctcctccacctcctgtggagggcctgatatcagtcagacccgcccgcacttatccggaggcctaacagtctccctgtgatgctgtgcttcagtggccacactcctagtccgccttcgtgttccatcctgtacacctggctctgccttctagatagcagtagcaaatcagtgaaagtactaacagtctctgataagcagaaataatattgtaagctgtttctctccttctcctctctctctctgcctcagctgccaggcaggaaagggccccctgtccagtggacacgtgacccatgtgaccttacctatcattggagatggctcacactccttaccctgtccctttgtcttatatccaattaatatcagcgcagcctggcattcagggccactactagtctccgcatcttggtggtagtggtcccccgggcccagctgtcttttcttttatctctttgtcttgtgtctttatttctatgctctctcgtctccgcacacggggagaaacccactgaccctgtggggctggtccctacactgatcacagacaatagagggtaggccaggatcagtgtcatgtaggacatcacaggtttcacctctgaaccttttcctgacactaaatatgcaaatcagcatcagcactgatctggtgattcttttgttcctaatccatttacttcctttttcagtcgttgttttcatttttccatttgcttttcctgctttctgcaaaaggaagatttttccctgtggtcaaaattccggacctcaagccctttcctggcgctcaggtgggtctcaggctgtggctgctgcagtcacgcgggagaggctggtgggactttcttcactcctcgtcactcagggccctccactgtgttgcatggagacttatctggaaatgcaagttgcgactgagaactgaaggggacaagcttgtttggttaacatgggatgtggatgtgtttctaattttgttctgataaactttcacagagtaactttctgcactagtcatgtgaggaagaggatgtgaacgtagtcagaataaaaatagaacaacttgtgttataatctttacaggtgaagctggagaaggtcatgaatagagggttctcatgcacacatccctgataacaagaactaccataaaattactctgcacaaccacaactttcaacaaaggctaccacaacaataagagaattaatattgtgaggatatctgccctgcaactcccagtacaatcttaaactgattccacccttgttattaattcttctacccccaggataattgcctcagaacagctcatgtaagtcctctcatttatcccttaaaacaacctttaccaacctttactaacctgacttcctttacctacctaaatatgcccagggataatcccactggaatgctcattttcaaatacatattatttgattttggagaatttctttctgtctgatattcaggtgtgacaagctgtagagggtcacaccactttcctgtgagatgtaggggatgacaatttggggggatggctggaaacatccaatatcctcagggtcggccatcagtaagcgcaggctggaagtctcagaacgagttgaagttgcttaaccacggaattttaccttctccagatcagctttgatggaatcagggccaaactggttatcaatgataatctacctaacattgagtcaactgatcacagttttaataacctctattaaaaattcacaccaacacttggattagtgtctgatcaaataactacaaagtattttccagccaagtataccataaaacagaccattacccatggagaaaaacatttaacatgagttctaggtccttacattgttaaaggtgtaaaactgattatttttaaattatgctttttatttttgctattgagttgtagaagtttcatttacattttggatattaacgcttttttcagatacatgatatattatccaattctgtgagttggaattatttcattgctttgcagaatatttttttaatctagtccaacttgttcaattctgcttttttttaaatgtgctttgaatgtaaaatccagaaaaagattgctaatttttgaggattgggagttttacagttgcaggaatttcattgaaatatttaatgcatttaaagttaatttttgtgtttattctaacctaaaattcttaattcttcacatgtgaaaatccagttttcataacatgctctttggaagacaccataatttagccattgtatgttgatggttctcatgctgaaaatcagttcgccatcaaaatgtgggtttatatctaagctctctatatgcatttatgctgaaaccattcggatttattactctgtgtttgtaacaaatgttgaggactggaagtgaaatgcctcaagctttattcttgccttattacagatattagacccaaatattctaaccttctactagtgagtataataatagctgtcgctttttttttttttttttgattcagagtttcactcttgttgtgtaggctggagtgcagtggtgtgatctcagctcaccgcaacctctgcctcccgggttcaagcgattctcctgcctcggcctcccgagtagctgggattacaggcatgcaccaccacacccggctaattttgtattttcagtaaagatggggtttctccatgttggtcaggctggtcgcgaactccagacctcaggtgatcctcccgcctcagcctcccaaagtgctgggattacaagcatgagccactgcacccagcctcttcattttttttttattcatatgttcattcagcagccactatgtcttcccattgatttctttggtttcctctttactatctttttctttttagtaaagctgttactcctaagggaagatgggaggtgggcctggacagggatttggtgcattcctctcttcactcacagttcttattgatctctccagtgtctctagaacactggttttcctggcattaccgctgcagataatttctcttgcaatgtagtgctgatgaggaggtgtgtctggatgcatttcagctatagttgctgttttgctttccctgacacaaccgtcccaaggggtagaggctggagcattttgtgatgtgtccccagtactgaagaaaaagccttcaatagcaggaggaattcctcaactgtatacactctgagaatttaaacaataacttctctatcacactcaaatttaaaccatccaatgaatatgtctactttaatcgtgtgttaacttaaatgatatttggcagcctctgtcccagaaaagattatcatctgctcctgtttatttccctgcaagtctttatctctcttcagatttcagatatcttgtttgtcttataacatcaaaaatctgatgaatttaagaaaatgtgctaatttgcagatcagtaagctttagtagttgtgagaataataacaaatttttatgggatgcctgcatctccaagctgagtagcatctttatttctaacactcagaaactagaaacaatgcaaatatcaagaagatatatagataaagagtaatggcatgctaatttacggtaatcatagccatcactagaatcaatacactgttgatgctcaatgtggttgaatcacaagtagttataatgagtgagaagccacacacataaaacacatactatataattcctgtataataaattcttgaaactcaaaaccaaagtattcaatatgaaggattgactcagaatatggcaagggaaaaaaataattgggaaggaggaattgtagagtaacacaaggaaacttttaagtgtaatttatttgtttgttatctggatggtttttggggatgcacaggtgagcacgagtggaattacattttgttgtgtttgtttttttctgaagagatgtggtcctactctgtgacccaggcaggactgcagtggtgggatcatagttcaatgtagcttccaacttctggtcaccaacaatcctcctgcatctgccatctaagtagctgaaactacagttgtgtgccaccaggctcagcttgagtacttattaaatcaaacactttatgcaatatttaatgtatggcaataatgtctcattgagagtattacaaataaatgaatggataatttgttcagtacagattgatggaaaatagacactaacatgaggaatgtctgacatttatgaacatacaactgcataaaatgtgttctcttacattcattaggtaaacacaatagtgcatacacatcaaaccatgctttcattacaggaaggaagttctgaaaatgtcactgggggtgacccacgctgtgctgggcttggttcgggggcagtcaggcccggtggtgagaagcacaggcccagatacccaggcttactctgcaaatgtgagctctggggacattgtaccacccatctgtgcttctgctggtaattttccatctgtaacgtggaaataacattgatactacataccgtgatttctccacatatgtaaaaataaaataagatgattgctgctaagtttaaataagggcagttttcataggtccattgtacctcaataaaattactttaaaataaaaattacaaatacagttgtaggtttaaagagtttatcacagaacaaacttataataagaaactatattttcaaaaattgtatcaatatctctaaactcccccaggacacactcacctgctctgggctctccactctcctcaggattcccaccccagagcttgctatatagtaggagacatgcaaacagagccaaacctctgctgatgaaaagcagcccagccctgaccctgcagctctgggagaggagccccagctccaggattcccaggtctttccatttagtcttcagggctgagcacagaggactcaccatggagtctgggctgagctgggttttccttgttgctattttgaaaggtgattcatggggaatgagttgaatgtaagtgaatatgagtgagagaaacagtggatgtgtgcggcagtttctgaccagggtgtctctgtgtttgcaggtgtccagtgtgaggtgcagctggtggagtctgggtgaggcttggtacagcctggagggtccctgagactctcctgtgcagcctctggattcaccttcagtagctcctggatgcactgggtctgccaggctccggagaaggggctggagtgggtggccgacataaagtgtgacggaagtgagaaatactatgtagactctgtgaagggccgattgaccatctccagagacaatgccaagaactccctctatctgcaagtgaacagcctgagagctgaggacatgaccgtgtattactgtgtgagaggcacagtgaggggaggtcagtgtgagcccagacacaaacctcctgcaggggcatctggagccacaagggggcgctcaggatacacagaggacaggggcagccccagggcaggtgcaggtggaggtcaagggctgctctccttcagggtctgtggcttcctctcatctaacagttccgcagggagcctcttgtatttacagtgatgtgctactgaggtttctaagtttgtaaagtttattactacaggaggaaccactatcaaacgcccttaaggcaggtgtcactaatggagaaaggaaagtgcacaggaggctgggtgaggctgtggacactgtctgcctatgattcaagtttcacaagcagtgacggagaaatgggagtttgatggagctccctaactaccatgtggtctaaactaagtccaactaagtccctgagctctgggtgcccatcagggatccgccatgtgcccggcagccgcgtgcctttttgtctcctctgcgcccaatcactgtctgtgatgagcttccaggatgtgtgtgtttggcacaaaccaggtgatggacgtcagacagcagcagctggtgcccggatcatgggctccctaatgctggaggaatgagaggtgcattctcagggacaagacattgttgatggatttttatgtagaaaccacgattttacttgcttctctcaggagacatagaagaagcaaccatgcagtcagcaaataattataatttccacaattaccccaaatggttaatccttaattctgcgcagggtcccaccgtagagtcacctttctcatgaggaatggttgaatctagaatgagtccacatgattttcatatttttggcttctgtccatgttcagagagttagagtagagtaagtttggacctttccacacactaagcctcacctcccccacagaaagagcagagacttcaactattcctgagtgtggggtaggggctggtcctgcacacctcagagcctgcagagactgccacgtgcagtgttatagacttgggtgttttctcattcaggaggggtgacctccacggcctccgatttctgctaagatataactgtgagtgcagaattaggacactattaggctatcatgcctcacttctattctgaaaatcaccctctttatagtaaaagaaaacaattcaatgtccatgcccctgaaagtcatttctttttaatttggttgcgagtttaccacatagtgcctgaatttattctcagaatctactgaattgtttataaatctcacaaattgaacaaaagtgaattcttcattcttactaaaatgtgtgtatgtaggaatttcagtgtgttttccagaagccatgcacaccaaccactgtgtttcatggtcatttattggcctggtgaggccctcacagaccccctccctcacctgtgctgtctctggattctccatcacaactagtgcttcctgctggagctggatccgccagtcctcagtcaagggagtggatcagggcataggtcacgagggagcacaaattctaacccactcctcatgagctcagtcaccatctccagatccacgtccaagaaccaaattttcttttagctgagttctgtgaccaacaatgccacaaccttgtattactgtgagaggaacagaagagatgtcagtgtgatcccagacacaaacttccctggagaggggcccaggaccaccaaagagcactcaggcccatgaaaacagggcccaagctggagaacgggtttcctgtcaccctcacctttcaccattagatactctacactatgcctatgctgaggtgtgtgtttaatataattagaaaatggtatttatatacgtgtataatcatatctagtgtaagaatttgtagtttccaccttatgtgaccattaaagacaacatctctcacgttattcaaggaccttataaagtataatacttttacataagatttatctccttttgtgtgtttctccttctgtctatattctctctctctcttcctccctctttctctctctctctccatctctctctctctgtctctctctcacacacaaatacacacacatgcaatcggtgacagtatataggctaattaagaatatattcccatatgatttaaaaataacagttttacaaatatttgcctttaatttttcaaagaaaattaaatccaaatgccagtgattttttatgtgacttttaaaatttaaattgttaatttgtgttttcatcaatgcttgtatgtgtgcttgtgtattctcacagattatgtggtgccttcacagaattaaacatgtgaaactctccacttgaatttctgtgactcaggactggtgagcaaaaagttagaagtcactctcctgatccttccctacagctgcagattcctgaaggtaatgacctcacagtagaccaaggccctcaaaggtgaccttgagttccagcacatcttgggaggccaagcggatgtttgtgaaagaaatagtggctatgtgacagtttctaaccagaatatctctgtgttttcaggtatccagggtgaggcccagcttacagagtctgggggagacttggtacactgagaggggcccctgaggctctcctgtgcagcctcttggttcaccttcagtatctatgagattcactgggtttgccaggcctcagggaaggggctggaatgggttgcagttatatggcgtagtgaaagtcatcaatacaatgcagactatgttaggggcagactcaccacttccagagacaacaccaagtacatgctgtacatgcaaatgaacagcctgagaacccagaacatggcagcatttaactgtgcaggaaacatcgtgatgggaagtccacgtgggctcagagacagactgccatgcaggacacagggggtggcttggctgaagggggcactcagcacccacagaagacaggagcagcccagggcaggggcaggtggagttcaagggctgctttcctgtcaggttctgtggcttcttctgcatcaaatgcgttctcctgggagcctctctatatttatggttctctgcctaccactgaggcctctggattggaaaagattactactagaaaaaaaaattctcatatacccctgaagaatacatcattaattgaggcagaagatgtcacaggaggccagggaggctgtggaaactgtgcgacgtggatgcacatctgacaacaaagacatgaaaaatcagggaacactgataaaacctcctaattatgccatggccctctctaagcctagtaaagccattgatgccttcctgggccaaacccacccatcaggggatcactcctgtgtcccagcagcagacatgccttagaatctccactgtatgtaatcactgtctgggaggagctcccagggcatgtgtctttgcattaaccaggtgatgggtgtcagagaacagcagctggatgcctggtctatgggttccctgatgttgaagaaatgggaggtgcagtctcagagccaatacactgtttatgcatttttatatagaaaccatgatttttcttgcttctctcagatgacatagaggatcaagaaaacagtctgtaaacaattgtaatgtccccatttcttctgaataaatgcattatttcttaattctgagtgggggtttgtcagaccatgcccttctcctaagcaattgttcaatccaggctgaaaccacatggggatcacatactttggtttggttcaggtgcagaggtcttcagtagagcaaatttggtccttcccacacagtaagcctcaccttcctcagagaaagagctgagattgatccaactttgtctgaggtgggagctgcttctccacaccttggagcttgcagagacccctaaatgcagctttattgagtcaggtgtgtctccatgtgggggacttctgctgctagtgatctctgctcagttctaaatgtgggttcagaattaggacacttaggttatcacgcctcaaaaattaccatcattgtagatagaaataatagtacaatgccaattgttgtcacttgtttcttattattattggagtataagtttgaagagacaaattgttaccatatatttgcataaatctaatgtcagaatctcttgaattgctcttgaacacttacaaactggttagaagcagattcttatttttttctatactagtgtattttgggatgtcaacattttgtccagaacatgtgagtaccaataactgtgtgtttcagaaatgactgtgagattcagtcatttctatcgagtgggaaaaccagttaactttgtctttgatatatggatggaagcccaagatagaggcttgtcagtcattgtttctgtgccttctcccttgggaatgtctgtatttttttatgctctgtcctgggtctataccccaatggttcccctactccatggcacctgcctgtgcctgtgcatgcccctgcccacactctccgtgaaacatctgctttggctcaggaagaacccctcctctgccttttttcctcctgcccctggtccacattcttctccatccacaggctctcagcagcacctcccatccacactaaccctacatggggtcataccttgtccaccacttcctctctcttttcttctgagctttgccttttattccaacagcctgtttccatctcacctggacttgtgtacaggaaaggatttaccgagcagtcttgggttgtgcaaaccctgaacattcctgaaaaagtgctttctcaagctaggcccatattcagctcctgggagatgatatctgcctttttggcatactcctcctggtagtattattaaaccacttgattaagataaggtttacatctgtaaaactacacattatttaacatacttaactcattgagtttggagtaagtatacatctgcaaagttatccccatcatcaaggtcataaccatagaaatcacttccaaaacattcctcttatctctcttaatattgtgattattttattagttaaaatgtatttttgtttgtgtttgtctgtgtctctgtgtgtgtagcctgggtgcacgctatactacctgttttcataatgacttatggtgaatgcctattagtgctcaagaggccggcgtctgagcactggaggtcaattgtgcaggtgtcacacacatctgtgatgggcccaataaacagccctgggcacaagcactcaggtgagcttccctggtggacaatgcttcacacatgttgtcatgcatcactgctgggagaactggggacaagagactcctcagggaaagaacacctgggagctcatgcctggattctcagggccttctccctggtgcctttgctcattttaattcatattcattcgctataataaagctgcacccatgagaataacagcttttcttgtgtcctttatttgtactgattaaggggcctgaggatggtcttgggacactcaacacaattacatcagagttggagaatgctagaaagttcctgattgctgacgcatggctagaggattttttataacatcaaaggatgagaaagtgcgggataaaagacattcaatgcccagatggctacagaatcatatggcatgagatggcatgtacactccaataaggagcaggaagtgaaagtaatccatggaatttagaaacaacagatacagcttcctaggagttgttccctgaaaaaggaaaagtaaaaataatgaggaacaacccgaatatgcaattcatatctgtgatagctaaaataatagtaaaaagatgcacatccagccctgcagtgtgccctgtgagccgaggctgctagactcccattcaccaccaaagggtacagttgtccagaaacaacacacaacacataagagtgacacagaaggtagcccagagtttgggctggggagaggaatccactagacaactataacaaggaggacagcatggaaagtggcatcattttgtgatatgattgatatcattaatttatatcatcggattgtgaacaaagttagccaatggactatgagagtgactgacgtagcagcttctctggcttcgtgtgctgcagatgagaggagaatgtttgggaggatgctggacccacagctcacaacagacatatgacagacgtagctgatcccaacctcaagtaggatgttcttgatgagacagcttccctggtgcactggatatcagatcctgtatagtttcagaacttgtgtagtttgtgttgctttggctttttctctggatcttttaggtgctaatgaaatgagagtgcttcacaaaaaaatggggcagacaaaggggatagttaagggcctcctccaagcaatgtggatatcataaaataaatgttaaaaaatgaaagaactaaacaagaaggtgctggggttgacacaaaggacttaaaacagcactaccaggagttgggtgcagcaatgggcatcccttcaggtccatcagcaagtcagagacctaaacaaatattccctattcatgttgaattggcagagtgtaaaaatctagaagacaaaatggccaggaaaaatgtgcgattttgcatgggtgaaggtctggcaagttaatcatcttgaggactgttgaggtcctgaggtggtcctgcccttgcttgatgcccaggccgtagtccaactcacacgaaattgccagggaatagacagtagtttttttagtagttcttgttatcaggcataagtgcatttgaattttctcttcatggcctttcctggcactatttctcattttttttaacacacatagtttcaactagatttatcaccttcacagggtcacagagaagggtggaagaagggaggccctggtatgggtctcgaagaaacatggaaaagagtggagagggacaatagcagggtgtaaggaattattgagaccttactctgcccctcccaggaggctcaggccagcctttttctgcatttgaggttctgggttataaacgctgtagactcctcccttcagggcagggtgacaactatgcaaatgcaagtgggggcctccccacttaaacccagggctcccctccacagtgagtctccctcactgcccagctgggatctcagggcttcattttctgtcctccaccatcatggggtcaaccgccatcctcgccctcctcctggctgttctccaaggtcagtcctgccgagggcttgaggtcacagaggagaacgggtggaaaggagcccctgattcaaattttgtgtctcccccacaggagtctgtgccgaggtgcagctggtgcagtctggagcagaggtgaaaaagcccggggagtctctgaagatctcctgtaagggttctggatacagctttaccagctactggatcggctgggtgcgccagatgcccgggaaaggcctggagtggatggggatcatctatcctggtgactctgataccagatacagcccgtccttccaaggccaggtcaccatctcagccgacaagtccatcagcaccgcctacctgcagtggagcagcctgaaggcctcggacaccgccatgtattactgtgcgagacacacagtgagagaaaccagccccgagcccgtctaaaaccctccacaccgcaggtgcagaatgagctgctagagactcactccccaggggcctctctattcatctggggaggaaacactggctgtttgtgtcctcaggagcaagaaccagagaacaatgtgggagggttcccagcccctaaggcaactgtataggggacctgaccatgggaggtggattctctgacggggctcttgtgtgttctacaaggttgttcatggtgtatattagatggttaacatcaaaaggctgcctaacaggcacctctccaatatgacagtattttaattagtgaaaattttacacagttcatcattgcttgcttgccttcctccctcctgtccactctcactcactccttcttttattttctacttaattttacaaaatcatttaacccctttttgaactattaataggttatctttgtttggtgattgttttcctttcaataatatgtactgaataattcatctttgtgccaattcataagtattctggtgtaataaagacttctttcataaaaattggataaattaaaataaagataaatttttaaaaacatacgatctatcaaaactgaaccataaagaaataaaaactctgggttgggtgtgtttgctcattcctgtaatcccagcactttgggaggccatggccggtggatcacctgaggtcaggagttcgatatcggtctggcaaacgtggagaaacgctgtctccactaaaaatacaaaaattagctggacatggtggtgctcgcctgtagtcccagatacttgggagcctaaggccagagaagagattgaacccgggaggcagaggttgaaataagccgaaatctagccactgcattccagactgggcaacagagtgagactccatcccgaaaaaaaaaaactgaacagacctatgagtaaagagattgagtcagtgatttttcaaacatctcaaatcaaagaaaagtcaagaacttcatggcttcactactgaattttatcaaaaatttaaaaaaaaactagaatctctatacaaatttccaacaaaataaagaggaaaaaatacatgcaagcttattttggaaggtcctatttccaaagcaaggaaaagacactccaaataaataaaattacaggctaatatccctgattatctagtttcaaaaactctcaagggtggtgagaaaccaaattcaacagcacattaacaacagaattcaccatgatcaggtgtggtttatctctaggaagcaatgaagtttcaacctgcagaaataaatgtgatatatcaaatgaaaatattgaaggactaaaaccatatgcaccatatgtccatgtcaatagatgcagaaagagcctctgtcgaaatccactacactctaatttttaaaaatctgaacatattatgcataaaacatatatacctcaacataataaagaccacatatcacaagcccacatctaacatcatacacagtgatgaaaattttattttcctctaagactagaaactagacaagatgcttcactatcaccaatattattaaacacagcactgggtggtctagacaaaacaggccagaagaaaaaaatagaagtcatccatatagtaatgaataaatataaaatatatttttacatattacatgctcttatttatacaaagccttaaacactccaccaaaaaagattgaaactaatgaagaaattcaataaagttgcagaatccaaaatcaaacttacatttcaagatggcaggttagaggcattgctagtattcctcttccacttggaaggacaaactgatgtggagagatgaacatcgcggacttattttcaagaagcaatgcaggaactgaacagaaacactgaaataatctacaaactttctgaaaaagcaggaagctgcagcctacactgtgagtcaggtgaagggctgggagtccccagcatttgagggagaacagccaaaaatttcagccagtggtcccaagttgaaagtagctctcaacaggggtgtgtaatataacctagggttgggacgaactcccttggccagggcctgggtagggaagtgttaaaagtggtctctgcaagtttaggagccatgggtgcaggagctggtgccctgctttgcagcagacaggaaggggcatggcatgaaacccatggctgcagtctccatggggacagcctatgactcctggcatttggaggtattgatcacagattgactgaaactcatctcactgctgccagtggaacaccacgggagtggatcagcctcaccaagtatgtgggaactgtgtggggcctaccaccacctgccactccccaccccctgcccaaacttctgtggaggagaggcagccatggtcccatctggaacatcatcccagtggcctgagaaccacccctgtcccccacacccacaggggctgctgcttgccctgcatacagagactcagaggggaaacccacctggcccaaccctcaccttgctttgtgcagccacctgccctggcagcttaacacaaaagacagcatcttttgggagctacatagccacacccactgcctaagaatccatagtagcccccatacctgggcaacacaaggcttgcaaaaatcccaccgctaataatgcagctggtgctcttttgcaagcaccacctcttagctggaggccaaccaactatgcattacagcatctcctagtagactaacactgcatcctggaaggagaaaatgactgtgcgatctcagttatcaccatggcctgcaccactttggatgaccaggagatcctgagtctctccatgtgaccagttcattgctactatacccatcattcaagaaagccagtacacaaaggctatcaatatccatggaatttcacagagtctccttcactctcctgcctgccactcccatcagacccggttctgctgttcactgttgaaaaatatgaggacagttcacatcactggatcacttagagacatttgcccacaccagcctgaagtgtgtcaacgtcactgggcagctagacctagagaagaaacataactcacagtaccatggctcccaggttctcctcctcttaggggaagggagtgcaccacattgagggaacacctcatgggacaagagaatctggatggcaggccttggacaccagatccctccactggtgggaaacttcttctagcagaagtacagttgcagcactgggctcagctgggaaagtcttcagctctttctcaacagacagccctgttgcttgtgaagaatcttgaagaagaggaagcctttcccccttgtacaccactgtaggcacacttggggtctctcccacaagacctcagcatgggtgcaactatagacagcctttctggaacacatcattgtgactgcatcccccagaaacagcactttctggattcaggcttgcatgagacagagagtcacagttcctctctatttggcacatgaacatttgtacagatgaaaaaacatgcctgtcttatctgaatagccggaatactgggacagcagtatgtctgagaggtggataaatttcctactgacttgacaagagagctgaggtggttccaacccttcccaccgataagacctcagtgggactcactaaaacctctttcagccaactctgtcaaggctgggacttaatttacccacctgctttagccacaactagtttctacccaaggaaaagtcctccactgatgtgaagcttgagccatcaagcaaataaataaatcactggggacaaataaaataaacatgtgcatgccacagaggaatgagataaggtttaagagacctctaccattctaaccccatagaagacagtgaacttgctcacagaccgagcagatttctactgcaatcaacacataggaaagccatcatacaaagattctccataaccccggaactcttacagagtcttcacccctctaaggaccaaaaaccaaatcaggttgtaattaattataagcattaaagtctcattcttaagggaaaaaaatccatttaaaaacaaacacaagaaacagtcaaatcaaacataaattcaataataattagaaaatctaccaaaatgagaggaaatgagaaaaataactggggaaaaatgagaaaacagggtgctgtgccagtgccaaaaggtcacaaggtcacactacctctccagcaataaaccataacaaaaatggagtctttgaaatatcagaaaagaaaatcagaatgttgattgataagctactcaagaagatatcagaaaaaggcaaaaatcataataaataaatttataaaactgttgagaatatgaatacaaatttttacagagagatagacatcctaaagagaaaccaatcagaactcctgaaaatttaaaaaaatgcagggaattggaaagggaattacaaaatgccatggaaagtttgaaaaatagactagaaaaaagtagcagaaataacaatagactagaaacagtacaaaataaaagtagaagtaaaatattcgaggaaaaagaaaaaggaaacagttaaagaaaaaagtagaaagaccagactattattgaaataaccaaatcagagaaaaataaatttaaaaagagccaaaagaagtgaaaaaagtctccaggaaatatgggattatgtaaaacaaacaaatttaagaataattggtgctcctgaagaagaaaaaataataataagtttgggaaaacttctctgaaggaataattgagaactacttctctggcctgactaaagacctagatatccaaatccaaaaagttcaaggaactcctggggaattcattgcaaaaataccttcaccaagcatacagtcatcaggctacctaaagtctacatgaaggaaataattctaagagcagtaaaacgaagaaacccatcagaataatggcagacgtctcagcagaaacttgacaagcaagacagattagggttctattttcaaactccttaaacagaaaaactttcaaccaagaattcttttttatcccgccaaactgttttataaataaaaaagaaataaagtcattttcagaaaaacaaatgctgagggaattcatcactatcaaaccagcactacaagaaatgctagaataagttctaaaccttgaaacaaaaggccaatatgcacaaaaatggaacctcttaaaaattaaaaactcacggggcctataaaacaataacacaatatcaaagaataaacaaaattaggtaacgacatgacaaagagaatagcaactcatatctaaatattcacattgaatgtaaatcataaaaggcatggaagaaggaatttcacaaaaatagaaaccaggagtgagcaggactagctatttttgatctcagacaaaacaggacttcaaagcaaaaacaatttaaaaagacatagatgatcactatacaatgataaaaggatcaattcaacaaaaaattacaattacatatttatatgcaccaaacactggaggaactagattcattaaacaagtactgctagacctaaaaaactgagagagttagcaaaacaatcataatgggagattttagtacaatcatgacagtactaaacagatcttcgagacaaaaagtcaacagataaacaatgcacttaaatgactcactggaacaaatggatgcagcagatatttacagaacattctatccaagatctgcagaatatacattcttctaatcagcacatgcaacattctccaaggtagagcatatactaggccacaaaacaagtctcaataaatttttaaaacaatgaaatcatatcaagtatcttctcagaccacagcagaataaaactaaaaatcatctcgctaaagaactgtcgaaaatgaacaaatacatagaaattaagaaatttgcttctgaataatatctgggttaacagttacatcaagatgaaaatttaaaaattatcttaattaaattataataatgagacaagttattgaaacctcaaaaataaaggaaaagcagtgataagaggaaagtttatagtgccagctgcctgcatcaaaaagtctgaaagagcacaaattcacaacctaatgtcacaccttgagaaattggagaaacaagaacaaactaaacatagagccagaagaagaaaagaaataacaaagatcagagcagaactaaatgcaatccaaacaaaaaaaagcaatgaaacaaacagttggttatttgaaaaaataaacaaattcatgggtcattagctagattaacaaagaaaagaatatcaaagatccaaataagctcagaaatgaaacgagacattacaatctacaccactaatataaaaaataatttgagactactaagttcaccttcatgtgcacaatgtagaagacttagaggaaatggaaaaatttctagaaacatacaacactcctagattaaataaaaaagaaacagttactttgaatagacaaataacaaacagtgagattgaatcagtaattcaagaattgccaacaataacaacaatgaaatagggccaggtgaattcacagctgaattctatcaaaaaatttaaagaagaattgctgccaattttgctgcaactattttttaaatttagataaaaaagaatcctccctaaattattctatgaagctagtataaccaagataccaaaaccaggaaaacacacacacacagacacacacacactctacagatgaatttccctgataaatatagatgcaaaaatagcaaaaaaaaaaatagctagttgagttcaacagcacatcaaaaagataattcctcatgatcaagcgtgtttcatctcagaattgcagggattatttgaacatactcaagtcaataaatgtaatacatcacataaacagaattacaaataaaaaccttacgattgtctcaatagatgcagaaaaagcattcaacaaaattcagcattttttaatgataaaaactgtaaataaatgaggcatagaagaaacctgcctcaaactaataaaagttacatatgaaaaatccacagctaatatcatgctgaatgtgaaaaagttaaaagcatttaccctgagaacacaaacaatacaaggatgcccaagttcaccaattctattcaacatagttctggaagttctagccagagcaattagtcaggagaaaaaaaataagggtatccaaatttaaaaagagaacgtcagactatcactgtttacagatcaagggattatatatattaaaaccctagactcctccaaaatactaatagttttagtaaatgaattcagttaagtctcagattacaaaatacatgtacacaaattagtagcacggctatatatcaacaacagcaatgctgagagttaaatcaagaactccatcccttttacagaagctgcgaaaagatagtatatttaccaatatacttaaccaaaagggtaaaagatctcaacaaggagaactacacaacactgctgaaagaaatcatagatgatacaaacaaatgcaaatgcatcccctgatcatggattgcaagaatcgctattgtgaaaatgaccataatgcctaaagcaatctacagaatcaatgaaattcttattaaaataccaacattattttcttcagaattcaaaaataataacgctgaaatttatttgaaaccaaaaaaaagccaaaatacccaaagaaatcctaataagataaagaaaattggagccatcacattactgaacttcatattacaccacaaggctgcagttaccaaaacaacatggcactgacataatagtaggctcatagaccactggaacaaaatagagaacccagaaataaagccacatatgtaaatccaactgatgctttgcaaaatgtaccaaattttaaattgaaaaatagacaccacatttaacaaatggtacaagaaaaactagcaagccacatgtaaaagaataaaactggatttctatctgtcaccatataaaagaccaactcaagatgaatcaggtactgaaatataagacattaaactcaaaaattctagaaaacaatattggaaaaacacttttagacatcagggtaggcaaagaatttataactaagaccccaaaagcaaatgcagcaaaaacaaaactaaatttatggaacccatttaaactaaagtgtttcttcacagcacaactaagagtcaatggagtaaaaagacaactcacagaacgggagaaaatatgtgcaaacttcacatctgacaaaaaattggtatattcagaatctacaaaatactaaaacaagtcgccaagaaaaaacaaacgatcccatttgaaagtggacaagggacataaatagatagttctcagaagaagatatacaaatggccaacaaacatatgaaaaactgtgtaacatcactaatcatcaggaaaatacaaattaaaaccacaatctaataacacctaatcctgcaagaatggccactataaaaagtcaaaaaacaaaagggaatgcttatacactgttgatgaaaatgtaatttagtataaccactatggaaaacactattgagatttcttgaaaagcagaaaggtagatctactattttttttttcttttttgagatggagtctctctcagtcacccaggctggagtgcagtggtgcaatctcatctcattgcaacctccgcctcccgtgtcaagtgatgctcccacctcagcctccggagtatctgggattacaggcacccaccatcatgcctggctaattgttttttgaatttttgtagagaaggggtttccccatgttggccaggctggtctccaactcctgacctcagctgatcctccccgctcggcagcccaaattactgaaattacaggcgtgcagcatcacacctggccagatctactgtttgatccagcaatctcattactggagagctacccaaaggaaataaagtcattatatgaaaaagacgtgtatatgtatgtttatagcagcagaattcaaaattgaaaatatgtgaaaccaatttaaatgcccattggccaatgagttcagaaagaaaatgtgacatcgcctgtaatcccagcatttcgggaggccgaagagggcggatcacgaggtcaggagatcgacaccatcctggccaacatggtgaaatcccgtctctactaaaaatacaaaaaatttgccggacctgttggcgtgcacctggagtcccagctactcgggaggctgaggcaggagaattgcttgaacccgggaggcagaggctgcagtgaaccgagattgcagcactgcactccagcctgggtgacagagcaagactctgcctcaaaaaaaaaaaaaaaaaaagaaaagaaaagaaaaagaaaatttgacatatatacatcatggaatactaccaagccgttaaagggaatggcataatgtcctttgcagcaacttggatgaagctggaggtaatgagtataagtgaagttacacaggagtagaaaagcaaaaactgtgtttgcacacttacaagtgggagatgggctatgaacttgcaaaggcatacagagtgatataagggactttggagactcagaagggaaagaataggatggatactagagagaaaataactacactttaggtagagtgtacactattcaggtgatgaatgtactaaaatctcagaatttattgctatataattcctccatctaacaaaaaaatatttacccccaaagctattgaaattaaacaaaaatcaacctacaaaaataagcatcttctgtatacactaaaaaatgattattcaaaattaaaatcaagaaaataaatctaaatacaacagcttaaaattcataaaataaattttaccaaaataaatttaacaaggatacaaaatatctgcacattgaaaattataatatattgattaaaatgtaagaaaacacaaataaatggaaggctatcttgtgttcttgtgttactggaacatacattgttaatatgtccatcctaacctaagcatttacagattcaatgcaatcccattcaaaatttcaaagatatgcatttacataaattgaaaaaaaaaacctctctcatttgaatggctggggtgattgacccggactatcaatttgaaatcagactactactccacaatggaggtgagacagagtatgtctggaatacaggagatttcttaggacatctcttagtattactttgccatgggattaagatcaatgggaaaaaacaacctaattcaggcaggaatacaaatggcccagatacttcagaaataaaagtttgggtcttcacccagattaaaaatcctgaccagccaaggtacttgctgaaggcaaaacaaatacagaatgggtagtggaagaaggtagttgtcaataccaggaatgaccacacgaccagaagtggggaccgtaattgtcgtgagtatctccttaagctgataagcaacttcagcaaagtctcaggatattttctccatatcttgttaggaatatatttctgcatgtgtataactgtactaagaaaatatcttcattgtgccggacacggtggctcacacctgtaatcccagcaatttaggaagccaaggtgggtggattacctgaggtctagaggtcgagaccagcttgaccagtatggtgaaacgccgtctctaccaaaaatacaaaaattagcctggcatggtggcaggtgcctgtaatcccaggcttctcagaaggctgagacaggagaatagcttgaaccctgaacccgcgaggcagaggtggcagtgagccaagattgcaccactgcactccagcctgggcaacagactgagactccatctaaaaaacaaacaaacaaacaaaaatatattaattgttttcattgaatttgttttctttttatcatgtgtcacaagatttattgacttcctatcagcatttaaatgttgttaactatatgtagtggtatgtatgtaggttaaggattagtgcactttcagttgtatgaaggatagctgtattatgttaggcataattatgaccttattattgtctttatttggagttcaagcatgattgcagctagatgtgtaggggtgctaagttgacaagaggtgggcttttgatgcttgatactaggtgtcaacttgattggattaaaggatgcctacgtggctgggaagtattgtttcttggtgtgtctctgggggttttgccagaggaggctgacatttgagtcaatggactggaaatttgagtttgtcatgttgcatgatccttttaaagtcttatagaacttagttgactattattttggtgtagttcatttgtataaatatttctttgaagtttaattttcttcctttgcgtttgtctgtcactggcaacacggtaattgtagccttttagaaatagcttagaaggttggcgactcatcattttttaaaaaagttagagaacagttggcatgacttttttaaattctgagagccattttttatctaacatataggctatcatgaagaatatttatagtgtgcttgagaagcatgcgtattacactgcgcttggttggaatgttctgtagatgtctattaggtcagtttgttcaatagtgttgtttaagtccatgggcttcctaagaatttttttatgggtgttctatacattattgagggtgaggtgttgaagtctcctcctttcttattgttttctatttctcacttcatatctcttaaactcttgttaatgcggttatatttctatttttataactatgtaaaatagaaataaaataataattgcttagtaattttaatgggaaaatcacataataagaaattatattttcccaaatgctgccatcaccactaaactcctccaggagtctcacatctgctctgggctctgctctctcctaaggggtcccacatcagagtttgctacagaggaggagacaagaaaatagggccctccctctcctgatgaaaaccagccctgccctgaccctgcaactctgggagaagatctctagtccagaattaccaggagtttggatttgatgatcagctctgtacaaacatggctcaccatagagttagggctgagctgggtttcccttgtcattattttaaaaggcgaataatggagaacttgagatatggagtgtgagtggatatgagtgaaaaaacagtgattctgtgtggcaggttctgactcagatgtctctgtgcttgtaggtgtctagtgtggggtgcagatggtggagtcttggggagagttggcacaagctgaatgtgcctgagactctgccgtgcatcctctgaatccaccttctgtagctactagatcagctgaatctgccaggctccaggaaaggggctgcagtgagtagtagatataatgtacgatggaagtcagacataatatgcagactctgtgaaggtcagattcaccatctccaaagacaatgccaagcacaggttgtatctgcaaatgaacagtctgagagctgagaatatggctctgtattattgagtcaaaggtaccaaatgaagggacatcagtgtgaacccagacacaaaatttcctgcagggaggagggaggaggctgggctgcagtgggcactcagcacacacaaaaggcagggacagttccaggggcaggtacaggtgcaggtgaaggcaaaggtctactttccttccagatctgtggattcctctgcatccaacagttcgcctgggcctctgtctttatggatctgcgcctaccactgatgtctctgggttagtaaagtttgctactataggaggaaacattgtcatttgtcagaaaggcgaataatggagaacaaaagatattgagtgtgagtggatatgagtgaaaaaacagtgattatgtgtggcaggttctgaccaaaatgtctctgtgtttgtaagtgtctagtgtgaggtgcaggtggtggagtgtaggggagaggcaagaggcagaaaagcgcgcaggaggccgggtgaggctgtagacattgtcagctcactatgccaatctcacaacagtgctggagaaggtgggagtctgatggagcttcccaacaaccctgtggtctaagctaagtccattaaggccgctggttcctcctggaacatagctgtccatcaggaatcccccatgtgcccagcagcagccacgcgttagcatcttcactgtgcacagtcattgtttgggaggagctccaggatgggtctctttgtcaaaaaccgggtgatggtgtcagagagctgtgccgggtgcctggtccaggggctccctgacgttggaggtataggaggtgcgttctcagggtgggaacaccttttatggaaatgtacagaagaaaacatgattttccttggtcctctcagatgacatggagaagaaagcgcgcagcttgcaaacaattgtaatgtccttgtaatttcctactttatcccaagttcattgattcttgtaaaccttggtttctgtccaagtacagagatattgattagagtgagtttggttctttccacacactaaccctcacctcccccagataaagagcacattgtccttactctgagtctgagggaggagctgttcctgtacaactaagggcctgcagagacccccatgtacagctttgcagagtcagatctttccacatgtgaggcgacctccacggcccatgattgctgctcaggtctaattgtggattcaggattaggacatcctttaggctatcacaggtcaatcagattctgaaaaatcactgttatcatagacagaggtaataattcaatacccactcccctgacagcagattctctttcttatttggttgaaagtttgaagaaaataagtgaccatttattattcttattctaactttagtatccactatttgttctaggggattcacaaatttcaaaacactgagctcttcattctcatgaaaatgtgcatatttgtgaatttcaacgtgttgttcagaacctgtgcatgccgacatctgtatttctcgtgcgttcttggcctggcgaagccctcacagaccctctccctcatctgtgctgtctctgcttctccatcacaaccagtgcttcctgctggagctggatccctcagctccccagggaagggactggagtgaatcaggtgcacaggtcatgagggagaacacaacgcaacccacgcctcaagagtccagtcaccatctccagatccacatccaaaacacagtttcttctacagctgagctacctgagcaacgagtacacaaccatgaatttttacacaaaagatacagcaaggggaagtcattgtgagcccagaaacaaacctccctgcagggaagctcaggaactgcgggaggccctcgggacaccagggggcgctcaggacacacatcaaggcaggtgcaagaggaaaaggtgctggagatggggtttggcatcatcatcatatttcactgacacccgccactgtgtttattctcatgtacgtgattctttgtattattagaaaatggcgtttatgtaaataaataaccatatgtaggtgcatcaagtcgtcctctcccttttttttttttttttttttttggagtcctgctctgtcacccaggttggagtgcagtggcgcgatctcggttcactccaacctccgcctcccgagttcaagcgattctcctgactcagcctcccgagtagctggaattacaggtgtgcaccaccgcgcccggctaagttttgtatttttagtagagaccggatttcgccatattggccaggctggcctcaaactcatgatctcagttgatccgcccgccttggcctcccacagtgctgggattacaggtgtgagccaccgcgcccggcccgtcctctccatcttatgtggaacttttccattaagactctgagtccctggatttatttgagaacctcataaatcatggtcaattatgtctctttctcctctttctcccttcttcactcctctctagctcacaaactgaaacacacacagaattttctaacttcaattacctgatgtgttgaagacaattgattaaagcgcagcttttccagttcagccactgttcatattgttgtaagaataagaacgttgtgtttctcagctgcgtgcttctctaagatgagtagcagcttttttaaataatacccagaggctgaaagcaatctgaataccaatcatcagcttaatcagtaaacacaaggtggtaaattcgctcactggaaaaacaccgattgttacaatcaggtaaggctggatactctcaacagcaagtgtaaattcacaagtatatatgctgattaaaataagacaaacaaatacaagtacatacatactgttccacttttacaaattctataaaatgaatgctaatctaaagttacataaagaaaaccagtagctgactctggacctggtgtgaggagggaagggttaggaaccagaaattgtaggaaatgaagaagaaatgctgaaggtagtggagttttttctatgttgatgaaggtaatagttatgtcactattaatcaaatcgtacacattatgggatgcctattatttgtgaatttcaccctattaaaatattacaagttaaaacaagtataattttgtagaaaattagttagacatagatgaataaaatgtatgataaataaaaaaagaaaatcacagaacaatagcataaggacttcactcatcaaactgaagaaattttaaatttctcaacacagaattaaagatttaattagatatacataagaaatcaaagactcctggatatacacacaaataaaccctaagtccacctgtatttttagggaaacgctagaatacaagaaaataatgtcatgatttcattacataacgggggttaatgaaaccacatcaggcatgtccagctgtgtcctggggttggttcagggaacgggtgtgtcctgtggttaggagacgtggcaacaagctcacagcatcagttctagctgacaccataaaaaggccaagagatcacaattaaaatgtcatgcggatgtcacatctgtgggtgcggcacactcccccatgtgaatacggaaaggttaactacactcttcaggtgtctgctgagagtagagctgtctctcaggaatgtccaaaatggctcaatagagcaagaaaggagactggctcagggttcctgtagtgccttggtggtgtgggcagagtgagggttctcactcaagaaaggagtttgtggcgtttgaacatctacatggcttcaaatagggtaactcctgtgattcctaactagattcacctcgtgtgggaaagaaaggagatgatgaaggaatgagccttaagttatcagcagtcagacatcaaaacaatagtctgatgacttattctatgtagcacctataaaaatcgttccgggcgcggtggcccaaacctgtcatcccagccttttgggaggctgaggcgggtggatcatgaggtcaggagttcaagaccagcctgaccaatatggtgaaaccccgtctctactaaaaatatttaagaaaaaaaatagttgggttatggtggtgggcgcctgtaatcccagctactcaggaggctgaggcaggagaatagcttgatcccagggggcgtaggttgtagtgagctgagatcacaccactgcactgcagcctgggtgacagagcaagactccgtctcaaaaaaaaaaaaagagtaaaaaaatatcagcccaagatgggtggacaacaaccaggcctacaaaaaaggagaagactccttataagaataagcaaatcataatgaaaattaggaggaaaacaaggagagtgaggtgaaaggcatggggcaggggattagacaagggtcctgttccaatgtcttgtgtggagacttttcactatctaaaatcatccacctattctgaatgtcttaggtgaactgtctgctccaaaacatcagaaccaccagaggatttttgaggatactcagtttaatatcttatatttgaggtgccttacaactgtgtaaaatgcttagttattatcagtgtaattagagatagggcctcactgtgtcacacaggttggggttcagtggcacaatcatagctcactgttaccttgaacttctggcccacataatccttctgtctcagcctcctgagtagcatggactagagaggtgcaccaccacacacagctgatttaaaaaaaattgtttcatagaaatggggtctctctatgttgcccaggctggtcttgaactcctggtctcacgtgattccccctggttttgtttctcaaagtggtggaattaaaggcatgagccaccgtatctgctcagaaatgattattttgttgcaaaatactaacccaagaattgactccctgaattttctctgcagcattttggttaatagtgtctgataagatttatttcaatagtttcaacagcagagtgttctcctgatgtttcctccaatagtgataatttcatggttgaagatcacaaactactattaaaagatgacataaaaaggcaaccttaaacttttggtgatggagtgagtataataaaaaattactttcaatattgtgtaacacacgcctgcagtaggaggaaggtgagcaatgagggtaaaatttctaaacgtatgaatcttccagctccccagtcatagggcagtaactgatgagtcctgagagagggaacgtaatgccgtagtgcttgtgggataactcttggccaagagagtttccatattttattaaagtggttataatttttaaatttaaagatgccattttttcaacatatccagaatattgtgagcgggattgattctgtatgatacgagcaatggcgatgccttctgtttggataatattacaaaccaggttaagactgagtggtgtaacgatgcaccagaacattattctagcttccatactagattttgtttttctctttgtttgcattagtttcaaatttatatgtaaggtctctagaatgtaggagtttatttgaaagtgtcttttcttgttggccattttgatggggcttccaggagatttaaaaacctcctctgcctgcagcacagtttaaaattctgcgttacagtagaacatctgtatttaatcctggtctttggttgattgacaagctctaatacatgcaataacttctgccttctgggctggttttacatcaggtagaggaatatatactaagtgaaaatttgcactagtaatatatattattaataaccaccacttgtattatttaagtgttattaatcaagaattaatgttaaatcaagggtctcaatggcaatattacctaagggatatacaagatattttgctaatctaggtaaaatagatgtgaacacactcttagtatccagccatgtctcctgtctatcacattattaaccacacagtaaattcacttgggacttgttctaattatctaattagtcacttacttatctcaaagcctctggattattatgtgtgactattttagcagagagtgaagaaagacaacccaggctgaccaaacaatgaggaaaatcacaacctgatgaaaccagaaacctggatgtgagtggctccaggattgaataatttgacagctcatgtgcccaggctgtttcttgtctcagttttccacactgatacatccagaaaggcagcttcaccccccagaggactcccatcatgctgtgacatggtgacaacattcccaaagctcacacacatatgttaaatattggctggaaaaggggcagagacatttctggaattctcttctgaaggaccatgaatgcctcaaccaaccatctcccctgcctccatgactagaaatgcaccacgtgcccacacggatattcatccctcatggggataagactccattgatgaggctgactattttatcatataaaattactaaagactgatttaagggtttcaaaaactaattgaactctgttgttctatgtccaccagagattacaaatcttccaatgatgccttctttgttttttgtctgcttgactttgtctcttcaacttgttctgtaccccagagaatctctttcagctccctcaggtgcattcaattgttttatttaactgacaatttctaaatcagttaaagacattacgctaaagactccatattcctaggtccatattcctttttccatattcctaggaaggcattgtgacccagagtctgggcatgaccttgtgagtgttcctgaccctcctccatatgagatgctggtctgggtgttcttgcccctttccctggggtagagtcctcctgttttccccaggtgctccctcccacagctctagtgttctcaatcagtgtcatcaccttccagatcttctgccctgccctgcagactaaggctctgattccataagcaagataggggagctgctcctcaatagatctttggtgaggatctctgttcccatctcaattcctgtagggtggaaccagtgttcctaggattctggtttcagtagcttgtccctgcagagtaaattcttagttctgtagggggattaagggagttgggtctgaatacattttagatgtcgaggatcttgttctctcccagaaagacacttcgggaaagtaagactttggtaactgtcccctttcttggggaaagggattcaagaggataggttgcttttgggcatgtggtcccttaaaatttcacactaaaaagcgtttcccacactcaatttcaagcagcccaatatatatttgtattttttcttggaacagacaatattttatattccagactctgccttaggtaatttcaaaccctggctttgttactctctacaagaaattgcttctccataagcttcagatttgttgtgtgttttgaaattttatcagaaatattaaagaaaattggcaaaattccatcctccatgtttatctgttattgttgatgcagttgtaaaaaataagaaaaatatattccttttttctgtacatttccaagcttagtagcaaatttttagtaacacccagaataataaaaaattcaaatattgtttagctgcttaataggaaaacaaattatagtaaatttgtttgctagaatgctacccagcatttataataagtaaacatttgatatacccaactacaaggtaaaatatccatttatgctaactaaaataagccaaacaaatgagaatatatactgttatttcatttttataaattctgaaaaattaaaatgaatttgcagcaatgtaaagatcagtagttgccagggaaatggtagaagaaagaaaggaaaaggagaaagaatacagaagaacaaaaggaaatgttaagaattctcttgtccaacttgataaggatgacggttacatcatttttatcaactgtaatctttaaatatgtgaaagtttattatctgtaaactaaacgttataaactttattacaagcaaaaattgaaagttagacaagaaggagtgatagaaagagaaaatgtatattaaatttcagaaatatttaagaatgtatctgcctgaaccctagttctcaccatatctttaggtgaatgctaaaatgcagcaaaatcacgcatgttctcactacagaaagtgggttctacaaaccacactcggcacatttagctttgtcctggagttggtgcagggagttattggggccagtgatgaggagcacaggccaagataccagcgattacttatcccaaacatgagctctaacatacacacttagtcccttttccgtgtgtggtttacttccacatctgtacatggagagaccactgactgacaaaatataatttatacaaatatgtaaaattaaatagggtgatcagttcaaggtgtttatcacagcataattttacaataagacagcatatttcccaaataccatcattgtcaccaaactccttcaaggcacagtcatcttatctgggccccgtcctctcctcaggtgtcccaccccagagcttggtatatagtaggagacatgcaaataaggccctccctctgctgatgaaaatgagcccagccctgaccctgcagctctgggagaggagccccagccgtgagattcccaggagtttccacttggtgatcagcactgaacacagaccaccaaccatggagtttgggcttagctgggttttccttgttgctattttaaaaggtaattcatggtgtactagagatactgagtgtgaggggacatgagtggtagaaacagtggatatgtgtggcagtttctgaccttggtgtttctgtgtttgcaggtgtccaatgtgaggtgcagctggtggagtctgggggaggcttggtacagccagggcggtccctgagactctcctgtacagcttctggattcacctttggtgattatgctatgagctggttccgccaggctccagggaaggggctggagtgggtaggtttcattagaagcaaagcttatggtgggacaacagaatacgccgcgtctgtgaaaggcagattcaccatctcaagagatgattccaaaagcatcgcctatctgcaaatgaacagcctgaaaaccgaggacacagccgtgtattactgtactagagacacagtgaggggaggtcaatgtgagcccagacacaaacctccctgcaggggcgcacagagccaccagggggcgctagggaccgcctgagtacgggacaggtcccaggagcaggtgcagggggaggtttcctttttccttggctggaaaagtcacctttatcttcccagggctcgagccttctaggctgtgatattttattacttgtatttactgttcatttattatcattagtttttaaattttggtaatttttacaactctatggatatatttttaagtgtatactttcaagaaataaacattcctaattatttgcactgattctcccagagttttattaacatttgttgacatcagcaactacatagctatagggacaaacacttttaacgatagacagttgtttaggcctgaaaccccgtttatactaaaaatttacaaaaattagcctggcgtggtgaagggcgcctgtaatcccagctactcgggaggctgagcaaggagaattgcttgaatccgggaagcggaagtcacagtgagtggagtggactgccactacactccagcctggcgacagagcgagactttgtatgaaagaaagaaaagaaaaggaagaaaggaagaaaggaaggaaggaaggaaggaaggaaggaaggaaggaaggaaggaaggaaggaaaagagagaaagagagaggaaggaaggaaggaaggaaggaaggaaggaaggaaggaaggaaaagagagaaagaaagagagaggaaggaaggaaggaagaaaggaaggaaggaagaaaagaaggaaagaaagaaaaaagatatataaacacgcagacctatgcatataaccatagggatttatattaaacattacaataaaataattctaaaaatgtgtcctaaggaatcaaacataatgatgaagtaaatataaatgttagagtaatttataattgatttgttatttttaatcgtttacatgaatttatttctatttgttcatttaaaagtagtatattggtcatttcaagagagctaacagtaaatttcagatgttgttgttacgatatatgataagaatttgaggtggtgaatgataattatcttatttctcaattatcttagttattccatattgtattcacaaatcataacattgcttcttaccttataaatataaacaaccataatttgtgaaattacaataattttctttattttaattttttaatttatcccagatcattatctttttcttcgcttccagatctcactggatcatctcgagggcccatcctcacccctgtctcccgaagacttctggagaggctgcaggacgggcagaaggaggagccccgtgtgagtccacacgacctggagcctccctctccttggattaggccatctcctcgggatcacagggctcttcattatccttaccccgctgttgtaccaaacaagcaacatcacacttcaattcatcagggtttgctttaattttctaaatcatcgtgaaggtgataattttaacagtaacgtatcacaaccaaataggataagcccttttccatggaacagggtttcttatcaggatatacatgtattatggattctcaatttatttgtagatgagatgctattatctccatattgtagatgattctgctaagtcatctcttaaaattaatttttccaaagactcaaacaaataaatgatataattacaaatttcaggtgtaatagctgagccaacattgagattatattaacatttagaacatgaacttgcaaatattgttattttcctgtcggctgtccccaattgtgattttatacagaatattagaaatttatcctgataaatcaggttaaaatattatatcactagtttattaacttttataactaataatataaaatgttccacatattttttagccatgttttacttacccgtgatatgtgtatttattaatttttcattttaagatgccacctttatctttcttatttctgggattttattctagtagatagagctgaatgcattttaataattatcataataatcacatttacattttgcattttaattttcatatacattttattaatattttaatttcaatataaaatattttcctacaaatgtcaatttttgatttttatgagataaaattaacctatacaaaatacatatattttcaatgtacagtttgagggtttctggcaaatgtgcacacatttgtctccagcatctaagttatgatgaggagcaggtccatctccacaacaagtgtcctcttcggtgcttccagtcagctctcacataaggaattttttttcaaatttaatatagatacagagggtaaatgtttggatttgtcacgggggattattgagtgatgctgaggtttggaatacagattcccaccgacctctccctcccactctccagcagtccacagtgtctatcattctcataattatgtccatgtgtgctcaatgctgaggtcttacttaggagaatatgtggtattcagttttctgctcctacattaatttgtttaggattaagggccccagcttctttcattttactgcaaaggacatgatttcattctttttcatggctgtgtagtattatacattgtagatgtaccgcattttgtatattcagtctaccaatgatgtgcatctggtttgatctatgtcgttgccactgtgaatagcacagcaatgaacatagatgtggatgtgtctttttggtagaattatttgcttacttttcagtgtataccccgtggtgggattgctgtgtaaaatgatatctctgttttaagttctttgagaaatctccagtctgatttccaaagtggaaacaccaatttatattcccctcatcagtgtatgtgttctcttttctccacagtcccagcagcatccattgttttttgactttttagtgataaccattctgagtggtgcgtggctgcacacctacagtcatctcatctttgataaggctgatgaaaacaagcaatgaggaagggactccctgttcaataaatggtgctgggacaactggctaggcatatgatgaagattgaagctggatatctactttcaacatgtataaaattaacacaaaattcattaaagttttaaatgtaagacctcaaaccataaaaatccttgaagacaacctaggaaatactcttcttgacatcaggtttgacaaaaaaatgttggctgagtatccaaaaccaattgcaacaaaaagaaaaatagacaagtggggcctaattaactgaggagctcctgctcagcaaaacaaacaaagaagcaaacaaaactaacagcacagtactcagacaacctacagaatgtggaaagatattcacaaacgttccatccaacaaagccgtaatatccagaatctatagggaaattaaacaaatcaagaagcaaaaaataataataataataaccccattaaaaatgggctgatatggtttgctgtgtccccacccaaatatcaacttgaattgtatctcccagaattcccatgtgttgtgagacggacccagggggaggtaattgaaccatgggggcctgtctttcccgtgctattctcttggtagtgaataagtctcaccagatctaatgagacttatcaggggtttatctgatgggtttatcaggggtttccgcttttgcttcttcctctttttctcttgccatcaccaggtaaggagtgccttttacctgccaccgtgttttggaggccttcacagccatgtggaactgtaattccaattaaacctctttttgttcccagttttgggtgtgtctttgttagcagtttgaaaatggactaatgcgtgggcaaatgacacagacacttctcaaaggaatacatacaagtgaccagcaaatatatttttaaaatgtttaacatcactaatcatcagagaaatgtaaatagaaaaatgttctgatttctgtcactataggtccattttcttgttttgaatttcatatacatggaataaaatattatagctcatttttgtaagaagcttttactatctgtgaggttcattcatgtgatagcatctatcaaggttttgtcaacatatgtataaatatgtatgtactcatacacatatagatatttcatatctgaatcagtccattgcattaataaatgacagattattaaataaatcagttcattaagtgaataagtgacaatatgtatatctattttcctgttgatggaatttaaatttgtttccaatataaatatcataaacaaaactgtcatacatatctttgtacaagttcttctgtttatattcacatatttttattgataaaatatgttgaaatataagtatgcattataccttttcagctttatggagctatcactgacaaataaaattttctgtatttaaggtacaccaattgatgtattgatattcttggggaaatgctcataatgatcaaggtaattggcatgcctatcatctcagagagttaacattttatgcctttaatttattgtgtatgtgtgatgaaatcacctaatatctacttgtctggcaaaagatatgtttataatgcaacattcattagtatagtcacattgctgtaggtttgatctccagaactatttcaacctgtgtattagtccattctcaccctaatgtaaggaactacctgagactgggaaatttatggagaaaagtggtttagttgactcacagttctgcaggcttaacagcaagtattactaggaggtatcaggaaacttacagtcatcacagaaagtgaaggggaagcaaggaccgcttcacatgctggcaggagagagagaaagagcaaggggagatgcaccacccttttaaaccttgagatcttgtgagaactctgtcacaagaacagcaaaagggaagaccgcccgcatgatccaatcactccccatcagacacctgctacaacacttggggattaaaatttgacatgagatgtgggtgaaaacacagagccaaaccatatcattccacccatggtctatcagaaatctcatgtccttctcacattgcaaaatatcattatgccttctcaacagtcttccaggcttaactcatttcagcattatcacaaaaatctatagtctaaagtcacctctgagacaaggtaaatttcttccccctataaacctgtaaaattaaaaagaagttagttatttccaagacacaatggagatgcatgtactgggtaaatgctcccattccaaatgggtgtcattggccacagaaaaggggctacaggccccatgcaagtccaaacaccagtagggcagccattaaatgttaaagctacagcataatttccttttaccccaagtctcacatccaggacacactgatacaagggttgggctcccaaggccttaggaagctccaccctgtggctcaacgtggtacagtccccatgactgctttgataagctggcattgagtttctatggctttacaggcacaccatgcaagctgttggtggatctaccattccggggtctggaggaaggtgcccctcttctcacagatccactaggcatctagtgcctagtgcccagtgggtactctgtgtgggagatccaacaccacattttccttccacactggcctagtagaggtactccattagggctcagccctgcataagacttctgcctgaatacccagacattttcatacgtcatctgaaatctaagaggaagctcccaaacctcaactcttgccttatgtgcacccgcagactcaacaccacgtggaagcaaccaaagcttagggcttgcaccctctgaagcaatggcctgagctggaccttggcccctttagccatggctggcaggagagggacagggatgtcccaaggctgcacagagcagtcgggtcctgggcccggaccatgaaaccatttttctctactgggcttctgggcctgtgacgggagggaccgcagcaaagatctctgaaatgctctcaagatgtttttcccatcgggttcctcattacttatgcaaatttctgcagcccgcttgaatttcttcccaggaaatggattcttcttgtctaccacatggtcaggctgcaatttttttcaaccttttatgatctgcttcccttttaaacataagttcaaatttcagaccatctcttaatgaatgcatatgacttacattttcagaaacagccagggcaaacattgaatgctttgctacttagaaattttttctgctagataccttaagtcatctctccctagttcaacattgcacagatctctagggcaggggcaaaatgccactagtccttttgctaaagcatagcaagtgtgagctttactccagttcacaagaagttcttcatcttagcatctgagaccacctcagcctggactttattgtccatatcactatctgcattttgttcaaaaccattcagtaagcctctagaaagtttcaaacttttccacagcttcctgtcttcttgtgagccctccaagctttaccagcctctgtccattacccagttacaaagtcacttccacagttttaggtatcttaatagcagtgcccactcctagtgcaaattttctgtattagttgattctcacactgctgtaaagaactacctgagactgggtaatttatgaagaaaagagtttagtagactcacagttcttcaggctaaacaggaagcattactgggaggcatcaggacacacaatgatggccgaaggtgaaggggattcaaaaatcttctttgcaagatggcaggagagagacagcaagggagacgggaggtgccacacttttaaaccatcagatctcttgagaactttatcaggagaacagcaaagaggaaggccaccccattacccaatcactttatattaggcccttccttcaacatgtagggattacaatttggcatgagatttgagtgggaacacagagccaaactgtatcaacctgcataactgaaagttataacctctgaccaacatcacccaattttttcctcctcccagcccctgggaactactattctactttgcttccaagaacatgaatattttagattctacatataaatgtgttcatgcaacatttgactctctgtgtctcactccacttagcaaagtgtcctctatgtgttgtaaatgttagaatttcctcgtttttaaaggcagaataatattcacttttaggtaggaataagccacattttatctgttgattcatagatggacattgacctattttctatatctaggctattatgaataatctcacaataaacatatatttgtcacactcactttattttctctagatgtatactcagaagtgggtatattctatgttcaattcattgagtaatcttcatgctgttttttcataatggctgtactaatttgcattttgttccaaaccatacatggataactttgtaccacatattcaggtctttgtttaagtcttaaatccatttttagctgatttatatgtattgtgtgagataaggtcaattttttttcttccgcatatggatgcccagttttcacagcacttgttgaagagactgtttcttctctattgtgtgttcttggcagttcatcaaagatcagtttattgggaagaaattggtggacttccagattgtctgtaatgttctgttggattctatgtctgtttaaatgtcagcattatactgttttgatttacatagatttgattttgaaattatagaatatgatatattcagttatattttacccaaaattattttggctatttaaagcttttgtatttttacataaattggagaactttttaatatttttgtaaaaccatgccatggagattatatatttattttataggcatataatagatatacctaatttatgggaacatgtaatatattgatgcatttataaacgtgtaaagatcagatcaggattggtatatctatcacattaaacgtgtatattttctttatgctaggcacatttgaacgactctcttctggccattttaacgtatacattagattatcgttaactatagtcaccttactcatctgtcaaacatttaggttgtatttctcctatataactgtatatctgtcttcagtaatcatcttctctttatcctcttctctcttgtatccaaccaggcttctggtaaacaacaatctactctctgtcttcaggaaatccaatgttttagttgtgacataaaagtaagaagatgcaatatttgtctttctgtgtttggtttatttaacttaacattatggcttccacttccattcatattgttgcaaatgacaagatatcaacatttatggctgaataatattctattgcctacatcgattatatttttatatccatttctccacctacagacactgaggttgctttcatatctgggctattgtgaatagagctgcaagaacttggagtgcacatgcctttatgaggcagtgattttatcttctttagaacatactcagaataggatttgctgagtcatcagttatttctatttttcttttattttggagtcttcatacaactttgcacaatagtggaaatacaaacggaaaaaccattataaaaagcagtttcagttttgaggtatgatccaaaaacacacaacatttcatcatgattctcattgggagtctctaatgaatctggtggaaaggcaggaagttttctaaccttgttaagaaaattatgagtttgcacctttttctttttgaggctggaaattggcatgattcaagatgcgtaatgttagcaggtttcagaatgatacagcgaaaatcataatgagaaggcaagagagagaataagagaaagacaggaaaacaaagaaacaaataaatttcacaagagaagaaactgctggatgtcagtgttgggttttgttcctagacatatctgtactgagtgagaaaccatgaagccaagggaagagtctagaacttgttcaagtgaagcatcagcatatttctccaaggcacctattgtcaccccatcacaagggtgatgagtttttgaataccattaaatatgagttcctagtaagtaatcatgtttccatgaaattcagttaaaatgcaaagggtgtgtccagatcactcacgcacaaaaatacaaaatttgcctttgcatttatggctgcatagaggtaaagtccattgagacttcagcaggttacagagatctgttaagttttggattcccataggagagtgcctcttagtgaaggttggactattaattaagtatgtacaaattccctctatgggagtagtgttccatttgtgtggaatttttaattccttattgaattgcaaaacaaatcccaaggactgactccatggagttttactgtagtgttcataaaaatatttaataagattccttccagtgtttcaaggaaagtttttctctaaaattttttctaatacataaattttcctgcctaaaattgaaacaggctgttgttaaaaagacatactggaatggcagctttaatctattggtgataggaatgagcataatacatgaatctctttgagtgttctgcctcatccaaatactgtatggcaaaggctagtactggaggtaaaatctctaaatgtatttgttccagccatcaagtcatggggcaataacagatacatccttgaggcagaggaccataatgccacagtgctagtaggagtacatgtcgccaagggagttcaagggttccttaaaattgtgataattttaatgtaagaacaccttattagagacagggtttcagcatgttgaccaggcttggtctagaactcttgacctcttgatctgcccgccttggcctcccaaactgctgatattacaggagtgagtcactgtgtctagccagtccatttattttcttctgcacatggatacccataaacttatgtggaagattgtgggaggttataacagtgtcatactttagtatcagccatacctcacagaatcattttataatagttcctttcatgggtgtacttcactcagttcatgcaaaacctggcaggtgacaggctaaaaacacaaaataccgaagcgtttaaccaactgaaagggctgtagccttttgtcaatgaattatttcaagacacggagaacacatatagattataaataaaatactttcacatccccttaaaggtggaaattgaggaaattttacctaaatgtgtccaaagggccctgtggcttggtttctgtctaggtcccaatgatagggttctcccaggattttgtggctgtcttgttacacttcatcaagaattaacctctgctgtttcctcaaagtgtttaattggataatgaatttgtctataaattgaagagttgaaatacatcaaatattaatttgtaataatctggcacaaattatctaagcaaattcaataactagatgttttttcatttatttttatttaaaatcaggatctaagcactgatatgctttaataacatctgtgaccctctcagcagttttctcttctgagtatatgatctgctgtggcagttttcttagcttcaatgttacctcttttggcaatgactaccgtctttatatttgccaggaatctgggataaaggagtgcttctaagagttccctaacttgcccattttggtgggtgttccagaacatatgagatgctctgttgttaacaaagcatcccaaagccatgcactgccctaaaatgtgtttgtttcctagtttgacaaattggaagttctaataaatacaatcacttctgccatctgggctgattttacatcagatagagggctgtattccaaagaaaagcttacattagtaatagcaattctagtcagaaacctagagttttatcattgaggtgcaattcataacaaataatattaggtcgaggttctcagtggcagtgtctaaatctcttaggtgtacagggtcttccctgttaacatgaagcatttataagcacagtcatagtttccagctatgcttctccctgtctcattatcaccacaaactatggcctcacctggaacttgggttaatttccaaataagtaattttttagtgtttatgcctctagattattatgtgagaaagttaacattcagtagaaagttaaaaagaacatttgaactgactaaacaacacagacaatcaagaataaaattcaaagcctagatgtgagaggctccaggcctggataatgcaatagttcatgtatgcaggcagtttctttgcccagttctacactgatacacccagaatgtcagcttcatgccagatttgactcctattatgtagagacatggcaatacattctcaagggtcacatgaaataatatgaaaattggtgggaataggggaggagacaactctgcaattctcatctgaaggaccaggaaagcctggacagaccatctccccagcctccgtgactgcaccacgtgcccacatggacactcatccctgatagggtaagaagactccattgatggggctgagcattttatgatagaaattactagagactgacgtggaggtttcaacaactaatatttataaccaaaatttaattacccccacattgttaccattttcttcagtgaaaaattgcttgccatgattaagttttaagtagatttccaatgttcacaactgagcttccaagagagtcttgagaacaaaaacaatgagggcagagaaatctaccttttctgtattcaccactaaactcaagtggactcagcactgcctttgatcactgctacttctctgcagagttcaggtttctacttctcacaattctgacacacattctacctctcctcaaatgtttggcctctgcttcttgtaaggtcaccctctgttcttaacttcttctctgagtcattttgtgaggtggtcatgagccattaaatggatattttatattttcccaacatgaatcacatgagtggtcatgaattatacttctgattatggcagttgatttttcttggcatgttcatgactagtaatatttgaagccatttcattcaaatcttcggggcttcgtttttgttgctatgacattttttcttctattgagtctttccactagtattataacatgacctagtatccaggctcagttgtcattaataataaccacatatgtcaaaaatcatgcattcttttcacagcagacataatttcctcttttctgcagatgaagacacactgctgagctacccccacttacaagaatatatgcacaattatgatatcttcatttatttgactaataagctatatcattctcccttcaaattctttaccccccagaagtcctggacaaatttctgcatctgctcaaacgataaactcagaactacatggtgagtaaaagtcacctggttctggatattgggtccatctcttcccctccaatgtcccagagcacctcagcacacctgtccaggttctatcaagaaagagtagctcctgcacactgaaggaaacaattgagttaagagaggacctgcagatgatagacaatattgaaaactattaatatgacaaaggattactaccaagcatgtgaaataagctcaacgggtgcggtggttcatgtctgtagtaccagcaatttgggaggcaagttgcgcagatcacctgaggttaggagctcgacaccagcctgaccaacataaagaacaccctgtctctactaaaagtacaaaattagccgggcatggtggcatgcgcctgtaatcccagctactcgggaggctgaggcaggagcatcacttgaacctgggaagtggaggttgcggtgagctgagatggcaccattgcactccagcctgggcaacaagagggaaactccatctcaaaaaaaaaattacaaaaaattagctgagcgtggtggtgggcgcctgtatacccagctgctagggagactgaggcaggagaatggcttgaacccaggaggtgaaggttgcagtgagctgagattgcgccattgcactccatcctgggcaacaagagtgaaactccatctcaaaaaaaaaaaaagagacttgcaaagggcaaatagatcatagacagacagatagatagatagacctattagtatacatacatacatatatatacactaatattcaggaaaatgcaaattcataatgagatgtcttttcacccttcatctctgctagaaagtttgttatctgaaaaacaaatacatacatacatacttattaaaagctggccaggatgcctagaaagtaaaactcatagaccactggtggaaatgtaaattagtgcagccatcaagggaaaaaaatagaactaccatatattccagcaatccaactgctaagtatatatctatttaaatatttaaaagaaaaaactaatattgaagagatacctgtacacccatgtttattgcagcactaatcacaatttctaagatatgaaatcaacatatgtgtccatcaacagatgaatggatacataaaatgtgatatatttacacaatggaatattattcagccttaacaatgaaattctgccgtttgaagcaacatggatggaatgggacaccactatgttgagtgaaatgagtcagacacagaaaaataaataccgcatttctcagcgttacttctagaagtaaatagtagagtagtggtgatgagatgccaggaatgagagaaggctgagataagaagaggtttgttaacaaacacacaattacaggtagacaggagggatgtgctctagtgttctacagcacagtagggtgactacagttaacaatatattgtacgttttctgtttacaagaagccagaagagagaattttctatgctaccaacacaaataaatgttagtgtctgaactgacgaatttgctcattgttctgattttggtcataccaagtggcacacatgtattcaaatatcacactgtatcccataaacataagcagttattatgtgccaaatttgaaaaatcctttaattaaaaagaattatattggcgtacattacaaatgattcaacacagagacaggaataaataccatttttctttgaaatagttaattaactaacaatgtagttacattcatttgcaccaaatcgtgtatttgataatggtatgcatagacagatttatgcataggataatatcttttaattttagactactacttaatactataaatataaataattttaaaacaactaagtaaaaagaataaagctgagaaaatgtgtgtgtggtgtgtgatgtgtgagctttttcttgtgcaccactgtgtccttggtggatgtgtggttcatgtgtttgtttttatttactctgtttggggttctctttgcttctaggatctgtagttcagtttctttcacaaaattgggaacattcttcgctattatctttttcaaatagtttctgtgtatttataatttctccttctcagatttaaaatatacacatactataattttgatattaatgtttagtttctttcttcactctcttttcgtttgcaatttactttgtgaaatttctagtgacatactaatcacatggttttattgaaaagctgagccagctctactgaggtgtgtgccaaaagattgctcgatgtttatacagcattgcttttgatttcttatgcatttccatttgatttattcttagtattttcatatttcagttccctatctatgtccacgatttctttaagagattcttgcgtgtgaattatagttactttacatatcttgtttaattagatatttataatatctgtttcatctacaaatctcatgctgatcatttgtttattacaactttggtacttctcattaatgtatgtaataattgttgatagccacagatactgggatggacagtggatactggccttattatttcattttatgcatttctgcctgtatttgaccacactttacctttgccaggcctttactgtggaagtatctgtgaatcttctcagaactatatttgacattcacttttgcagtggacatcaaagttgaagtctgttcttctgtgtccaccagagacttcagttcctccagtgataccttgtttttctttcctgcttggctttgtctcttcacctgttccctcctccagagaatcatgttcagctccctcaggtggattaaaatgttatttaactgacaattgtgaaattggtggaaagcaatagaataaagggagattttctgacctttcttgggttcatattgtgaacatgagtctgggtgtgaccttcccaatgtttctgaacttcctccagatgagatgttggtctgtgtgttcttgctcttttccctgctgtggagtcctcttgttttccccagttgttccctcccgcagctccaatgttctctttttgtgttatcaccttacagatttgctgactagaactgcagattaaggctctgattaaataagaaggaggggagatacttctcaatggaacttaggtgaagacctcttttcccatctcagttcctaagggattgcccagtgccctaagatactggtttggtggcttgcccctccagaataattctttgttctccagtggggatatggaaggtgggtctgaacacttttcagaagggtgggcactttttctctcctagacagacacaatgggacagaacaattttggtgactgtccccattttggggaaaaaggattcaataggataggaaaactcttcagtctgtggtcccttagaaattcaccctacaacacatttaccacacttgacttcaagaaatccaatatatatgtgtgttttcatcttgtaatagcctacattttacatgccatactctgcctcagttcagctcataccccagctttgttactctttacaagaacttgcctctccctagatttcacatttgctgtttatcttaaaacttcaagtatctaaagtattatttttaaaaaatggccagttgtggtggctcacacctgtaatcccaacgctttgggaggctgaggtatgtggatcacctgaggtcaggagtttgagaccaccctggccaacatggtaaaacctgtctctactaaaaatacaaaaaaaaaaaaatagcttggcatggtggcaggcacctgtaatcccagctactcgggaggctgatactggagaatagcttgaacccacgaggcagagtttgcaagtcgtaccattgcactccagcctgggcgacagagtgagactctgtctcaaaaaaaaaaattccaaaattccagctcctctgtttatctatttttgttgatactgttgttgtaaaacataagtaaaatatattattcatctatgtacatttccaagctgtgtagaagaatttttaataagacccagagtaaaaaaagaatgcaaatatgtaggggccagccctacagggtctgtggatctttctccccatgtgcagagatgagagatcatagaaataaaggcacaagacaaagagatagaagaaaaaacagccgggcccaggggaccactaccaccaagacacagactagaagtggccccaaatgcctggctctgctgttatttattggatacaaggcaaaaggggaagggtaaggagtgtgagtcatctgcaatgattgataaggtcatgtgggtcacgtgtccaccagacagagggcacttccctgtttggcagccgaggcggagagagagagaggacagcttaggtcattatttcttccattctcttctcagaaagatcaaagactttaatactttcactaattctgctactgctatctagagggcggagcaggtgtacagagtggaacatgaaagtgaaacaggagtgtgaccgctgaagcacagcatcacagagagacgtttaggcctctggagggctgcgggcaggtttgactgatgtcaggccttccacaagaggtggtggagcagagtcttctctaactcccccggggaaagggagactccctttccaggtcttctaagtaatgggtgccttcccaggcactggcgctaccactagactgaggagccctctagtggccctgtccgggcgtgacagaggctcacactcctgtcttctggtcacttctcaccgtgtcccttcagctcctattgctgtatggcctggtttttcctaggttataattgtagagcaaggattattataatgttggaataaagagtaatgctacagactgatgattaatgatattcatatataaacatatctataacctattactagtacaactattcttattttacatattctcttcattacactagaacagcttgtgccctcagtctcttgcctcagcacctgggtggcttgccgcccagacaaatattgttaagcttcttaatagaaaaacaaattatggtaaatgtgttcactggaatactacccgtcatttataataaattaatgcctgatacacagagcaacaaggtaaaatatctaagtatttatgttgagtaaaataagctaaacaaataagaatatatactatgtaatttcatttttataaattctgataaataaaaatgcatctgaagtaaaataatgaagataagtagttgcctggggaaatggtagaagaagggagggggagaggaggaggaatacagcagaacaaggggcaaatgttgagaagaattcacttgtccactttcttgataatgatagcagttacatcatttttattagttgtacattttaaatatgtgaagtttatcatctttcaattaagcctcataaaatgtcttacaagcaaacaaatggaaacttagacaaggaaagagtaatagaaagatagaaaaaataagttcaatgtcagaagtacctgaaaattaatgtgcctggatcctagttctctccatattttcagaagagtgctggagggcagcaaaaccacacatgctcttattacggaaagtgggttctgataaaaacactagacacatccagctttgtcctggagttggtttagggggatgtcagagacagtgatgaagagcacagggccagataccggggttcactcatcccagacatgagctcctagatgcatacagagcccccccatgtgtgggtttacttccacttctgtaaatggagaaaatattgtctcctacagaacatagtttacatgaatatttaaaatgaaatagggtgattagtgcaaagtgtttatcacagcacaatttcataataagacagcatattttccaaatgcaatcattgccagcaaacttctacagggcaccgtcgtcttatctgggtacagcctactcctcaagggtcccaccctagagcttgctatatagtaggagatatgcaaatagggccctccctctactgatgaaaaccaacccaaccctgaccctgcagctctcagagaggtgccttagccctggattccaaggcatttccacttggtgatcagcactgaacacagaggactcaccatggagttggggctgtgctgggttttccttgttgctattttagaaggtgattcatggaaaactagagagatttagtgtgtgtggatatgagtgagagaaacagtggatatgtgtggcagtttctgaccttggtgtctctttgtttgcaggtgtccagtgtgaggtgcagctggtggagtctgggggaggcttggtacagcctggggggtccctgagactctcctgtgcagcctctggattcaccttcagtagctatagcatgaactgggtccgccaggctccagggaaggggctggagtgggtttcatacattagtagtagtagtagtaccatatactacgcagactctgtgaagggccgattcaccatctccagagacaatgccaagaactcactgtatctgcaaatgaacagcctgagagacgaggacacggctgtgtattactgtgcgagagacacagtgaggggaggtcagtgtgagcccagacacaaacctccctgcaggggtccgcaggaccaccagggggcgacaggacactgagcacagggctgtctccagggcaggtgcaggtgctgctgagggctggcttcctgtcatggcctggggcggcctcattgtcaaatttccccagggaacttctccagatttacaatcctgtactaatatttgatgtctctaaatgcaaccttttttttcctttttgtgtctgtttttttttttttaaaaacaggaggacacatcctcacctccacagaagccacagtgtcactttgggggcagaaataatcctttcgtggtcaacagggtgagagttttgaggaatcccagggaaacctggggaatgttttccaattagactcagggcagagacctccatgggaatctctgattagaacaggctttgagttctgatgggagccaaaagagaggctcacccagggtcagggttcttaaaacctgatggttttcacagcaatcccccttcatcttgtgaaactgggcacatctgactcagactgattcagttgaccctctttctgctaatccattttccttcccagtagacttgattctcacagatccctttcttcttctctttcctgaaaacagaggatgtgttttctgtagtctaaattccaaggctcaggtctgcaggagctgggtaggctgaggggtcttcctcactcactattgcctggaaaatcctgctgtcttctgtgcatggaggcatttggaaaatgaagcaggcattagtcatgaagggaataatactagttttctccaatgggatgttgatgtagagctgatcttatgcttctcacactgtcacaaagtttggactctcacctgtgactttgaggagagcttgtgataccttatcttgttttaatatgaatagactctcccttagctcaggaagctggaacagactccatttggctccttcatttgtaagacatcaagggctcctcacccacccccttcctcaaggacttaacttgtttaagctgactcccagcatctcaaagagtgcgattaactgataaggtactgtggcaagctgtgtccgtagttcccaggaatttggccaggtgatggtaccctaaagcccctgcatttctgtctggcagataacacccagagcccccacacctatcatcttgtgatgaatttaaagcccctgcacctggaactgtttgcctgtaaccatttgtcctttcaacttttttgcctgttttacttctgttagaatgctacagttaggctccccctcccctctctaaaccaaagtataaaagaaaatctagcaccttcttcggggctgagagaatttccagcgttagccatctctcagttgccagctaataaaggactcctgaattcatctcaaagtgcggcgtttctctctaactcgctcggttacaacaagctgaggatggacactccattgtgcagtgagctctgggtgacagtaatcgtagggtctccccgggcagcctaaggtcaatactgctggccgtcgggaaagacaggctggaattcctgggaagacctgcatctgccatctaccacggagtcctatggtcttctgttacactctctttgaatcagcaccacctagattatctaaaacactctttgtgacttcatgactgggaaaaaataatggcagtctctactaacacctgtgttaagccatgggagcaacacctaggctagtgtgtgattgagtagttgagactgtggtctagtcaaggtgacacataaaattgattgttgccattatgatattttattttatatttgacaatataatcatgctcatattataaatatttctgttacattatttgtgtcagaggctttggaaccagaacaacttcatcttgaataaggggtaggaaaaataagactgagacctgctgggctacattcccagtaagctaaggcgttcttagtcacaggatgagataggaggtctgcacaagatccaggtcataaagaccttgctaataaagtttacagtaaagaaactggctgaagcccaccaaaaccaagatggtgacaaaagtgacctctgtttgtcctcattgctcattatatgctaagtattatgctttaacattctaaaagacactccccacagagccatgacagtttacaaatgccatagcaacatcaggaagtttccctagaaactaaagagtggaggaaacctcagctttgggaattgcccggggaattcatgaataatccttcttttgtttaacgtataatcaagaaataaccataaaaatggacaaccagcagcccataccacttctctgcctatatagtagccattctttattctcttactttcctaataaacttgctttccttttattctgtagatttgccccaattgggatccctttccagtaacatttgtgttattattggttttctaagcagaaaactctgagaggaggtgtcagccgggcttcctgggttgagtagaggctcagaaagcagtgaaactcactcatttcctgcatcaggacttactttggtcctggatgaataatattgaagatatatgcttaaaatattcctaacatcacaatttgtgcatgtgttttcttccctaagaaagctataaacagtgaaaattttgctgtaagcttccctgtgtcttctctccctctctccattccccctcccctgaaactaaaaggaatgttttaacattatgggcttttaagtctgtatttctgtgaccagcagaccttatctatgctcccaattcaaattccttgtaaacacaatttgtaaaatcctgcgagatcctgtctccttggccacgccactgcaaggtcataaagtagatcaaacttaagttacaattctgattttcctcaagatctgagacatgttaattgtctttgtttcttgctcaggtaacatctctttttgctcttttttatctctttttgcacttaaatctaagtttacattagtcatgtatctagaatgtagaaatatgtcttaaagttacttaactttttaaaaaatttatggggtttccagaagatgtgagaacctcctttatttataaaatagctgattgcacgttgctcaataatttcctctttaatttatctctctcctgtcacattatactatgataagcaaaaagaaatgaaggcataccatcaacagtttacttagatatctcctcagctaaatttctaaggtataatttactaattctaattttatccaatttaacataattaagataaattatataacaaggtacacatatgttccagttctaacaccatgtttgtgacagaaataaaacagagcttctctctgtaatgtggtcatctgagccctgaggtgatgggtcacataggtatttttatgatatttaagggtttggtcaagaacagtgataacaagtctgaacaagactggtcatacttgaaaggttacaggtaaagttactgctgttattttatattaacgccttattagaataaagctcagaggaagaggccacatcctaggtcacagtaggaggaggaatggagctgtgctctgctctccacactacttttcacatcccaggcacaagcccaggttccatgacgcacggcatctagagggcagttctcaggggatgatctcagggcacctgcttcctcgggcagggcgcttccttctctcaattgcagacttgctccttctgcaaggtctgaagtcagcacttgtattcccatgatttttacaggttctcttccctaatatggcaaaaatctttttattaaattttcaattttattttctctgaagcacactgcattagcagaaacgaatatatcacattccttatccgcccacacagccaaagattcctgaagacagagctgatgtgacgtactcataggtggatctctgcccctcagaggtggccttggtcttcaagtttcagcaatttctaggaagccaaagacacctccatctactcctccctgctcgacagctcacctgagaacagctttctcattggaatgtcttgtgtttaagaaataaaagttgctgtttgaggttagggagcccaggtgcacctaccagatccagcccaggattggagatacttttcagaagacaacatcacctgagacacgaccagtcccactgtttcactttcacaatttcagcttcttcagaagaaaattaaaattgttgagacttgttcataagcgttgtgccatgtcctttctctgttttcttgcctgttcattgatgtcatgccaggtgccacttctatgtaataggatcagaattctgcctctagtaacacatcagaggtgaggtttgattgtacttttggtttatgctccaaaacgtagattataaaattcatcaccctcatttttatgtcaaaagtaatctgcataatctggatgtcaatactttttggaatctatgaaataacagaaattgcaagaaatattacccactccaaacctggagagacaggcatgtgcagaatggcaattgacacctgcttaactggagcagaagctgcagaagccacaagctgttgagggcacttacatggtaagcactacagacgtctgaagacagatgtggactcagtaaatgtaacagttccagagggtcttatacttctaagttttctggaatttctttccagaaacctcaagattctaaaatgtacattccaaagacatttcctatagatcaaaattgcagatattaattactgagaaacataccacgagccttcttcaaaagcttctacaggaaaggacttttccagaaccttatcctatgtgaaggaagacaaatctcccactgcagatttctctcccattcttccataattgtagaaatgagtaaagttagccaatagaggtaagatataagtaaataatccagggatgctgaaaacaaaaaagggagtaatcgcccaaaatgagcttttcccctggagacgcctggtcaagatcataggccagaagaggaagctgactgtgtctctaggtttccactgtcagaacaggcagtgcttacctgcactgcacaatccattctaaccaggatgatggctctggattaaaggtgaaagtgtggcaatgcacagactctatctgaggagaacacaggaaaactaaaggacaacggcagagggtgagacaagaacagtagagcaatctgaagcctctgacatcatgatttttaagaccaatgtcttaaacactccttcattgacctcagcttctttcatcatgaagcctttgcagtgactctatctgagaaaaagaaaataacctcctgcatgcacttctcaagtctctgcttgtatcctgtttgctttaggtctctaggggaaaaagtcagatacctggacctagtgtcagtgtaggaggcacatcctaaaagctacaaactaggaagaagggaagatgggtgttattggaatagtggatatggagtgggctttcttctgaaagtatatgcacctgctggtattctcagatgcaacattcaactgcaagagcccattgaagaaacaaggcactcccaaatctcctgtaagattctgtattcatttcagataagcccacatgtccccgcattaactttttcttcagacaagcacatacatctgaaactgaacagctatgtggcaaaataagctcaggatagaagtaattgtggactccagctctgacaatttgtagatctgcatttttaaaattctaactgaagactttgctttattgtagaggacagtggtttacagctcgaattgcacagcctacaggcagatgtccatttcctctgggcaaggtttatttttatttgtttactgtacttatttgttgacaaacattgatactataaagataccctaacagcgtccacatgaaagaaaaagaaagagcaatggacacatcaaccctgaacatccagtcccaggaatcctttgaccctgccctccttgcaacccagagatatagattggatgagccctgctgagcagaacacacatgtccccaggagaaagacatggaaatgaggcccctccctgctaatgaaaagcagctcttcccctcttctcctgcaggtcctggtgaggagccacccaatatctgtgcccttcctcagtgtccacaccatcgggtctatgatgatctgggcttcacttgtcatcactctcaatattgaggttccccgttaaacagactgagtgaactgtggctgctccacgtgggggctgttctcagtctgttgcttctgtgcttgcagaggtcccctgtgaagttaattactggagtctctcagagaaatactacagaccaagaattctcagacttttctggaaaccctgtggattcactttcactgaaaacagcataagcttggtccagcaggcttcatgacaggggtgggtgtaggtgataacatcagtaattcaagtggaagttctcagtgggactctccttgagtacaaagaagattaacagtcctcagagacacgcttttcagatgattctctcttaagatgattaacctgagagctcaggaaaattccgtttattactgtgagggacacggtgaggggacatctgtgtgagctcagacacaaacctgcctgcagggagacacaaacctccctgcatggtagatgcttctcagaaccaccagggggtgcacaggaaaccagaaggtgctcaggacaccagggggtgctcagaaccaccatgactcactcaagacgccaggggcgctcagaaccaccgtggggcactcaggacaccaggggacattcagagccaccaggggtggctcaggaaacctaggggggtgctcaggacaccagggggactcaggaaactagggggtactcagaaccaccaggtggtgctcaggacaccagggagctctcagaaccatctgggggcactgaggaaaccaggggactcaaacactagggtgtgctctgaagcaccagcggaccctcaggactgcagggggcgctcaggacactagggaacactcagaaccaccaggaagcgctcagaaccaccagggggccctcaggacatcagagcgtgctgaggacctccgggggcgctcaggaccttcagagagtgatcagaacaccagagggcgctcagaacaccaggaggtgctcaggacagcaaggggctctcaggacactagggtgtgctcagtaaaccaggggtccctcacaaccaccagggggcactcaggacaccaggggatgctcaggacaccaggggccactgaggacaccaccgctcccttagcaggcagctccacatcaggcccctgggttggggcaggaagggtgttttccttttggatcttgccactaaactcttgggagtttttctccttcctttgtggtttcaagaaacattggtagattcttctcaggtataaagctctgctttcttgtattatgtaatgtttttggtttcggatgttaccagaattacactgcactgtgagaggattcattcctcgtgtgtgcaatagtgaatgaaagctgcaatgttaggggtggctttgaaagctacgttaggggtggctaagggcagttagcaggaaatgatcatcactatagaaggctactcatttctttgcacatttccataaataattgtagtttatgccctaaaaactgcatgctttcttggccctttttcttaaatgcctccaatccaagaccagtcatctaattaagctgtatgtcaaagaccaccaatcaagttaagtctgtttaatgaaacactttgtaaacaaaaaagtacatctgtgtttgtatagtcagctttaaattttacattgctttacaaatattaattttgtaaatttagtctcataattatcgtcagtatttaaaatcttaaagtcatgctatgttaaattaagtaatcttagctttctcactatgaattagagttactaagaattagaatagtaagagcatgtaataagcttttggtgaagtttataaagaaagatgaagatacgttttttgctttaaaatattttgttttccagtttacaggacctttctactggttttaagataacaatcactgtttacatctaaccctttttttaaacacctgctgtttaagattataaaattataaaattaaaaacctagttaaaaccagattgatctttgtaatttaacaagatgttcagtattgttgttttaataaaaaaaaataggtaaatacttagctactagaaaaataatcatctacttaatcataaggttttacttaggtaaacacctaaatttcatgggttataaacatggttaataggtgaaaaactttaatggacaagtattacagttttcataaatattctaggtaagctatttaaaaaataaattaggtaaatgaaataaaataaaccatttaaataaacttgttctacaatttaaaaatctaaagtttaattaaataatatatattatataaatgtttatgcattactaattgtttaaaatatatatactataaggaaaactttttaaaaatacatattataagaaaatattttttgaaaacatttgtttttagaaaaataatttatttaattcaaaggttaattataaaatgtcgtaaacatacccagttagtaagagaggtttaaagaaagttctagacatagagaagtacttttggtaagaaaggttaaaataaaaaaaaattatatgagaaggaattttgtaggataactttttatatataaaagtgactatttatgaaagaataatgtttagaataaaacaagatgttcaagtatgccataaatggttcgtgtaagtcaaaataaggtttatagaaagctaacttattaaaaaaacttcatgttatcgagttgactataattgaaagggaagaatttattatagtctttatagggatctggctttcatatgaaaatatactaacacactgaagattggttagaatgacaaaattgtcttaaagtattgatttattcaataaaattataaggtattataattttttaacccaaaattttaacttttgttgcatcttgccatttttatttttttccatttgagaaggcttgagaggatctcaactttttcatcagctcctttaacattgtttcttacttacagcagttagcctctgagttaacttctaactgttgttagtttctgactgctattatttcctgatgttaaaatcctctatcttaaagttctaaataaaatgttttctttcaatataatattcagtgtccttggcttttctttaactgtctaaatttttctatgaaaccaaaatcttcacttgtaaagacacattcttcctaggtctgattaattcaaatacttttttcattagagttgacttgcaggttatgtacatggagttccccatagggaaaaacagtcacagtgcagaaggctttatttttgctatttggtaactgggcatgagacaaattttaaatttcattgaaataattcctatgtaagtgttattaagtttttcaactacttagtaatactgagagtttaagacaatagaaattaatgttatgacattcatgtaactatctgtataacttttaaagtccttgtgctgctactttactgagctttgaatcctaggtctaaaaaggacacacaacactttgggaggctaaggtgggcaaatcacctgaggtcagaagttagagaccagcctggccaccatgacaaaaccccgtctttactaaaaaatacaaaaattagctgggcatggtggcaggtgcctgtaatcccagctacttgggagcctgaggcagagagaattgcttgaactcagggaggtggacgttgcagtgagcagatattgcactactgcactccagcctgggtgacagagtgagactccatctcagaaaaaataaataaataaaataaaaaataaaaaggacaccaagtccagctaaatcttaaacaccgacagcaattaaagccccatctacagacctggaagaaaatgacaagaaaaattgatcacactctcaagacacaagcccagaaattgaaactacttaaccaccccagccccagggactattacagaagaagtggctttgtaagattgtaaaagctaattttgagagatgaaatcagttcagagtttctttataaattaaacattaatgcaaggctagcatctgggcccctgtgccagattgaccagggtttcttgaagaattaatccacatttaaatttaaaaaacagataaaactgtataaaagatctatgcaaattatttttatggtaaaagtaattataatttaatagatttatttttcagaattgatagttttaacttttctcatgctgttcttctaaggggttatattttagaaaatcaattctactctttcaaaaatattttttttcttttttttagaaatcactgagttttcatgtggctaaataaataacttattttacaataatctgtaatcctattttgtaatatcaagtgttgtaaacttttgatatttgacaaagttcacaaaataaaattctaaattcagtcatttgaacaccctgaaaagaaacacatttagcttatttggtacagttaaattatacaggaagtaatgtcaaatttgcaatggttattaactttggactatatttatataaatgtggactatataatttgaatatacttatgtaaagagtatatgttccaaaattctattagattcaagtgatttttatatgtcttagtatcagtagtacttatgattataatttaaaatttttgtttatcacagaaataaccaaattttctcctcaattctgtctttaaccaggggtattctaaaaggtcggtcattcacaattgttgttttactttgattctttatcaggtggcttataataatctatagaactttgagtagtactcttaaatatacaatatacaattttgacaattttataaattgtgccattggtatagagagaaaaacttccatgagtctcatgagacctgaagcatttatgatgattgttaatctaatatcaagcaggacaggatgtaattgcatgaactgaatgaaaaggagactgaaataatttttataacttattctttaaagcatttgctatttacttatgttttattgttcagaatcaagaaaactttgtcttttaagctattcacagtttttaacaattttaactatactctattgagaaaaattgaaaatataatttcttcttctctacataatttctccaaaatttggaaactgtaggtattcttatatcaaaatagttatttgcataggttcgataaaaatctgctttcttccataacagagcacaattagagacaatggtcactttaccaaggctttaacttgaatgacatattttctgatttactttataaaatgaagagctgtacagctgatataagcccctttggaaaactggcattttacctttttttttttttttaacagggccctgagctgtagtaagtaaataattttgctttctgacaggcccaggaaacccaagttttcttggatacttgaaaaaataaaaagtaaaccaatccatatagctatctgatggcacagataaaatattggctgggcttgaggcttttaaagatcttacccttagattccttataaaaaatagcaaaagcaatgtatgaataaaacagcctatgtacaacaaacaacaacaaaaacaaaaacaataaaaagagagctaatatgttaagtgattatttttgctgcatcttatacaaaaaaatcaggccaagtataataagcctaaaatttattttacaaataaattagtcctattatgattttgtctccaataaaattggggaattatagggagaaatattctttcaaaataaactatagtgcatctgttattaggttctaaccttgtccacttgtttttcaatttacaatattttccacaatttggactcaattttaaaatatttctttccacaagtctccaaaataacattttcagtgattttctttttaaatatttttttcctatttgaaatctccagaaggtaaactgtgctttcttacagctagtcaacttaaactctaaaataaaataaaatcaatgatatggtttgtctctgtgttcccaccaaaatctcagtttgtatagtaataatttccacatgtcaagggtggaaggaggtgaagataattgaatcacgggacgtgttttctccatgcttttatcctattagtgagtgagttctcacaagacctgatggttatataaagggcctccctcttcacatgacacttctctctcctgcagccatgtgaagaggtacgtgtttgctgccctttccatcatgactgtaagtttcttggggcctccccagccatgtagatctgtgagacaattaaacctttttttaaataaattatccagcatcaggtatgtccttatagcagcatgaaaattgtctaataccagcaacttaattatatacaaaaattccttttataccctcctactgtgaagggaaaataaatcttgagaccccaaaattactaagctaaagagaagagtcaatgtggtgttacaggagatagaaagaaattatttaggtagatagttgggatgagagagtctctggcaaaataacttttcttctaacaaaaatcagctcagaaataacttcttctctaattacacacagttcaaagaaatcacttctaacaaaaagcagactaaataatcaggctgtgaaatatagataagcaactctgccacagagagggtgtttctgggtgtaatcaccaaacctcacatatataggatgggtcccagtaaaaacagtgagccttaataagcacattccttttcttttctgggagtacactaagatagaaaagctggaagcttgcacggggtttgcgacgccggcacctgtgaggaagtacctgggaccaggcaagaaaacccttctggcctttcttagcacatgcacggtggaagaagataagcagtgtggaggagatcaagcaaagtgcccgcctgcccaatgaaagcatgaggtggggttgccagagactttgctctatgcagatggcacacattgtcctaactgtttttgcaccctatgctgataagacaccgtctccccacgagcacatttataaaaatccttacattttactgcagcacgataacccatttgggacccctctctgtgacagacagctttttttttattttacctattaaacttgtgctctaacctcacccttagcatgtctgcgaccttgatattcacggccgtgagacaaagaagttcgggtggtattccagacaacgaggctgccatactggaaagtgctttgggcaaatctgcctccccttctgtttaaagtgattcctctgaggctaacctgagaccaatacacagctgattgcttcctcttcactatcatttatgtaaaaacgaagatccactgagtcagactaaattgtgcattcagtggtaggctaataaagtactcaaaagaacgcaacctattgtctcttatctacttctaaactgcagtccgtgcttttgattcgtcctgccttacaggaaaaatccaaagtacattttacatatattgattgatgtctcatgtctctctaaaatgtataaaagcaagctgtacttcaatcgccttgggcacatgtctcaggacttcctgaggatggtcatgggtgagttcctaactttggcaagataaacgtattagtctgttctcctgctgctaataaaacataacaaagaccgggtaattgataaaggaaagaggtttaattgactcacagtttcacatggctggggacacttcacaatcttgtcagaaaagcaagcgacatcttacacggtggcagactagagagagcttgctcagggcaactcctctttacagaaccatcagatctaatgagaagtatttactatcatgagaacagcatgggaaagacctgcccctgtgattcaattatctctcattgggtccttcccatgacacatgggaactgcaggactagaattcaaggttagatttggatggcgacacagacaaaccacattagtaaacttcctaaattgactgagacctgtctcagatatttgtcgtttacctaattcatgttcagccttcagagttccaaggcctatatcagttttccaggattgtttcccctttttgttgtttgttatttcctcctttatttatatgttttacttctcttttttctcccactattttcttattaatggatgtgaaacttcacaacatttgaaatataggtaacaatgaactataataacaacttgggacctatttatctagaaataatccgtcctacccatgaaagaaaaaaacaaaaacaaaaacagaagcccagaaacttattttgtggtaaaatgcttcctctgaaatattttggaaaggaaaaagttgggaagatatgaaatgaaaataaaaacttctgatgtcaattcattatgtcatgagggggaaaaaaactaaacgatgatccacgcaagaaactgattttcctttcattcctgagaaaatagccacagacagataaaatgttagatatcttcacagatagctacaatttgttcatctttgaaatacttagtgcaggagaaccacttgatattctatttccctatgtgcttctttttcattactacatgtaagttttcatgcaattcctccttcccctctagccagcttttcccctttatatattgaaagccctaaaaaatgtcttttgggaatggcactaaccacgcattgtttctgtgattacttttcttccaagcatgccataactttgaaaaattaattttaatttgattgagagctctctcagaaacctttggttacactaggcaaaatccaaaatcaggagccaattattgtaaaaatcagccatagtacactgtgcgtctgtgtgtgtgtgtgtgtgtgtgtgtgtgtgtgtgtgtgtacatgtgtgttttaatttttgtgagctttgagccatgtagttctctctgtggagatactatttggcgtgactttgaatagagaattctaaaagaaataagaagctcctatgagttctctgaaagtttctggactcaccatggatcttgactgtgtcattgcatcagacagtcccagggaacagactctctggtggtttcatagaatctatgcttgggctctccctgcagtttactgggtatagtaatgacaaatcactgtttcaagagacaatttcaaaagcattagatgctgctgagagaggattgtgaaccaggggactgcccctttcttcttggagagcgacattgggagaatatgctctgtgagcccaaacagcatcctcccctgcagggtgagggcagagttgcagggcaggcccagaacccactccacacagatgtcagccctggagctgctgcagaggagtctgaggagaaaatttttccagcacctgaattacacttatttcaaaacaaaaatgcaattaaaaagttaaaacaagtaattaatgtccaggcacagtggcttacacctataatcccagaaatttgagaagctgaggtgggaagatttattgaacccaggagtttgagatcagtctgtgaaaaatagtgaggcttcatctttatttttgaaaataaaaataaaataaaacataaaaaatttagcaaaaactacgatgcgtctttacataccccatcatacttgaagcatttacctaacccaatgaggtgatgaggacccaatttgaaaggagaaaattttagacttttcatatatcttaatagttggaagatgtagaagaaatatatttatatcaattaaatgtgtgcaaatattgacagacacaccataccaggagttcaacttgcaaagggtaaaaccaaaaaagtttgagattgttaatgtgccatttgaaggtgagatcgttttgaggaccatgtcctgtgagagtttgtttctctattagaggagttctgtactcataaagttctggacatgccaggagacaagtatcagtaaacaaatatcagaacttgaacttcagcttcccactcttgcattctccatgtgtcatctctctactatttctcattctagatcaggtctttagctatgaaatattccacctaattaacatgtaaatagattgaagtccacagagttaaatatgtatattttctcctgtttttcccaattgttccctcccacagctccaatattctccactgttaccatcaccttctagatctgctgccatgccctgcagattaaggatttgattccatgacagagaggaggtgcatttcaatggaactttggtgagaacctcggtttttatcccatttcctctggggctccaccagtgcatctggaataatgggttcagtggctggcccctgcagggtgattccttagttctgtagtgaagatgagggaggtgggtctgaatgcatttcagaagtatgggctctcctctctcagacagacactttgggaaaataagatttttctgactgcacccattctagaacaaaggaattcaattggataagaatgctgataaaaaaaacctcaaaccaaattaaatttaaaggagtttaattgagcaatggatgattcatgaattgggcagcccccggaatcacagcagattgaaagagacttcagtgcagccatgtggttgaagaagatttatacatttttttaaattatgtacagaaatcagaagtgaggtacagaaacagctggattggttacaggctgatgtttgtcttatttaaacacagtttgcacactcaagagtgtatgagtggttgaggtatggctgctgaaattggccaacgctcagctgttggtgaggtgctcaggtacatactcctgagttaggttttcaatctcgtccacctattcaggtaggttaccgtttgtccacaaggactcaaacatagaagtacggagtcctcctcaggccatatttaattcactttatcagtgcccttcagcatatggttcctgagaatttcacacggcaacatgtttaccaccctagaatttaagcaatccaatacatgtaataggctgtatttcacatggcaacttctgcctcagtttagctaacactatggctttgtttctctctacaagaactcatttctcccaagatttccattttcctgaaaggaaaataaatctttgggacccccatatcactaagccaaagggaaaagccaagctgaaaactgtttggggcaaacccaccttccattctttccctaaaatgatagctgttaaggtgtttacaagctacatatctccttcaaaatttgaccgcacagaaaatccttgtagaccaaggacattgtagaccaagcagagagtcacttctctgctcacgtaagtcaaatgcatatctgattgctccctttgctctattgtttcactaagccagactaaggcctatgtgactattcctgtaaactgtgcattcagttaaaggctaatcggaaactcaaataatgcaaccatttctctcatacctacctatgatctggtagctctccccccaacttcaatttgtcctgcctttttgaactaaataaatataccttacatatattaattaatgtctcatgtctccctaaattgtataaaaccaagctgtgtcccaccacactgggcacgtatcatcaggactccctgaggctgtgtcacaggcatgtccttagtcctggaaaaatgaacttcctaaatctattgagattagtctcagatactctttggtttataagtatgttttctatctcataacttcaattatctgaaatactaaaggaaatctgccaaataacacattatcttgtttatctgttattgttgttgcaaaaataaatatatttatataatttatgtataattgatcatctttgtacattaccaaactgagtagcagatttgttagtaagacccaatgtaataaaaaattcaaatatcaattaacaacttaatagaaaaacaaattacgctacatttgtttgccgaaatgctaccaatttttataaaaaaataaacacatataacataaatggtttaattctcagtatttctattgagaaaaataagccaaatacataagcgaatatactatattatttcattcttataaattctaccaaataaatactagtctaaagaaatatgaaaacatcagtagtttataaagaaatggtagaaaaagggaaggggaaaaaacaaataatataaaagatcaagaggaatgctgaggggagttgacttgttacctcattgaaaatagagattattttttcaaagtttactattgcacatgttaaatatgtgaattttatcatctgtcagttaaaactcataaaatttattacaagtaaacagccgacattttatacaaaaaagggatgataggaagaaacaaataaatacattaaatgtcagatacgccaaaaacttatctgcctgacccctagttgtctccgtaatttttggatgaaaaccagcccacccctgaccctgctgctctgggagaggagccccagccttgggattcccaagtgtttgcattcagtgatcaggactgaacacacaggactcaccagggagtttgtgctaagctgggttttccttgttgctatattaaaatgtgattcatggagaactagagagattgagtgtgagttacatgagtgagagaaacagtggatatgtttggcaatttctgacttttgtgtctctgtgtttgcaggtgtccagtgtgaggatcagctggtggagtctgggggaggcttggtacagcctggggggtccctgagaccctcctgtgcagcctctggattcgccttcagtagctatgttctgcactgggttcgccgggctccagggaagggtccggagtgggtatcagctattggtactggtggtgatacatactatgcagactccgtgatgggccgattcaccatctccagagacaacgccaagaagtccttgtatcttcaaatgaacagcctgatagctgaggacatggctgtgtattattgtgcaagagacacagtgaggggaagtcaatgtgagcccagatacaaacttccctgcaggaacgctggaggaaatcagctgcagggggcgctcaggagccactgatcagagtcagcccaagaggcaggtgcacacagaggctgatttcctgtcagggtgtgggacttcgtctttttaccatttctctagggaacctctctaagttcagaattctgtgcttaccaatgtcatctctacatgttttttaatgattattttgagaacctattcttacatgcacaaaatgcagatggatgcttacagagatgaaaagtcctcaaccatggtcaccaggatcagccttgaggaaactcaggggtgcctggtgaatcttctccagtcagactcaggacagaaacctctgtgagattccctgactagatcagtcttcaggaattttgataccagccaatagagaggctgggccagggtcagtgtcatgtagaacctcacaggtttcacgtctgacccttctccttctcctgacactaaagtatgcaaatcagtatcagcactgatctgggtccccttttgctcttaaaccattctatttctttttatttgttgttgttcttgcttttcctcgtacttctcttgctccctgtaaaatggggaggtgtttcttgctgcaaaagccccaagcctcaagcccattccctgcagctcaggcggggctcaggctgtggctcctgcagccacatgggagtggctgttggggctttctcttctcccattgctcagcaccctccagtgtgttgtgtggagactatctgggaacgaatgtggacaacaggagtgaaggggatgagcttgcgtggacagaatgggatgtggatgtgaaatttatcctgtgctgtacaaacaaccacagattcaacttcctcaccagtagtattagaaagagggtgtgaaagttgtcagaataaaaatggaaacacttgtgttaacaccctgacaaatggaactaggaatgaccatgaagaagtttctcatgcatatactccagaaaacaagaactaccgtaaatggattctgcttaaccacagccttggatagaagaaaccacaaccttacaaaaatcacttctacaaggatatcttcccagcaactccctgtttaaccctacagtgatgccacccttagtcctacaaaaatcacttctacaagaatatcttcccagcaactccctgtttaaccctacagtgatgccacccttagtcctgattctaggagcacaggataatcctctcaaaacgacttatgtaacccacctcattttcactgtgtaaacctatggattcacatcctggagtcactgctgcatttgttcttaatggtcattagcccctttcacaatatttgaggctgtttttctctgatgtctcttctaaaataaagaatttccaagtggacagcagtaaagaagctatttaggaagatgtaatgggaaggcatctttaacattctgttgaatgtttccacatggcacttcaatcccctaaaatactttgctgtatcagcatgtgatgaatcggagtataatattgaaggtaaaatgggaaatacatgggcttttgatgaatcaagtcataggatgagaatgtctgtgtccttgaggaaggagaccatgggttgtaagttctagtggaggtacctttggcaaagggagttcatgagtttctgaaccttatgctacttttaatttaaggacgcaatttatgatgtatgtttacttaaatctttccagagacatttgtcagtaaggacagggtagcatttgtgtaatagtgatgacttagagagttattttgtaattgctcctgtaaggtatgcacattgctcacttgatacagaagttcaaatgtcacaggtggaaaaacaggaataaaggtgggcagatcacaaggtaaggagatggagaccatcctggctaacacggtgaaaccccatcgctactaaaaaatacaaaaaattagccaggcatggtggcgggcacctgtagtcccagctactcaggaggctgaggcgggagaatagcgtgaacccgggaggcagagcttgcagtgagccgagatcgcaccactgaacttcagcctgggcaacagagggagactccatctcaaaaaaaaaaaaaaaaagaaaacaggaataaagcaaattttatgaactgtcatgactgtagtttttggcaaggacattatcatgtcaacctgtaaataaacagacaacaataaaacatatcaaatccatggggagtctgacctatgtccctctgtcttataagcacaaggctttgccacatccaaaatattattcaggctccagggtataaaatgcttttggactgtggaaggtaacagctctcccctcaggcaggggtaaggtatctggggaatgcagagttgtgttcataaggaagatgtcattatcgtgtcttctcctgtgcctggtagcaggtcctgaaggtgaacgtctcagatgtcagacatgggtctatcgggttaggataggtacatgtgactgacagggactgattctccatgtaatcacatgccctgtcccaggagcagctgcaggagtcagccctggacctgaatagcacacacttaccctctgcctcacctacactgttactggccactccgtcacaaccagtccttactagtggacctggatctgccggctctcagggaggggctgcaatggataaaatccattgctagtggtggtgggagtccatttgtcttgtggaaaatggcagcatttccttattttataaggcataataatgctatgttgtgtacacataccacattgtctttatccatttgcccattgacagacacttagtttccatatcttggctgttgtgaatacagctgcaataatcacaggagcgcaggtatcttcacaaggcggtaatttcatctctttgggtatatttccataagctgcatcactggtcatatggtatttctgttttaattcatttaggagccaccacactgttttgcctaatggtaatgatgagaatacagaatgtcatagccgctacgaagaacagttttagatttgaggtataatccaaaagcaaataatgtttgatcagggttctcatatgaggctctaataaataagtccagaaagttttcccatcttgggcaaggatgagtttgcccctaattgtctttgaggaagaagattggcagaacgtgagatggagtctgttggcaggattcaggattcagtaataactagtaatggcacagaaaaatagagagatagagacatacagagaaagagagagagaatatgaatctcataagaggaaaatttgctaaatatcagcattgggttttcagtcatagacacatttgtatgagccaggaaccatggagtcaagtgaggagtggagaatatgttcagtccaaaaatcagcatattctcagaggcacccattgccccatcacacaggtggagaattttggaaaccagtgaagtgcgagttcacattaggtgattaagctaccatgtttcgataaactttcattaacatgcaaagtacttccatagataactgatgcacaaatatacgagatgcctttttgcgtttatggatgtctagagaaaaataagtgagaaaatttttccaggttgcagagatctgtttaagttgcagattccataggagagtgtctttgaatgaatactgttctattaattaaataggtcaaaattccctctgttggagcagccttccaattatatagatttctttatagcttcttgagttgtgaaacataaacccaaggattgacttactggaatatgactgctgtgttgattaaatttctgataaggtttcttccaatgatttgagaatagctttcctgtttttttactcaaggaaatgaattttcacaaggtctcaggacatcacgtttcaggtgctttagttaaagagactcttcttgggggcagtcagctttcttccaaccatgagctcatttcttcagcaaaccattcgctttgtgcctctattaagaattatgaagcttttgtacttcaatgcactgaaaatcatgccccttgaattaaatgttgattggcactgacatgaattggccactcttgtatatgtgtcctatgttatgggctcaacataacagtggactgagaatcgtccattagctgcctctgattgtggcactgaccagattgagaatcctcagagtcatccatgaaaaagagagtccttaggttcatgaggttcttggagacattcaggtaagtggaggagagaaacaggattgggggctgccagccatttcaacaagactgggaacaattatcatctatgtttaaaggtctacatcattccaaacaccctccaggtttctctgagttcattgtgatgattacattcagctgcttctccagtgagtttaaatgagcatgtggcaattcagatgagcctggctgtggggtttattatatgtaaatctgaactacataaacaaagagggcatgtctgaccgtatgagggtgcaaaatcctggagaccccacaccccacactcttgtgctttcttttctccagcaacctccaggtttttttgtatgagaattgtaatagattatctcatggctaagtcatcaagagacgtaaactctgagaaatacaagcagaaaattctccagatagaagatccaggggaagaacatttctagcaccttatctatgtaggggaaggcagtccatctccattacagacccctcacagcagccttcctttataaggaaaatgggtcaaattagccaatagggtaagaatcctataatgttccagccagaaaagggaaagcatcaatttgacttctggagactctgtatataggtcacattccatagaaagaagagcactaaattattaagattcaattgtaactacatatgatacttccgggatgcacaaattaaagatgaaagtgtgacaatgcacaggctctgtcagagaaggagaacgtagggaaactgaaagagaatggcagagagtaagacaaggacagaagagcaatatgaagcctctgacatcaactctgtaaggacaaggtcttggcaactcccgcattgaccacagattctgttaccatgggccatttgcagggttcctagctaaggaaaaagaaaaaaaaaactgcatgcacttcccaagtctccacttgtatcctgtttttcttagatctctaggacaaaaaaaatggcataaacctagacctagtgtcagtgtaggaggtactttctttataggcaagacactaggaagaagggaaaatgtgtgttattggactaggagatacagagatggctttaatctgaatagatctacacccgcaggtattctcgaatgcaacattcaactacaagagcctaatgaagaaacacgaccctccccaaacccctgcaagctcttgtattcactgtgtctccactgatttagtgcacctggagcttcagagcactggctccctcctgtgtcctagaatcttttctttgggtctttctgcagaattcaataggattagttaggctaatcaattgtttcaagagatggtgttggcagcatatattgtcgctggaagagtattctaagccaggacacaggcactttatgccggactaaagactctggagaaaatgttttgtgagccctgacagaaacctccttgaaaggtaagggctgggcaggagggggcactgaggagccacgcagcacacggtccagccctagaacaggaggctggggaggaggtttcctctcagggcctcggttttccttcgtcagaaaaaaaaaaatctaaaataaccgttcaacaagttgctgatatgccttcaaatatcctgctacaatggaacaattcatataacttcaggcaatgagaactattttttaaattgggcttctaggattataagtatcttaatagtgaaaatgtgaagaataggtatgattttactatttcaatggatacagaattgtgggagtcactatattcctatgaacaaaaaattcagatttcagtgttaagtaatgttgcctacattgtgtgagtgacggggcagtggtggatccgagagtgtggtgggtgcacggacataatgattcagaaagcaatatggaaagatgagtatctatggatacgaactgaaagtatgtaaatacttcacaaaatactaataaacggagttgaatataaaacccataattatccaaaacacaaatttcttggaagttattttgggaacatgatttcttaaagaactccaaactcttgtttcaacttctgactcctcgtttctgtgatataagaaaaccatttccaattatgcatctcagggcaattctgtaaacccagagcgtttctgctgaagatcctggggaatcaagacaccgggcaggtgatggagacactgtctcaggtgcgcccaacgaatctcagaggaacctgctggagagtcacgtggaacatctacagtcagtttctcagagtcaacagtgagctgtgttggtgcctgaggggaccatgatggggccaaggcacgtgcccagtgtcgtggacagtgatggtccagaaatgatctagatggtcttgacgctaatgaaatatgggttcagagtgaggagcataatctgtggggacttgttcttcagtgaaaggatcctgtccgcaaacagaaatggagcaggacatgcatttcttcaagcaggattagggcttggaccatcagcatcccactcctgtgtggcagatgggacatctatcttctttctcaacctcgatcaggctttgaggtatgaaataatctgtctcatgaatatgcaaataaccttagatctactgaggtaaatatggatacatctgggccctgaaagcatcatccaacaaccacatcccttctctacagaagcctctgagaggaaagttcttcaccatggactggacctggagggtcttctgcttgctggctgtagctccaggtaaagggccaactggttccagggctgaggaagggattttttccagtttagaggactgtcattctctactgtgtcctctccgcaggtgctcactcccaggtgcagctggtgcagtctggggctgaggtgaagaagcctggggcctcagtgaaggtttcctgcaaggcatctggatacaccttcaccagctactatatgcactgggtgcgacaggcccctggacaagggcttgagtggatgggaataatcaaccctagtggtggtagcacaagctacgcacagaagttccagggcagagtcaccatgaccagggacacgtccacgagcacagtctacatggagctgagcagcctgagatctgaggacacggccgtgtattactgtgcgagagacacagtgtgagaaaccacatcctcagagtgtcagaaaccctgagggaggagtcagctgtgctgagctgagaaaatgacaggggttattcagtttaagactgtttagaaaacgggttatatatttgagaacaaagaacaatagaaacacaatctaattgtaagagaaatattccattcaagagccaccacataagccaaactgacagagtgggaaaggccacactcagtaaagttgatacaaacataccataaaggtgctactatgaacaagtttttgaattagatgaataaatcatttggagcaaggttatttggtcatatgttaagagtaagcatgattcttacaaagtgggaaaattgtctttcaaatgtttctgtcacttcttaccataaagttcattttagaggttttaggattacagtgaaattgcacagaaggtgtgagaattcccatgaatccctgccccgcacggacaccgcctcctccactacagccatcctgccccacagtcacaaataagtcacaatggatgaatctacaagaactcttggttctttctttttctggtgatcccctaatataacaagcctaaattatcttggaacacccaggtattttcaatggctttctagaagtgatattagtcagagggaaagtgagtgaggctattactatttgagcactttcttccaaaatccacaaaatatatgttaatttggagtttttctaacttctggtttacaatgtcccttcccagagagtaagatttttaagcttttagtgaggctggaaaaaaaaatttttaaaaaagagaaataagctttcctgtattaggctgacttatcccagcggcagcaacaagcacagcccagacccaggaaaagtcttaataatattatctaatgtgctctggagactctttcagcactccctcaacatagggagaagaaaaacaaattttcctttgtcttatgatatgagtttatagagtcttgttctctgtaactagtaacttcaagtattctgttttatctaagaagcacaacgaaggtcatgagaagcctagcaggccagaactacagctgtctaggtaccggagtgagtgttatgagatcaaccagtgcaaggctctttagaacaaaacctagataacagacatctgggttgcatagcaatggtcatgtgtaatcctgagttatgaacctgttacaatttgattaactgtctctgtcctgcctccgtatccctgcttttgtgcactctaagcttgcttcaagctagcccaccccattttgggaagtgtgtataaaagtcaagcgctctctttgttctgtgcccagtctttggtcattgagtctgctgggtctgggtgtactcagtaataaaaatatcctcctgtatacaccccaagatctctctctggtcctccggattctgcaacatttcaggcagattcacatctctaaaaggccagcaagttctggtcaatcccataatgaaaatcctttaatgagacttggcacacgtgacaataagagactccttgtataatgccctagagttggattagacacactgtgagctcttgggtggtggttctgaataaggcagtttgtgcagcaaatgcaaacacatgcatgggatccaggcaggaacaaaagcttccctttacaaagtgggtgggcatctggagggagccctcagaggtgggcagtggtcgtccttgctgactgcacattagccagaggcgtgaccataattggtcttgcagggaaagagcaccactgaggtcataggttatgaaaatgtttgtcatcctccagtgagcaagtccatcctgcttgcttgtgggtgtcaactccatggtggatacactctgggagatgacaagatgcacacaaacctcctctcactaattatccactaccacacactcaagaccaacctttgctccagaaaggaatacgtgtctgtggaaatagacagagcttaagtattttgtaacctggtgaacatactgtgcaaaaccaaacgtttcaggaagattagctcagaaatgtttatcaagtgactgaagggcagtggcgggtgaggtgatgggacagcctcagggctgcacatgaggagggctccctcccccatgcaggcttttcctccaggagctgcaccaggaactcaaggaagatcagggagaattctgagaacaccctgctgtggagctgcctagagaagaagaataaatgatgaaaaatacaactctgagtaatgcatgggtttttgttcatgaaaactctctctctgaaagcttgtgaaggtcttgaaatacccctgattagctgaagacaaacatttaaaccctccttccacagggagttcaagcaggctggatgtgtccttctatggatgatcttcctcagccccttcctcttcccagctcatccctggctctctgtgtaaaaagttctcatcagcggaatgtggttgatgaagtgacgtcttcaatttcctcatcttctatgtggtcatgttattttcctcatctgaagtttaaaaactcacctgcatgcagcacatgacaggctaaaatctcttgtggacaaaacagtaacaaaggcacccaccatggttgagcacccgtgttgctgacaacgaccaccaggggtcaacgtcctcttcacaatcctgtgtcagagcagcacttgagtgatttcaataacaacttcccaggagaatcagctgaaaactacttgtcccattttccatacagatataacccctctattttcctgaagaaatagaaagagctgaatgctgaatacactgaatgtctgctggttttgcaagtttgtgactatatcactttctaatttctgacctgtgcagaccactgtacagacttttctcactggtgggaccaggcttccagatgtcaaatataaatgagcttcttcatataaaagtcaacacaagctcctcatggtttcagtgctcactgaatggagttggaaataaaacccacaattatccataacacaaattccttggaagttattttgggataatgagttcataacctgtagaccaagagtccaagagtgtttctattgaagagcctgggggatcaagacaccaggcaggtgatgcagacactgtctaaagagtgcccagcggctctcagagggacctactggatactcacgtgggacatcagcaatcactttctcagagtcaccagtgagctgtgctggttcctgaagggtccaggatagggccaaggcacctgctctgtgtcggggagagtgattgttccagaaatcatagaggtggtctctatgcttataaaatctatgttcacagtgagaagtctgttctgagagggcttattcttcagtgaaaggacctctgcccacaaatgttcataaatggagcagggcattcatttcctcaagcaggatcagggcttgagtcatcagcatctcactcttgcaaggctgatgtgtcgtttgtcttccctttcttatcatcgaccaggctttgagctatgaaatgccctgtctcatcaatatgcaaataacctgagatcgactgaggtaaatatggatatgtctgtgccctgagagcatcacccaacaaccacatccctcctctagagaatcccctgaaagcacagctcctcaccatggactggacctggagaatcctcttcttggtggcagcagccacaggtaaggggctcccaagtcccagtgatgaggaggggattgagtccagtcaaggtggcttttatccactcctgtgtcccctccacagatgcctactcccagatgcagctggtgcagtctggggctgaggtgaagaagactgggtcctcagtgaaggtttcctgcaaggcttccggatacaccttcacctaccgctacctgcactgggtgcgacaggcccccggacaagcgcttgagtggatgggatggatcacacctttcaatggtaacaccaactacgcacagaaattccaggacagagtcaccattaccagggacaggtctatgagcacagcctacatggagctgagcagcctgagatctgaggacacagccatgtattactgtgcaagatacacagtgtgaaaacccacatcctgagaccgtcagaaaccccaaggaggaggcagcttcactgaatgaggaggttacagggcttacgatgtttaaagttgttcagaaaataggctaagcaattgaggaatatgagtaatagaaatatgtacgcactctatacaggaaatatttctaataactgtcaccctatatgcaaaattcgcagagaggtaaaagcagaaatcagtcaagctgatgcaaagttccccacgtaggctttgtgcagatgtaagttctaaaatcagatagataaataatttggagcaagattgcttgataacatggctaatgctgaatatgattcctaaaaactggccaaaatatattccaatttgtctctgccacctctcttacataaaatgtattaaaaagtagttttaagaccacagcaaaattgaacagaaggtgcagagatttcctatgtgcccctgcttcacacatgcacagccttccccactgtcaccatcctgccccagagtcatcaataagttacaatggatgaacttacatggatggattggttctttcctcttccggcggtcccttggcataccaagtctaaactatcttgaagcacaacaggttcttcgagtgggttcctgggaatgaagccagttagaggaaaagtgggtggggctattcctattaggagtcttttttagaagactcataaaatgtatatgttcctatagattctgtgactcctgacttagtatcccttcccagacggtaagcttcctaaatgtttagaggcagatccatatctatggaaagaaagcaagttctagtgaatcccataaggaatgtcctttaatgagaagtggagaccttggtcatgaggcacatcatgtatgattttctataattcctttagattcactgtaagcttttgagggtgtttctggatgaggccctttgtacagaaaatgaaaactcaggcatgagttccaggcacaaccaaccaacttccttccaaagtgggagggaatagaagaaaccctctcctgtgtgggcgctggtccccctccattgctggctgcacattagccagaggcatgagcccaattagtcttggagggtgacagccccactggggttgctggctatagaaatgcctgtcctcttccagctgagtgagtcaacctgctcgcttgttggagtcaactgcatggcaggtgcactctggaagatgacaagatgcacacaaaccttctgtaaagtatcaattactacacactcaaaaccaaactgtattccagagacaggtgtctgcagggataaacagaatttaagcattttttgaatagggaagacactgccaaatgccatatgtttcaggaagtttaactcagaaatgttgatgacataactcagaaacgtgaggtgacatgacagcttcaggggctgcacatgaggagggctcacttccccatgcaggcttttcttccaggaactctaccaggaactcacagaagatgagggagattctgaaaacatcattctgtggtgctgcccagggaggaaaaataagatatgggaaaaaaaactatataaattattagatttgttaatacaaactatttctgaagccttgtggaggtcctgacataagccatcattagctgtgaacaaatatctacaccctcctttcctggggagttcagttaggttgcgtctcttcttttatggacagtatcccccaacccctttatttcctgcacacctgctgctctccatgggacgagttctcatcagtgaaatgtggttgatgtagtgaggtcttcacttttctcattgtattagtcaggattatctagagggagaactaacaggatagaggtctgtatttgacggggagtttttaaggaggactgactcacacgatcacaagatgaagtctcatgataggccgtctgcaagctgaggagcaaggaagccagtccaagtcccaaaacctcgaaagtcaggaagacgacggtgcagccttcggtctgtcgccaaaggacagagagcccctggcaacccgctggcttaagtccaagagtgaaaaagctgaagaacttggcgtctgatgttcgagggcaggaagcatccagcatgggagaaagatggaggctggaagactcaacaagtctagtctctccaatttctcctacctgcttcattctagccatgctggcagctcattagatggtgcccagggaggttgaggttgggtctgcctcacccagtctactgactcaaatgttaatcttctttggcaataccctcacagacacactcaggaacaattctttgcatctttcagtgcaatcaagctgacactcagtattaaacatcacactcatcttctgtgttgtcatgttcctctcttcatctgaggttaaggaactcaccagcatgtagcacatcgtagcttaatgtctctcatggacaaaatagtggcaaggcacccactagggttaagcatcctgtgtcgccgacagcaaccaccacaggaccaagtctctctaccatcctgtgtcagggcatcgcctcagtgattgtattggcaacttccctcgagagtcatcttaaaaacggcttgtctcatttcccacgaaggtatagcccatccattttctcttcctagcaaaatggaaaaggatgaatacacggaatgtctcctggtcttgcaacttggtgactttattcctttctaatttctgatcaatgcagcccactctacaattttttttttcactgaaatgacccacattctggatgttaaatataattgaacttcctcatttataattcagaacaagtacctcagagtttctgtcctcatgcaccactctaaacttacacaagttgtttatttatttgtttcattttctggcatctctactgggggtcttcatcatacccattttatgttatttctacaaatgatttttaaaatttataggtacttaattaaatattcaggaaacaagagaataaaatgaatgtaaaataaaataaaagtaaataaattaatatttaaaataaagaagccagcagctgaaagcaaggaaaatctattatgctgggtcagagagtatggagaactcatagtacaatatcttctgcacgttaatcattacttctactcaagttacagggtcctctctctttatatcagagctttccctaacatgtgcaatgaagactgaacacagattcctccctcaagactgacctagcatctctcactgagcctgagctgacaagtcatagatatcacatttgtctaagaaaataatgacaccctgtaaagttacctaccagcgatatggagacaatttgaataatataaataaagcctaaacttgataggtagtcatttatccttagaaggattgactgctgtctctacatgtgttttttatcacagagaagctactagtgccacagtccaagttgctgaatattttatttcctagcatgagttactacagaatgtgttcaacatgaaagaatgcagctgttgttaagggagaggagatgtgattatggaacacgagcagggatccagcagacattcctctttcacgtttgccccccaacagagacaccagtaaaacgatgaaatgattgactttagtctccacagtctaatgtgagatttataccagatgttttctgccactgttttatagtagaaaatataatctctaaagaaattccatttttagagacaataccatcctccaggaagctgcaaatgcccataacagagagtattatagtgccttgtggccaggagctacaacacctgggtttggaaactaatggacagaaatatcaggttttcttgccaaatctatgatgaaaatttggagaatgtttctttccatctccataacaatatgttgtgatggagtggaggtcctggtacataagaaggtatgtgttcgcagtgggtacagaattagacccataaaatgattgttctactggggttcccttgttgttggaccagctgaccaagaaagtgttgtaagaggtgtagtatttagtgaatactgtcatatttttgaaggtaccatatttgaagctaccaggagaaacagagatacatcaatctagcctagggagactctatgaatttattttatttccttcaaaatgaggtaaaaaattgcatcagttgaaatgccgatgataatcaagtgatgaaagacaacatccactcagtgttttaggtgtggtttaacccaaaagttatacaatatgtgagaacctgaactctggagccctggccatctctcagaagaatctagaaggtagactgacctctcccacagtgtgatgtccatggagactggggatggctactgtctcaatcttgggatcccggaatagtcttaatatgattctgtgtgtatgtggatcattgtgtgtaagtgggaggattccaataactgtgtctgtgtgtttgtgagtgtctatgtttctgtgtgtgagcttgtgtgtctttgttttatattaaaatgagtaatttagtttctgatcattagactgtgtctttgagggagtgtgtgggagaatgtgcatgcctgtgtctgtgagttagtttgtaaaagggtatgttatattgaatgtgtgtgtctgggtccttcagtatttgagcctattaatttacatgaacatgaattttttgaaggtgtgtaagtataaaacttttgtaaatgtaattgtttgaatgctagtgtgtgcagagctatttgagtgtgaatgtgttacttgtattacttagtgagtgtgtgcccctatgtgagtttgtttgggtgagtcattacctatgactctacatatgaaggtgttgagggtgtgtgtgagtctgtgagcatgttttcattacctatgactctacatatgaaggtgttgagggtgtgtgtgagtctgtgagcatgtttatgtgcatgtgaaatgttgttatgtatgctttgaaagacttgtctcttgacctcaatatcatttgtctgaaaataccaggtatgtttaagcccttagaatctaaggaatagtttgttgtttaggataaatcctcaataagattaacaactgatttctcaccaaaaatcaggaaggccaaagctcactggagtggcatatcaaaagtgctaaaatacactatcaatcaaaaattccatactagcaagaacaccttcaaaagtgaaggagaaatcaagataatagaaataaacaaaagctatggagtccatcaaaaccacaaattcctaatgagaaatactaaatagagtcctgcaggctccaatgaaaacagagtggagaatatttaaaaatcttacacctaaaagaacaacaacaacaagtatcccagtaatcacatttgtgtaatgaaaaccaatattgttttatttttgccttgagtctcatgttctattccttttttaaaaaaaaaatagatataatagtaatgacaaatttgaataatgtgcctataatttatggttataaaattcattataaatttgaataatgtgcatataatttataatgtatgaatatgtaacaacacaataagtgaaaatggatacagctgtagagaagcagagttgtatgcactattgaactaaggcaatcataatttaaactactctgttataaatctgaattaccaattgtaatatccaggttagctataaaaacttaagtaaaagtaaaaaaaaaaaaaaattagcaggacagctgactaaacgtgcctgacactcttcaaccccacatgaaataaccacagaaatgaataaacagctgagactagagaaattcaacagagttagatatcatactaaataataaagcaaaaagcttacagctgaagaatttaatgaataaaataaaaatgcagtttacagattcaataacagaaaataacgagcaaaaataagaatttctgagcttgaagacaagtctttcaaaataattccagcagaccaaaaagaaaaaaaaagagaatgaaagagagaaggaaggaaggaaggaaggaaggaaggaaggaaggaaggaaggaaggaagataaaattttaaaaacatagaaaccctatagttttcaaaacacaatttgaaaacaagtttttgagttatggaaaatccaggggaaaattccagagggaaaaaaatgaaaatgatgtaggaaacatatttaataaaacaagagcagaaaacgtcccatatcatgggagatagatggttattcagatccaggaaactcaaatattccaaacagactgaaactaaacagatcctctctgaagaatgctttcctcaaattatcaaaagacaaagatagagcatgatagagtaggatagtatattcaaaatattgaaataaaaaagtatccagccaataatataatacctagaaacattattattcacaaactaacaaatatataatgtttatcggactaacatgaacaggaaatccatcacctccaggctggccttacaagaaatgctcaagattcttacatctggaagagaaaacataatagccacaattatgaaaaaattttaaaaaaccataaaacccactagtaaagccaatacacaaaaaagaaaataaatgaatcaaatcttatcactacaaaaattacaaaactacaaaaataaccaataggttaagaataagaaacaagagatacacaaaacaatgagaaaagaatcaatgaaagtgaaagaagtaagacctcttctatctattattagcttgaaagtaagtggattaaattttacatttaaaatacatagactgagttgaagagaaaagaaaagaaaaaaagaaacaaacaaacaaaagtgccaactataggctgctatgttaagcccattttgcattgttataaagaagtacctgagtctggacaatttactttaaaaacaaaaacagtctacaaattcaatgcaattcccatcaaaatatcaccatcattcttcacagaactagaattcatatggaaccaaaaaagacttggataggcaaagcaagactaagcaaaaagaacaaatccggaggcatcacattacctgaattcaaactatactatagggccacagtcaccaaaacagcatggtactggtataaaaataagcacatagatcagtggaaaagaatagagaacccagaaataatgccaaatattatatcaatgaatctttaacaatgcaaacaaaaacataaggtggggtatggagaccatattcaacaaatggtgctgggataattggcaagccatatgtagaagaactatatcctcatctctcaccttatacaaaaatcaactcgagatggattaaggacttaaatctgagagatgaaaacataaaaattctagaagataacatctgaaaaactcttctcaatattggcttaagcaaagtcttcataaccaagaaccaaaagcaaatgcaacaaaaacaatgataaataggtaggacttgattaaactaaaaagtttctgcacagcaaaataaacaatcagcagtgtaaaaagacaatctatagagtgggagaaaatcttcacaatctatacatccaacaaaggactaatatctagaatctacgaggaactcaaacaaattagccacaaccaccaaaaccaccaccaaaaacaattccataaaacaataagctaacgacataaacagaccatcctcaaaataagatatacaaatggcaaataaacatgaaaaaaatgctcaacatcactaatgattagggaaatgcaaatcaaaaccacaatggagatgcaagtcaataccacattactcctgcaagaatagtcataatcaaaaaataaaaaaatagatgttggtgatgatgcagtgaaaagggaacactggcgggaatgtaatctagtacaaacaccatggaaaacagtgtggagattccttaaagaaaaaaaggagaacaaatatttcatccaggagtcccattactgggatctacccagaggaagtcaccatacaaaaaagatacttgcacatgcacatgaatgttcacaggagcacaattcgcaggtgcaataatatggaacgggcccaaatgcccatcagtcaatgggtggataaagaaattgtgatacacacacacacacgcacaccattatatatatatataattttttttttttttttttttttttggggagacggagtctcgctctgtcgcccaggccggactgcggactgcagtggcgcaatctcggctcactgaaagctctgcttcccgggttcacgccattctcctgcctcagcctcccgagtagctgggactacaggcgcccgccaccgcgcccggctaattttttgtatttttagtagagacggggtttcaccttgttagccaggatggtctcgatctcctgacctcgtgatccacccgcctcggcctcccaaagtgctgggattacaggcgtgagccaccgcgcccggccatatatatataattttatattttctatatatacatattttttatatatgtacatatatacgtgtatatgtgtatatatgtatatatttaccatggaatattaagccataaaaaggaacaaaataatgacagtcacagcaacctggagggaattggagaccattattctaagtgaagtagctcagaagtgggaaactaaacattatatgttctcactcatacgtgggaaataagctatgaggatgcaaaggcataagaatgatacaatagactttggggacttggaatagatgaggggggctgagggataaaagactacaaattgggtacagtgtatactgttggggtgatgggtgcgccaaaatctcataaatcatcaccaaagaaattactcatgtaaccaaaccctacctcttcccccaaaacctatggaaataaaaataaaattatgtaaagtaaaataaaataaaggtatatttggctgacagttctgcaggctgtacaagaagcatagtactggcatctgcttctgtcgatggcctcaggaagttttcaattgtggcagaaggtgaaaaaggagcacgtatgtcaatggcgatagaagagaagaaaaggcagaaaattaaggttgttgggtgggtgccatgctccttaaacagccaggtatcatgtgaacgaatagaatgagaacacactcattaccacgtgaagggcatcaaggcttttatgagagatccgtgttcacgacccaaaaacctccctctaggtcctacctccaacaccggagataacattgcaacatgagatctgaagtgaacaagcatccaaactatatcagttacctacaaaaaactcactccaattgtaatgatgcacttacgttgaatatgaaggtatggaaaaagttatgtaatgcaaataaaaactaacttcacctggagtagctatacttgtagtggataaaccagactttaagttaaaagctgtaaagacagacaaagaaggacactatgtataaataaagagttcaacccaggaagaaggcataagaattttaaagatatatacccaacgatacagtacccaggtatgcagagcaaatgttatcagatctaaaaggatagacaccaatacaataattgctggcgacttcaatccctcactgaaagcattgcacagtttatccaaagagaaaatgaacagaaaatttcagattaaaattgcaccagaggccaggcacaataactcacatctgtaattcccgcactttgggaggctaaggcaggtggattggtagagagctcaggagtttgagactagcctgggtagcatggcaaaaccctgtctctacaaaaaaaataaataaataaaaaataaaaaacagccagtgtggtagcatgtgcctaaagatccagctacccaggaggctgaggtgggaaaatcaccagaacccagggagatagaggctccatagagccctgatggcacccatgcacgccctcctgggcaacagagcgagactgtatctcaaaaacaataattgcaccacagactgaacggactcaacagacacttacagaacacttcgccaaacagcagcagattgcacattctttttaacagcacaatgaacatcctccagaatttaatatatttggacacaaaaaagtctcgaaattataaaaatatcaaagccatatcaagtatcatttccaaacacaatgaaataaactagaaaccctagaggatggaatatttgaaacaatgcaaatatatgaaaattaaacaacatgcttctgtgtgaccattggataaaggaataacttaaaatgaaactttaaaaatttattgaaataaataaaaatagaaatacaatatagcaaaagctactggttacagctaaagcaatattaagagaaaagtttctagcaataaacacctaaatcaaaaaagtagaacgatttctcaaaaaccacccacctatgtgtcttaagaactagagaagcaagaacaaacagaattcataattgtagaaaaaatagacagtaaatatcagagcagaattttaaaatacagaaaaaaaattctataaaggatcagcaaggccgggcgcggtgactcatgactgtaatcccagctttttgggaggccgaggggggcggatcatgaggtcaggtgattgagaccatcttggccaacatggtgaaaccccgtctctaccaaaatacaaaaaattagccaggcgtggtggcacacgcctatattcccagctacttgggaggctgaggcaggggaatccctcgaatctgggaggccgaggttgcagtgagccgagatcgcgccactgtactccagcctggcaacagaacaagactccatctccaaaaataaataagtaataacaaaagggatcagcaaaacagttgttttcttgaaaatgtaaaaaagcaagaaggcattatctagattaactacaaatgaaaagagaaaatgcccatatacatacaatcagaaatgaaaaaagagacatcacaatgataccacaaaaatacaaaagatcattagagggtattatgaacaactatatgctagagaaaattcaagaacctagaggaaatggataaattcatgaacacatgcaaactaccaagactgaaccaagaagaagtagaaagcctaaacagaacaatgaataacaggagataataataatgaaaagtctcccatcacagaaatgttcaggacctgatggtttcacagttgtgttctacttaacttaaaaaaaaatcatgaaaacagattattgttaaactattcaaaaaattgaagaaaaattatttaattataattttaatattatttttaaaatttcaacttttatttcaggtacagggggtacatatgcaagtttttttacatgggcatattgtgtgatgctgaggtttggggtatggatcccctcacccagggagttagcataatacccaatagtcagtctttcaacccatgcacctctctctccctccccactccagcagttcacagtgcctattgtttccatggtcatgtccacatgtgctcaacctttagcactcactttcaagtgagaacatgtgatattttgtttcctttttctgtgttaacttgtttacgactatgacctccagctgcatccatgttgctgcaaaggacatgattttgtttcttttgtgacagagtctcactctctcaccaggcaggagtgcagtgacgcgatctcagcttactgcaacctctaagtccctggttcaagtgattctcctgcctcagcctcccgggtagctgggattacaggcatgtgccactatgcccagctaaattttgtatttttagcagagagggggtttcactatattggccaggatgatcttgatctcctgacctcatgatctgtctgcctcagcctcccaaagtgctgggattataggtgtgagccaccacacttttttttatgaatgtgtggtattttatgattttatattgcatacataccattttattcatctaatacatcattgattggcacctagattgattccatatctttgcggttgtgaatagtgtggcaagaggcatgagtgcatgtgcattttttggtagaatgatttattttactttggctatatacctaatgatgggattgctgggtcaaacagtagctctgtttcaagttctttgagaattctctaaactgctttgcacagtgctgaactaatttacatttccaccacccatgtatgtgttcccttttcttcacttcccacccagcagctgttttttgtttaacttttttcatattagctattatgactggtctgagatggtatttcattgttgtttttatttgcatttctctgataattaatgatgttggaaatttttttcatgtctgttggccactgagattgacaggcttacaagtgtcttagtccagcagttttcggtaacaggctatccactttcattttctcttcctcacatgccccatttctgggttgtccatcccaaccaacagttactgctggagctgaatccactagcccgcttccatgggctgtcaggaacacattgcaagggtgacacacacgatgatccatctctgcagagccaactctccttctccagagattcatccaagaaacaattttgactatacctgagctctgtgacatctgaggacatggtttgtattactgtgcaagacaaacagtgagaggaagtcaatgtgagtccagacataaaccttcctgctgagaacaatggaaagcttttcttctaagataaggaataagaaaagaatgcccagtcttaataattctaatcagcatattgatgatagttttaaccatagaaatttgagaaagaaaaaaatagtaaaaggcatacaaattgaggggaataagttaaattgtttctgtttacagacaatataactttataaattccaaaaaaataaaaaattctgaaaaaacagccactgaaaactaacaaacaaatttagtaacattgcagtatacaaaatttatatggaaaactcagtagtgttactaaaaactaaaaattaactatttaaaaatcataagacaatgtcagttgcatttacaataatattaaataacttacttagtggccatgcacagtagtttacacctgtaattcttgtactttgggaggtaggggagaatcacttgaggctaggagtttgagaccagcctgggcaacacagcaagaccaatatctatttctaaaaatcacttagaaaaaatgttggtcaaataagtgaaaatctgtgcattgaagactatatgacattgatgaaataaataaatctatatgcaaatatatgggaaactattccatattcacagattgaagataataatactgttaacatgtctatactacccaaagcaatctacagatccaaagcaatttctatacaaatgacattttcaacaaactactttttaaatgataaaattgaatcacaaaagaccccagatgtccaaagtaaccttgaatacaaacatcaaagcggggggaggtttcctagtacctgaactgcaaatatgctatgaaactacaataataaaactgcatgctgctgactttctaaataaactttaatattctgaattgaagttatttgacaatttcttctatcattttatctttactaaagtgttgcatgagtgtttatctagacagataatgtgcaaagagtcttcctgggtggtaaaatcccataagcgtctccaggagctccgagctctctctaggcttctcagtatgttcaggttcaagagacagaaagaattctctcagcccttcactgctttttgccctcttgacggtcagaagtccagaacatgctttgtggggacataatagaggggaccaaaatagacactttcagcaaacccactataacaagttctgctgcccatgggcatcttctccaggtacatgttggtcgccagaccctcaggctcacctacaccatgtggaggaggacctctacccacactcatttcagcacaactaccgtgtagctcagcatcagtaggtcacactacaatacattaaacatcactcagctaattacttattgaggttttcatttgtccatatgctatcaatattgggcagtttcaaatgacaacctagaggacttaatgatagttaaatttatgtcttctattacggaaaaacatcccttacctaatgacaggttcagctgtttttgccaagatggtgctcttccctggcctgctagtctcctacatgagaagcatcaatgaactgggcagcaccacacacttgtcaagtgatcactgggaatgatgtcagctacagaggatggggtagggttgctcatacctatgctccttacttctaggacacatcaggtgtctatggatttagagcatgtctgcaccctggtggactgcacactttacccagggagaaaggtctctgagtgtgggtggcaagccacctaggtgccaaggtaagagaccgagggcacaagctgttccagtataataaaatatataaaataagaatagttatactagatatagatcatagatatgattatatatgaatatcattaatcattagtttatagcaattactctttatcccaatgttattaataatcctcgctctataatcataacctaggaaaaaccaagccatacagagataggagtggaagggacatggtgagaagtgaccagaagacaagactgcgagccttctgttatgcccggacatggccaccagagggctccttggtctagcggtaacaccagcttctgggaagatgcccgttgccaagcagaccgtggtctagcggtagcgtcagtgtcaaggaaaaacacccgctacttagcagaccaggacagggagtctccctttccccaggggagtttagagaagactctcctcctccacctcttgtgtaggggatcagtcaggcccacccgagttatctggaggcctaatcatctccctctgatgctgtgcttcagtggtcactctcctagtctgctatcatgttccatcctgtatacctggctctgccttttagataacagtagcaaaattagtgacagtactaaaagtctctgatatgcagaaataatggcgtaagctgtctgtctctctccctctctctctctctctgcctcagctgtcaggcaggaaaggacccctgtccagtggacacgtgacccacttgaccttacctatctcattggagatgactcacactctttaccctgccccttttggtttgtgtccaataaatatcagtgcagccagacattcggggccactaccggtctccatgtcttggtggtagtggtcccctgggcccagctgtcttttatctctttgtcttgtgtctttatttctacaatctctcatctccacacacagggagaaaaacccaccgaccctgtggggctcgtccctacatctgagcttctcaatggaggtctacttctctatgagactagcaccttctgtggagtctcatgctgaatgtctccttcttgattatggtcatcggttatgcagtgctgtaattagaaacccttacagaataacctacaaaacaagaatgatactaccttctacagacatgacaattctacctaatgtgcacaactggacctattgacatcttagccaggagaggatgcaggcataaagcagatgattttccgattgttccaccctaccgggttatattgaacagtggacacaggattcaacaggtaccgattattaatccagtgaggaaattatagaatagtcccaagtctaggcagagaagagtagctgaagacagtactttccctgcagctctgagattcactaaaatgtccagctctgtccctcactcgtgaatatcacagactaaaggacacccttcccacagcattggctctccatgaagatttgaaattgatgcccaggcctcagggtctgctgacagagctgtgacagtgggagtggaactcacacagagcaaaacagagtgtgttgcataataaggctgtacaacattttcataatggagggaatctcttggtcccaggaagatgacaatttaatatgtctcaggcctgtggcgctctctttaggagctttgtgtgtggcttctttgtatactctggctccaggaactccagtgagggaagagattcgtcacctcctgtgcgaagggggctgaagcgaggaagacaagtggcctggcttccacagaacccataagctaaaacactccgagttcccttgactgcaagaaatgcagctgtcatcacggtttcaagtgccagagtctttaatgattatgtttcaactcatgagagtgccaggaaaattccaccagtatgaactactcaaatatgtcattttgtaacattacttcattgcttgctctcatatcctccatgtttctgaaaaagcaaagtttccatgctttatcatctgcaccaatgaggccatatttaagctatattttcatatgaacgtctcttgaagattttaaaatagcaacaaatgttgcaacaatatgcttaaccagaaaaaaaataaagcaaagcagtctatgttgactcatgtgacattgataatgtatattagattatattggttgcttattcagttggtcatgggagaagagccttctttccagccaaagaatactaagaactccctcttctaatgacgaatttcagctgatcttgctgagaatatttagcaagaagacagaaacagagactcctaaagggagctccagagtcctgagatacatttaagttttcattttcctggaacccagagattccccactgttctacaagacaagaccccattctatgaccctgtctgaggagagctcaggggcagtgagctccccctcacattaccccttcaccctatgcccttggggctctgtccatgcaaataagtcccgggttcaagaacgaatagaggcagggctgtgagtgttatgctgtgtgctggctctgagctggggtctctagtagcactctccacatccatagatacatggcccctccgctactccttctctgcctgctggctgccctctgtggtgagttactcatgatttcatacgtggggagacacgggatgaggcaaatgtgtctgtgactcacagatgttctctattctcaggggttcacagtgaggaccaccttgtgcaatgggaggaagaagtagtggtccccttggtcatgctcagcctcacctatgccgcctatgcacattcaatttctgaacattctgtttcctggatccaccatctcccatcaaaaggtcttcagtgtgttggtgtgatatgggttaagggaaacactaagccccaaccttcagggcagagctagcatctccagaaacacatagtaaaaaacaagaaaacttacagctgagaagtgtgatggctggggatgcaggcgtgtattactgtgctcaaggcactgtgactcgaatccagagtgaactcagacacaaacctgccctgcaggggttcttgggaccacaaggggaaggatcaggtcaccagggtgtacttaggaaccactgaactgggtcaggcacaggaggtgggggtcagggctcctccccagggaagggcttttaatctccatgccttgtaaacctctgacaagccaggcagacacagacatatttttaagctatggaaaaagatgtacctttcattttggaggaaaaagatcataagtgtgaaagcaaaacttaccaagggccaggtactggaataactgtaatctacataatcactctaagaattctaagaatttacaagtgcaatcatcctcatttcataaactcaccttaaataagagctttctaactgatcccatatattctgattttgtttatttcttcaacactttattatcttcaaggcatttcactgatgtcaattttagaagaatcatatgcaaacagcctctcgtggtggttgaaagcccacagcctcgccagtcctgtggatatttctggatgttctcagagtctccattgtctgtagagaagaattgtcccaatagttatttcacttttgtcttccacaaagttggaaagatggggatcactcaggggaatcgagatcaacaaacagaaagcctgaacccaccatatacaagataggatgtatttttttaggaatatattaattcccagaccctcaggctcacataccccatgtggaggggaacacacatccactccttcactcaagccaagctggccatgcagctcagcttctgcaggctcaggactgcaagctctccagtgtgggagtggagctaatgggaggtgaggccaagtctctgccctcacagagtctcatgatgaagatctgatgaaatatttccacagtaacatttctttggatatataaatgtagaatatattttgaaataatgaatgatgtatcttctgatggattcatgttggggaggcaatagaggaaaaataaaggtaattttaaatttctgctcccagctacagcacttgattttgatttagtgcatgactgtttgaaattttttgatgcagtcaacttcagcagcccagacctggaagcccagccaataaatgctccagattgggaaatttaaactgatgggagctgtttcatggaggaggaaaaatgctgagccagttgtgcgatcataactattgactggataatagaagcctgtgccctttctgccagtacctctggtccgaaacctgagctaatcaccctcaccaagttgagtaaacattgacacctatactaagtacaccttcatggtggtgcatgctcatggggccatctggaaagaaagaggccttgtctcatcaggaaataaggacattaaacacccaatagaaatggtgttaaactactagaggtgtgttctcatccttctcatcctccattatgcattgccctgagcacccaaaagatgactcattggcacctaaaggaaatcagactgcagaaaaggctgagaagtgagcagtgcaggatgcacacctgctatgagctttgattccacatctggagtttccatagttcaaactccattatactaaatagacaagaagcatgcctgcgactggggatttggtaaaacagatccagatttattctgaaaaactaatgcttatggattattcttactctccgaggccctggtctacaattttaaaacatttacatgagggcacacactccaaatgatattcccttgcagactttgtatgaccatgtgtcagaatggtcagaaaactgttcagaaagtcacatacgagtgtgttttgtgtgccaaaaatatctttgagactgaacaaaatctttgcaacgaagaggtacaacacagagaactgtgactcttggaagattggcaagtggattcactcacatgcctgtggccagtggcaactataaattcctcctgattgttctagatattgtttcaagatgggtagaagcatatctcaccaagtcccaaagagccacatgactggctaaggcataattcaaggaaatcgttgccaggtttggactcccatgcactatacacagtgacaatgatctttcttttatttcagagtttactcaaaaggtaagtcaagcactgcaaatcgaatggaaaccacagtcatcatggagaccacagtcagcagtaaagaaataaaagataacaccttgaagaagacaatagccaaactcaggcaggaaattgacctgcgttgggatagattttttcttattgccttgttctggggcagaacggtgccctgaagtgggcttgggaaaagtctctttgaaattatatataggaggcccttccagacctcttgccagtaacagcacctttagagctggtaaaagagcccagagttaaacaatatgtgcagattggtgcagaccttgctaactgcacatcagcttgctatttccaggcctgtttattccacagtgagcctcttcaccccttccatccaagagacaagatgccactacagtcttgtaaaagtcaaaaacaagatcagcagctgactgaaaggtggaacagaccccatgatgtgctactgattaacctttgttcagttaagttatccaatgtaaagccatgggtgcatcgctgttggagaaaacctgtcccacctcaatttgaccccagataacagactacctggtcacataagcctaaggaaaacctgaagttgctgataaagaggagacaagaagacagataggtaatacccttctgttaatataaaattcttaatgagttctatagttataagtacattatttctccttattaaaactaatcttttttgctgaatgggtggaagatggtggcttccctgcaaaagaaaacatagttggttctgtaaagagtttgcccatttcttccactataggcctgccctggcataatacaagctcccaacgtaagaatttatgattttccatccattggagaagccatcttttccatctattataaaaacagaagacacttcattaatatcactcccactataggctatgccatatccagtgaggtaggatggctgacagtggtgcgaatccaagtaattggtcaagcactgctatgtgtgaagaaacaccacagcatactctacactgtcactcatgatatggaattgttgcctccttagcaatgtaactgagcccttaatatgtggctgggatgacaaggcaatgccagcctgcagagtggaatctgttcttccctctggggttagctacagcctgtggcactcatggctggccctactttccttacaactggactaaaagaagcaactggatatgaccttatatcccaggatgtaactgtccaaagtgcattctctttatgtcaactggaaaagtgtgaaagacagacactactgacataaacagacatcctagttgttctgcccactagccagctcttccccccaggtggcagtcatagatttagaattgcaagtagaggccctggctaagcaaaccaccagtccctttaacaacacctaccatgccatcatcattcttactgaagaaacctcacagatttgacaagtgacactatgaagctatatgaccctaggtattgcaactacagccaaaggtaacacttgtgtattaatgaacactgaatgttgcatatatatacaagattagtcccacaatataactcaagctatgcaagcattagatacccatatttctgctagagatggatgccctctctcagaaccccatgacagcatggtttagttgacttcctaacacatggaagagtttcatatatagtagagctggtattctgttcattgctatcttcaattgctatggattttattgctatcttgcactttaagtgagaatgtaatactgaccttctcaaaaactcctaggtccttgcaccataatgctccaacaaacacctactgtaattccggagactccagaatatttccaactccagtttaatggattcccttccaatacatacaacctatgccctttctaaagaagtagccagaatgactatgacacatgttttccatagaaacgaaatggaatttgacagtggggaatgatatacaggcagcttaatttcaaaatgcattttaaacttagtatttgaggttttaatattattttttatactccctgaaacctgaaatttcacacttacattttaattcagacttaatagcaacaaataaccagaacacatgaattgcctgtaatctctataccttgcattgtaagccacatttcaagtgtaaccttacttgtcagcacagtatgtttaccacaggcataattgcttgtcctgactgtccagaaggcagggtggtattaagtatgcggcctctggagctgggaagtctggctttgtataccgtctctgccactgctaactggaggacaatgggccagttacttcctgtaccccagttttctcatatgtaaagtagggttgttgtaagaatgaaattagttaatatttagtacctaacaactaataggcattacatggtagctattggtattgctatcgtcagagaacacacaggagtccattgttatttttaccctccccctccaaacaaaatgtgtaagacactagacatggtagctctgtaacggggttcgtcatgtattaaactgtgtacccaaatgatatgtcaaagtcctgacaaccagcacttcagaacacgtccttatttggaaatatggtagctggagatgttattagtgaagatgaggtcttacttgagcagggcaggccctcaatgtgggaagatgggtgtctttctaagtacaaggaaatttggacacagagacagagacatacagtgtgccatatgacagcagaggcaaagatcagagtggtgcagcagtaaaccaatgcatgtccgggattaccagtcacctccacaagtgaggaaagggcaaggaagaattctcctgagtctcagagggagtgcagcccagctcacacttgattttggacttctagtctctagaactgtgagagaatacagtcctgtcatttttaagccacccagtttgtagtatttcattttggcagccctaggatattcatacagaattcttcacccaaaaggaagcactctttcacacaaacagtcaaagtcctggatgacagacaacctggagactgcaaacctccaaggaatcaaaggaagttctataaattctaggggccccatctttcaaaggctgctcctcaagtccacacccacactttggaaggagaatcctgctcttggacatgggatccttagtgagccaactgccaataatccaacatcgtcatgaattaaagatctctgacatttcctcttcaccaaggggaattctgtcaagtagtaagtaaaacccttcttcagtaatctccacaccaaacagttctgcatggcttgggacgcctcaggaaacttataatcatggcagaagaaaaacgggaagcaaggcagtcatacatggtggcagaagagaggttaaacttttctgtctctcttgggtgtaaagatataatcttgaggcaaacagcagaatcaattttcttacgccttgaaatagactccacctttctccctttcaccataaatattcccttcacattaatctaactttatgtttgcatcgaactatgtgcctttttggaagttccggaagctaatttgagacagatagacaaagtcgggagaccctgatgcagaattccagaggtgacttcaatgttgctagttaacaacccaggcattgcccagatgatgccagcccaagatctaggtggactgggatgccagagagccgccagaacaagacgcacagacctggttctcagcccaaatcttgcatgcctttcttaccaacttttccttttttaaacccctgcctttccttcaaaattcaagtggttgcttgggatgggaatgcggtcacttcccctttaccattatggttaatacaataatctttgtaccagatctctctcttgttaattggatcctgcaggtggcagattccggaccagagtgaggttagaaactgaatgcacatactgggtggttcacagacacggtgttctgtgaagtttatgggtggattcctggggaagcctgcaagcctgttagtgattagcagaaccgcatccagctactgggatctgcacgccaggtgccgtgagcccctcaccatgttccctggtcccagctgcccgcggatggttcagccttgacaacgggctcggtgttctgggtggtgggagagcaagggggccccttgggcagcgtgctacagggctgtgaatccaggggcccacccggtgttccctgtggagtcactgagggaatgaggggcttctcagggcacagagctgtaacgcctttgtgcagtggtggctgaatacagtgacactgggcgcgtggtgagaagcggggcaaggtcagttcactggaccctccgccctgagcctcagatgagtcgggggtccccagacaggcccggcctctgccctgcggcggacactggagcctttgctgtggccgccaccgaggagccttgacctcaaagcagcgggaacctctctacccacctcggaaacctgaaggcagcggcggcctctcccagccaggacctcgccggcatccgggtctccaggcccaaccctgtaccacataaaggaagtccccgctgagctaccggggggacacagcgccgttgggtgggcgggcgcggcggggcgggaagcaccggggcagctgccacagagatgcgcgggggctgtcgggaagtgggcggtccgggagacgcggggctgatgggacgtgggcggtccggggacgcgcgggggatggcgggacgtcggcgatcggagatgccagggggcagctgggacgtgggcggtctggagaggcgcgggggcagctgagatgcaggtggtccgggacgcgcgggggctggcgggttgtgggcggtccagggatgcgagggggcagctgggacgtgggagttccggggacgcgtggggtcgccaggaagcggggtctaggacttagatccgccttctcttcaggccatgcagccccgaagctccgaatcctgggatgactcctgtccatgttggaagggaccctgccagtcctggcaaggttcaaaggccttagggcaagaaatgttagtagagtcctggaagacgatgtgggaacgggtagcggacaccggatggtgatcgttctcctacaagaccttgacatggatggggagaaacagagaagaaccttccaagtttgtcccactggacatgcccaccacactttaccagcccttttctagaaggcctgtgcgtaacacatgaaaaagctccgctcgacctttccctgaccttttaaaagaaaacatttgctgcatctaatccgcctagatataaggaggttcccaaatgtatgacagagtcagaaaattacatgtcttgtaagttaccatgtgcttgtcttttgttttccgttttttttcgtttttttgttttttgtttttgagacggagtctcactctgtcgcccaggctggagtgcagtggcaggatcttggctcactgcaacctctgcttcctgagtttcaacaattgtgctgcctcagcctcccgagtagcttggattacaagtgtgcaccaccacgcctggctaatttttgtagtttttagtagagatggggttttgccacgttggccaggctggtcttgaactcctgacctcaggtgagccacccaccttgcctctcaaagtgctgggattacaggtgtgagccaccgtgcctggccgtaagttaccatgtgctttttaaaaaaatcatagcaaaggggtgtcttctggaaatgacattttgaaatggtgttattagaccacccctggaagggacacagtaaccacacgtccacgttcgttcagtgggtgagaggacatggaggggagacctgggcaggaagggaagagggttccatgccaggctgctcatatttagaagacattttcatatcattgtcattgttttcttgtgtgcgttttattcctcgctattgtatacatcattggaaattctaagtattcttttgaaatatctagtctttctagatgttctgaagtgcctgatgtatgttaaaattacaggtggtaaaataataaattttgtaaatatctttttgttaaaattcatatgcagtgttttattttattttgatgttggtggggggtggggaggatgaccaaatccctgcttgatcaacacacattgcgtttgtgctctggttcaggggaggagagaggaggagaaagtgcagacttccaggcctctgtgcgcaccgggaggagagattaatgatcatctcttctgtctgtgtgtttgttttatttatctatggatatcctgtgtataaaggatgaacaagtcctatttataacatctaatcttttcaggtgttaagttgccagtgtatgacggaagcagcgttattaaacgaacgcagcttgtacatattgtgttaaaattcataaaaagccagtcttctgaaaagaacccttgggccctccctccgcagcctccggcgccagctgcaggaagacctggccaggggaaggtgggtggaacaagctgctgctggctgtggggaaggcggtggagcccaggcctccacaggttccccacaggctccccacaggctcgcgcggatctggtcgctgggttccgcacgggccgcgtgggggcgcctgctgggagcgaggaggcgccatcctggctcgcctgctccaggaggacgctctgggcctgcgcagatgcagttctccaggatgggcgcgggcgctgggggccgcgctccttgggctgctgcgcctccactgagccgcctgggtgtgaggacctcacgccggcgcctccgggaaggacgcggagccgccgcggccgagcccagggctgcagctgctgcccgacgcccgcgagaaggcccttccgccaccgcccgcgggttcgaacttggagcagctgctgccagctgaggcgccagcggcgtcgggagctcctcagagtcagtgttttgtgctggattcggcatgtcctctgaaaactcgggaatttgtcactgaaatggtgacaggaggtgagaagtttttttagacgttgccttcgctgaccgggcgccgggctcaggcctggaatcccagcactttgggaggccgaggcgggcggatcgcttgagctccggaggtggagaagctgccttcgtggtaactgtggtcttaagttcagctgagaacgataaatggcttttccttgaattggctgcttttgtgatttctctcaggctcatctttcgtcagttaaaaatccagtggtaggtgtagcttagagacgggaaatttttggttttgttttggctacacgtaagtcttggaaattattttcttttacgttccaatgtgagcaaatccagaaggatgtcagattaaacaccgaatttaacaaattcagccgggcacggtggctcacgcctgtaatcccagcactttgagagaccgaggcgggtggatgatgagttcaggagtttgagaacagcctgaccaacatagtgaaactccgtctctactaaaaaaacaaaaattagccgggcgtggttgtgcgcgcctgtaatcccagctactcaggaggctgaggcaggagaatcgccgagattgcgccactgcactcagcctgggcgacagagcgagacttcgtctcaaaaaaacaaaaaaaaaaatcaatcattggaatactgttgttcattacaattaatgaacgtttgatacacgcataaacgcactaaattcacgagtacatataagtaaaataagccaaaaaaaaaaaaactacatcctgtatgatgacacttttatacattctacagaatagaaactgaagtgacatgaaggtcgggagttgaatggagaaaaggtgagagaaaagagggaggaaggcgttgcaagagaataagagaaaatgttgagggtaattgatttgttttctatcttaataatggtgatggttacatcaataatttccaaattgtacattttgtgtgttaattagaattttatattattcaagctattacaaataaatacctgtataaatttcttagggacggtgtaagggagatggataaatcacataaaaagtcagatatttctgaatgtacaatgaataacccttagctctatctctattttttggtaattctaaaatgcagcagttttttttaatgtttttattacaagaagggtttcttcaaaccacaccaggtatgcgtaactctgggataaagttggctaagggagctgtgggatccggtggagaggagcacaggtcccgatcctggagcccattcttgtcacatgtgagctccaggacacatctcatagctccctcatgcttctgggtttacattcacatctgtaaatggaggaccaatgggcatctgcctctaacaatgtattttcgtgtgttaagataatgtatgctaaatgtttaccacagcacaatcttttactaagaaattacattttttccaaatattatcattgtcttcaagccccaccacccactagaaaacttcatctgctctgtgccttgccctgtcctcagacatcctgcccaagagacttctatatagtaggagacatgcaaatagttccctccctctgctgatgaaaaccagcccagccttgaccctgcagctctgggagaggagctcaagtgccaggattcccaggtgttttcacttggtgatcagaacttaacacagaggactcaccatgttgtttgggctgagctgggctttccttgttactattttaagaggtgattcatgaagaactacagatattgtttgtgagtggatattagagaaacagtggatatgtgtggcagttgctgaccaggatttctctgtgtttgcaggtgtgcagtatgaggtgcagctggtagagtctttttttttttttttttttcactttttagcgaacatccatgggttacaaaataatgggttggcttttcttccaacactttacagacaccatcaattttcctcttgcttataaggttttaaccagaagaatgctgtcatcatctttcctgttcttttagaaagaatgccccctcaactcatctccacttgtctgcatgtatttctatttgtctttggttttcagcagttttaataagattcacctaaatgtgtgtgtgtgtgtcgaggggtgttatgctattgttctgtgttctctgagatgcatggattcaccgtttactctgtctccatttttgtgaaaacaattagaaaaaaagtcagtgtgagcctagaaacaagcctccctgaagtgggcactggaccacctgggggcgctcaggacccactgagcacaagagccagccccagggcaggtgcagaggggtgttaaggtctggtttcctgtcagccctgtggcttcctctccataaaacagtttcctttgtggcacatctctggattccttatcctttttttcctgtgaagtctgaagaagaaacatttgtcgtaacaagagaaaaactttctcatatgcaccaaaggcagagtcacctacagtcatttactcctgtttctgaatgtcaataaggtgtcaatgcttctgaagttaatcagctaaatctataaaaggtgcggtgtttaactcagcatggcagcccagctcaacagaactccaagggccagtgagcaagcaggcaggataaagtgcatgctgggcattggggcagagggagttagcatccagtgcaagagaagaaagcccccgtggtggtcattgtcaggactccaagcccacagttccaattgtaggtgatactgggcaaaggaagagagaccccaccaatggttagtgtggatttcgagtctgatggttccacactcacactccaggtgaatatgaaaacatttattaactctatttttgaggtgtctgctgagagcagcacaggcctctcaagaaatttcaaactggaatttcctcagtagacaggaaaggaggctggctcagggctttataatgatttggtggtggggttgggggtgcgtttctactcaggagaaggagattgtgtgatttaaacctcacaggggcatcagataagggagcttctgtgatttcttactagatttaccacatgcaggggataaggaggaggaagaataaaccttaattcgtcagcaacgaggcaccaaaaataggacctgacgctttattctccctagcagcttaagaaaatgagtgaaaaagagagagaagagtccactatgtgtgaaaagcaaacaggtctaaagaaaataaaaattttattactgtaagcacataataaaaagaaagagaagaatgaatgagacaggcaggggtgctgaatcaatgtcctgagtggggccttttcattatccacagttatcagttaattctgaaggtctcaggtcagcttcctgcttcaaaatatcacaggcccttacagtatatgtgaaaatcctcggtttgtcgttcttcactaaagtagccttataattagatgtacttctgaatttaatcttcagttgtgttaaataaaaaaaaacacaatctacaatttaggaaagtgagagtttatttttatcaaggtttacagccatcccatatgctggaaagcatagcttttggtaaagacgagagaaaggcactcccaggaagaaggggttgggcagaagctttatgctgaagggtttggctaaacagacataatcaacaggttacaggaggggctactgatgttcatggaggtggtcctcacacatgcatactgaacaaacatgtctgtaacgtatgacccctgttcacttaccagtggagacttagcatttaaattcattacagtcaggccctatgtgccaatagcagaagcagaaacacaaaggcactcagggtgcagcctctgtaaacggccagagccaggccatggtgagtggtctctgatcaggagaaaggtcctgatatcactctagtgttcaatcaaagctggggttatggcttgtggaacaggggtcagttcatcaggggatgggctgcaattgtcttcatagtgcttgtctcagtgccggtgcttactgagccgctagagaaaacgaataacctattggcagttagaagacagtttaccttttaagtgtgggagtgagtggcagaacccttgcctgacatggctttaggtcttgtttataatttgacatcttattgccacagagattctgttctgtcattcttttggatctctattttaacattagtgttggtcattgttgtgtctaaaccgcaaaggggagtgagtgtaagaggcgcgtctgatcttgtcatggctgggatctcagtttttaggcttttctggagtcccttagatgaacagatggactatttagtcagttggggcacttaggattttatttttgttttacagttcataaatatgaaccctagtattgacattgtgcatattcactgctgtgttgtggttaaaattacctggtaagattcccttcaaagccgttcaagagcaatatcctaccctgatgtttcttccagtaaataccattccctgttttaatgtcattagaggctattgaaaagatgtaggaaaatgatagcttaatctgtcgatgactggagtgggtaagatacagtcatcactttcaatgctttgtcatgcgtgcatgtaataggaagaggtgagctctgggggaaaatctctaaatgtatgggccttccagccaccaaatcataaggtgatgactgatgtctcactgagggacttgactataatgctctagtgctagggagagaaactttggccaaggaagttcaagattttcttaaggtttggacaagtttagttcaagtatgacaattttcttcaacattttcagaagattgtggatgggaatgatgctgagttatataagtaattctaatgccttctgtgtttagataatattataaacaagactgtttgggtataatgacccactacaatatatatacttttagttgttacaccatttcattttcctttaggattttactttctaagttacatgaatcaggtccctaaaatataggcgtgcatctaaaatttattctttggtgagaatttttacgtgttccagaagatatgagaaacttctttgcgtgaagagcatcccaaagtcaggcactcctgtaaaacatgtacttaatccttgtctttggcttattgatgagctctgttgaccacaataaaacttctgtcatgcgggctgacttgacatcaggtagaggaacagattctgaatgtactactgaattgagtgcataacctccagtttcgttactgatgtatgattcatcagagatgatactagatcaaggatttcaatcggaatctaatctaaaagatgtgaataaactttcctaatttagatagtattacttgtgagcacactgctagtattccagccatgtctcctgtctgtcacactgaattcacgctaactttgatctaaaagttaacacttgttctaatgttcaaatatgttatttttattctaatgtctctagattattatctgtggctattttaggcaagagtgaaggaaagcaaggttaactgactaaaaatgagaaaaagcacaacctaatgtaatggaagtcaggacatcagcatctccaggcttgtctatttctagagttcatgcaaccaggggatttcttttctcatttttacacaaagaaacacccaaattgtccatttcatctcccattgactcttatcatctgtctctgtcagtttgcttagaattttggcctccagcttaatccaagttgctgcaaaaacatgatttcattcatttttacagctgcatggtattccactgtgtataagtaccacgttttcttttttcagtctgtaactgatcggcatttagtttcattatatgtctttggtactgtgaatagcacagtgatacacacgtgagttgatgtgtctttttgttccaatgattggttttctcttggacatatacccagcaatgagattgctgaggggaatggtagctctgttttaaattctttgagaaatctccagattgatttcatcagtctcttgggccaaattatatttccaccaaaagtgtgtaagtggtccgttatctctatagccttgcctgcatctgttaatttctgatctttcagtgatagcaattctgacatatgtgagaaagtatatcatttggttttgattcgcacttatctgatgactgaatatgctgagcatttttataggttagttggccacttctatgtgtgtatttgagaagtttctgtgcatgtcctttctccatttctaatggggttatttggtttatgctggtgattaagttccctatgaattaccaccttacacacactaagataatcagcattcaaaaaagaaaaatgaatagaaaaacataaccacttgtaggtatagacatactgaatttggaatggtcatggcttgcatgttggtattgaaatgggacagcaactttggaaaatggtcttcacagaaaacctcataaatgtagctagtgtcaccactcacagaagtagatggagaatacaactcaagtgtccatcgactgccagagggatgaagacgccgcggtgcgtctgtaacccacagggatgaagacgccgcggtgcgtctgtgcatctgtaacccacagggatgaagacgccgcggtgcgtctgtaacccacagggatgaagacgccgcggtgcgtctgtaacccacagggatgaagacgctgtggtgctttaaaaaggagtgaagcactgacataggctgcaactcggatgggccttgtaaacattgggtgagtgaactgagggagacacggaagtctacatcctgaattgtcctattgacatgaagtatgcagaggaggaaaatccctagagacagatcacagggggtgagtggaggggaaatggagagtgacgcttaatggagctgaggttttcttttctgtgatgaaaatgttcccaaaccaaatactggtgatatttgcacaacattgcaaatgtgtaaagtatcactgacccgtacacttaatcgtggctaaaattgtaaattttatgtcatgtgtatctcaacacaatagaaatgagcaccacattttgtttagtgactcaacaacaataacatttaggtttaaattctggattccccaacagaaccagtgcttcctgctggagctggatccatcagcccccagggaagggatggagtgggtcaggtgcacaggtcatgaagggagcacaaattctaacccactcctcaagagtccagtcaccacctccagatctatgtccaaaaacagctcttcgtatggctgagtgacattagcaacaagcacacagccatgtttgtttttttgttttgttttggtgtgtgtgtgtgtgtttttgatagagtcttgtgtcacccaggctggagtgcagtggggcaatcaatcttggctcactacgagctccacctcctgggttcaagtgattctccagcctcagcctccaagtagcttggactgcaggcactcaccaccacacctggctaatttttgtatttttagtagagacagggtttcactatgttggccaggctggtcttgaactcctgaccttctgatccacccgactcggcctccaaaagtgctgggattacaggtataagccactgtgcccagccacaaacaagtatttttaagcaaaagacacagtgaagagacttcagtatgagcccacacacaaaccttcctgtgggagtttacagaacagcagtgggtgctgaggacagaagccagcacccaggaaccagcagggaaacccagggggcatttggcaccgcctgaaggctcaggaccattgtggggctcagtggtcaggcaggctcaaggttcagcctcagagcaggtgtagcaggcggcgaaaggctctgaagacggagtttagtgtcaccttctcatttccactactaaacaccctccagcacatctattctaatgtgtatgggtgttcatgtgtttagagaatattatttatgttatgaatctatagccatcttgtgggtgcatcaagttaacctcttcaacctatgtggaccctgttcattaggaataagtccctgtatttgaggacctcacaaattaataattatgtagaatcactttctttttcagtctcctttccttcctctttctttctttctcactcacacactgacaaacacacggggtgccataacattaattacctgatgtattaaagaatattgattcatttgcaacttgaccagtttagctgttgttcatgttgttgtaagatcaggaacatgtttctcagctgtgtactcctctaagctgagcagcagctttatttgaaatacacagaaactgaaaacaatccaaatattaatcagcaccttcataagtaaacaaattgtggaaaagtcgtttattgggatagtacccactactacaatcagtaaatgttggatacgatcaacagcatggttcaattcacaagtacatatgatgagtatagtgagccaaagcacatacatatgattccgttttataaactgtacaaagtgaatactcattggaaattacataacaaagatcactaactgacttctccatagtaagagaagcgaaggtataggagggagaaattgtgagagacaaagagaaaattgagaggcgaattgatttgttttctctgtgaatggtcattaggtcaatgtttgtcaaatggtgaacatattgtgtgaagattatatgtctgtattacttcattaaagctattataaataaaagtctaatgtggtagaaaaagatgaagagagaaataaaaataatacaagaaaagtcatgaactcctgaatgaattaacccttagtttttctctattacttataaaaacaccaagatacagccaaataatatcacgatatcattataagaagagtgttttgtaaacctcactgggaatttatagctctttcctagagttaattttgggaacagttggatccaattgtgagaaatgcaggctggacactgagactggctcttatgagatgtgagctcttgtctatgtcacatggtccttccatacttgggggtttacattcacatctgtaaatgaaggaaacattgactctcaaagaacatatttcatgtgcatgtaaaagtatgaatgctagtgagaattaattacttatgaagtataatcacccacatccactcttggacacagcccactctgaggcatctgttacagaactcattatatagtaggagacatgcaaatagggtcctccctctgctgatgaaaaccagcccagccctgaccctgcagctctgggagaggagccccagccctgagattcccaggtgtttccattcggtgatcagcactgaacacagagaacgcaccatggagtttggactgagctgggttttccttgttgctattttaaaaggtgattcatggataaatagagatgttgagtgtgagtgaacatgagtgagagaaacagtggatatgtgtggcagtgtctgaccagggtgtctctgtgtttgcaggtgtccagtgtgaagtgcagctggtggagtctgggggagtcgtggtacagcctggggggtccctgagactctcctgtgcagcctctggattcacctttgatgattataccatgcactgggtccgtcaagctccggggaagggtctggagtgggtctctcttattagttgggatggtggtagcacatactatgcagactctgtgaagggccgattcaccatctccagagacaacagcaaaaactccctgtatctgcaaatgaacagtctgagaactgaggacaccgccttgtattactgtgcaaaagatacacagtgaggggaagtcagcgagagcccagacaaaaacctcgctgcaggaagacaggaggggcctgggctgcagaggccactcaagacacactgagcatagggttaactctgggacaagttgctcaggaaggttaagagctggtttcctttcagagtcttcacaatttctccatctaacagtttccccaggaaccctgtctagatctgtgatctggatctgctgaaactgcctgtgtcaccttcctcacctgtgactattgggggagctgattgtggacactccagtgtgtgggatttcttggtgacagcaattgtgtcttctgtctagccatgtctagggctgcccatcaggaaggtcaggctggaatttttggaaagaggcgcacctgccatccaccaggaaattttgttgtcttttgttctgctagaactaaatcagacacaccaaggttaactagcactatcttcctagcttgagaaacttgatggcaggcttgaataacacctgtatgaagccatcagagcaacaactagattaatgtctgctagaattaaatcaggcacaccaaggttaactagcactatcttcctagctcgagaaacttgatagcaggcttgaataacacttgtatgaaaccatcagagcaacacctagaatagtgtctgatttaataattgagactatggtctagccaaggagacacataaaacatgatttccatggttggttcatattttatatttattaatagaatctggctggtattataaacagctttgccaaaatatatgtgttagtgttggtcttcggagaagcaaactctgtgactggattagcttcgtgtacagtttccttcgtgtacagtttccctgtccactcttctgagaggaaatgcagaggtggtggaaggggtctggggtagctgaatgcatatgagggaagtcggtccctgagtgaaggagaaagggaggaggactgggtggaactttcctaaacttctttgttgttctatgaaggtccagcaaggtcactgaatcagagtcgtgtcacagttcccatcagggacccagtgactcccagcagtggctctgctcagatcagcgcagagcttgttcgtctcctgagagtggagcacaggacgtggctccaacaccagccatggcatggaagacagagagcagccctgggtgcctgggtcaggtgcattgtgctccctgcaggtggagggagggaagtgctgactcagggcccagagactgtgggttctatacagaacatacacttttacttcatttctgtggatgacatagaaacaaacatgcagtctgtaaacaatggtgattcctacatttgccccaattgctttattccttaattctgcagaatgtcctggcacagaattgcctttctcatgtggaattgtgtcgtgtgttgtggatgtgtgagccctactttcattgttttcccccatgtacagagctcctaaatagagaacagctgaccctccttctacactgttgctctcctccccacagagagagcacataattacctgaggctgaatctgaggtgggatctgtcctctgaacctcagagcctgcagagacccccagctgcagattcatggagtcaggtgtttgtacatgtgggaaccttgagctgttcttttgtcagtgaacactccttaaaactaattgtgggttcagaattaggacacccattgatctatcacacctcagctcattctgccactcagaatctccagaaattcaggaaatggttgaatgtacatttttgtgacaaatttttctcatttcacttagttgtgagtttggttagcagaaagtgctaccatttatgggtcccaaactgatgaagctcatttgcttcaacagaagttaggaggctcctaaaacttctcatcagcccttctctctgcacttcatgtgaaattcagttttacctggaattctggtgtgttggtttagccagagttccccatcctccatgtctgattttcctgggtatctgatcagtttccttgcccttcaccatacctcggtgacgtctaatcaccctggcccaacatcaagaattctggcaggttggtttaagcaagatttgctgtgcccctgatgtttcctctcagtaattttccatcttccggaccccaccctgctgcttggctttaaatcccccatgtttccattctgcatttggagttcagctgaatctctctcctcactgcaaaacaccattgccctgatcccgacacctaccatgaggaccctggataaagtcttccttactgtgctggaacaagtgtctttacttgatattttttctttaataaatctacctttagtgcttcctaaattgctcaaggaacctcgaaaaataagataagtgcgattatccattttactgtgtgtgtatgtgtgaatttcaatttccatgtgtggtgtccagaagtcctgagcacaaacagttttgcttctctgtccaattctttgcttctgaaagccaggagtcatcccaacattggtaaattggcgatttgtttttactatttagtgactgacatatttcacttaacctgaagcttcatgaacacattgatgaaaagtagatagaagacttgtttggaaatgccagatttagggtagactttaccacccacgtgtgtctggagatctccttaggattccaagaacagggtggtttttttccaccacaggacaaggatgagaacctccaagctgtgatgataaaggacaggcagggccatgtgtggacaaggatgggctgctgccacgtccagagtgttctctcctagcaacgccgccatctccttcctcacactgtggtatttgtcagatgggaaacatgcctagaatttatctttgacatatggatggaagcccaggctagaggcatttgacagcttatttctgaacctacttctttaaggaatgcccagatcccttgctctgcttcctggttcttaacccctttagctcccttccgctcctgcacccatgcactgcctctttacggccacttccccacacccttcactgtagcaccattttcttgggctccttggaaatatcacagctttggtttaactcacagatcaggcacactcatgggcccctccagaggttctcgatttccctccctcaggctcctccctggggtcctaacttggccatctctatcctctcttctgagcctggccatccacaatccatcccatctggacttgtgtatagcactgggttaactcagcaggtatgaattgttcaaaccctgcacattcctaaaaaataactaaaaaaaaaaaaacttttgttcatttattgctgttacctactgtgatgagatctccgagtccataaaatattgcacctgataacagtgtctgtggatgtctgtagccttgggacatgcggtacaagtttaatcagtgatttatagtgaatgtctacttttgttttgctggagagggctgtcgtctgagtattgtggtcagttccccaggtgttccatagtctatgattcattccccaaacacagccctggacaagagagctcagcggcactccccttgttgtcaacacttcacacaagccatcttacctcacagctgaacaattacacatgtgtagaaggctccactgtgagaggacacctgagagcttgtgcctggattctccagggcttcactccttgtgccttttgtctttacttattttaaattgtatcatttttctgtaataaactgttcctgtgaatagaacagttatgagtcctgtgtttttactgatttttcagcctacaggtggcagatgagaactctcaacacagttgtgttagaagaaggatttcctagagagaccctgactcaatgatgatacatggctgaagcattgcatggaaaacgtaagtgttcaggtatggaatggcaaaatttgatacctggggagtgacagaatactacagtctattacagcagctgagctgaaatcggtttctggaggtaaatgggatttagaaattataaatccaactcccaaggagctggctcaatcaatacataatgaaatgtgaaatgattagaaatagcctaaatatgcaatttccatctgtgagagctaagtgaaaatccaggagagagttggcagggagagggatactgcaccaacctcagattttgaccattttcatttagggctgatgggctcatgaccactagagttagcaattacactgtgataaaagataaaagcttcacaaactctacccacccagaagggggctcaggtggtgaaatagggagggtaaggcatgaaacgactgaaatatgggaggatagtgagatgggttctctctttttgagttttatcttttgcttctttactaatttttgttaatctggatttggagaatgactagtgtaaaagtggattctgttttgagtcccttagaatggaggagaatgtgtgggccaatgttgtgcccagagactactacagaacaatagtagatgaatgtacatgacccaaacacaaagctttgtggttgctgatgggagagctgcactgccctggcctactggataacagcttctccaaagtgtatttaccctgacaatggagattgcctttctcttttaagtgaaaaaaatggaacactacaataaagtagtggtaatgctgtgtgtgtatgtataagacattctggagtgggtttgtgataattgggatatgtatcacttatccttttatttgtataaatttatggggtgaaagtgccgttttgttacatggatatattgttgagggataaaatctgggctttgagtatagccatcatctggatggtgtatattgtacccattaagtaacttctcatcccacatgccactcccaccctcccaaccttccaagtctccaatatttcttattccacactctgtatccatgtgtacatattatttagctctcacttatatatgacatgtggtattcaactttattcttctgagttctttaacttaagatagtggcctacagtttcatccatgctactggaaaatacataatttcattccttgtctattattgagtagtaattaaatgtgtatatgtacatacacatgtatagtgtgtgtatgtgtggggatgtgtgtgtacatatatgtatatgtatgaacatatacgactgtttcctttatctaatcatttactaatagaaacttagtttggtaccatgtatttgctattgtgaatagagcagcaataaacatataaatgcaggcatctatctgatataataatttatcttcccttgggtagatacccagtagtgggactgctgaatgaaatattagttccaatattaattatttgcaaaatctccatactgttttccatagagcttatagtaatttacatttccactagcagtgtataagcactcctgcttctctgcatccttactagcatctgttttttgttttgttccatttttctttttgactgttttaatagtagcttttctgactggtataagatggtatctcactgtgtctttaaattgcatttttctgatgattaatgtcattgattattttttcatatgctggttgatgatttttttgtcttttgaaaaataaacattgtagtaatttgctcatttttaatgtggttatttgtgggtttttgtgttgcttttgtttcttgtagtttgtaaatattagctctttgtcagatacagagtttaaaaatagtttatcccattctgtacgctttcggttaagttttttgattatttgttttgctgttcagatgctttgcttcttatttgtattaagtccaaatggtctatttcggtttttattgtttacttttaaggttgtagtcatgaattctttgcctaggacaatctccagaacaatatttcctagaatagcatctgcaactttcagactctcaggtctcccagttaagtcttttatccatattggcttaattttggatatagtgagagatacgggtccagttttattctgctgcaaatggctgttcagtttttcctgcacaatttatataacaaggtgacctgttcccagtgtatgcttcttgtctagtttttcacagtcagtttggctgcaggcatttgactttatttatgaaatgtctattctgttccactcatctatggctttctgctagattgttacttgattgttacttgtgtataataatgctactggtttttgtatgcttttttcatttattctaaaactttactgaattaactcatcaattctaggagtattttgaaagaatattagtttttttaagtacaaaatcatattatcagcaaacacaaagagtttgacttcctcttttccaatttgagtgcctttatttctttctcttgcctaatttctctggctaggatttcaagttccatattgattaagagtggtgaaagtgggcatccttgacgtgttctgagtcttaggaggaatactttcaacatattcctattcagtataatgttgtttcggagtttgaaggtgatttatggagaatgagagatgttgagtgcgagtggacatgagtgagagaaacagtagatatgtgtggccgtttctgaccagggtgtctctgtgtttgcaggcgtccagcgtgaggcgcagctggtggagtctgggggaggcttggtacagcctgggtgggtccccgagactctcatttgcagcttctagattcaccttcagtgacttctgaatgcactggatccgccaggcttctgggaaagggctggagtgggttggccgtattagaaccaaacgtaacagttacacgacagaatgcgctgcatctgtgaaaggcaggttcaccatctcaagagatgattcaaagaacacactgtatctgcaagtgaataccctgaaaaccgagtacacggccatctattactgtactagagacagtgagggggaggttaacgtaggcccatacacaaatctccctgcaggggcgcgcagggccaactgggggcgctcgggacccactgaggatgggacaggtcccaggggcgggtgcagggggaggtttcctttctcagctgcaggaggcgggtttgtttttgcaggaatatggagtcttatgaggttttgatattttactatggttatttatcatgattttttaaaattgggatttgtgttttagtaatttttaaatttatatgtaggggtatttttaaaaattaagttttagggtacatgtgcacaacgtgcaggtttgttacatatgtatacatgtgccatgttggtgtgctgcacccattaactcgtcacttaacattaggtatatctcctaatgctatccctcccccctccccccacctcacaacaggccccggtgtgtgttccccttcctgtgtccatgtgttctcattgttcaattcccacctatgagtgagagcatgcggtgtttagttttttgtgattgcaatagtttgctgagaatgatggtttccagcttcatccatgtccctacaaaggacatgaacttatcattttttatggctgcatagtattccatggtgtatatgtgccacattttcttagtccagtctatcattgttggacatttgggttggttccaagtttttgctattgtgaatagtgccacaataaacatatgtgtgcatgtgtctttatagcagcatgatttataatcctttgggtatatacccagtaatgggattgctgggtcaaatggttatttctagttcaagatccctgtggaatcgccacactgacttccacaatggttgaactagtttatagtcccaccaacagtgtaaaagtgttccctatttctccacatcctctccagcacctgttgtttcctgaccttttaatgattgccattctaactggtgtgagatggtatctcattgtggttttgatttgcatttctctgtaccctaaaacttaaagaataaaaaaaatccttcaaaaataattcttcctaataatatgcacttattctcctaggttgtattaacatctgttgatatcttcaactacatagctatggcgacattaatttacatctgtagacatatgtgtaaatacacaaacttatgcatacatgtctagtcttttatatttaatataataaaatcattataaaatatgtcctaatgaatgaaacttaatgattaactaaatataaattatagtaatccattattcattgcaatgattctctatagtttacataaattggtatctatttgtaagcttaaatatagtgtattggtcattttaaaatggccaagaacaaatttcaaatgtccctgtcacacaaacacacacaataaggatttgaggatttgagttgatatatatgtcaattagctagattcagttattccatattgcattcataaatcataacatagctttgcactctataaatacatagtcaaaatttctcaattttcaatgaaattttaattatacattttttaatccgtcctaggtcatgatttttttctccctgtcaggatatgattagattgtcctgagaaactcattcagcctcctgcctcctgaaggcttcaaaggcttcaggaagtaagctcctggatgggcagaagcaggcaaatctttcatgtgcacaggacctggagcatctctctttggattaagccccctcctcaggattacagggctcttcatttttctcaacaggctgttgtaccagataagcacaaaaacttaatttcattatgctttgctttttttaaaaaaaaaaaatgaaggtaataattttaacaataaacatattacaacctgctacacatgagacccttcttgtgcttcgacctttcttctcaggagtttatatgtattacatatattcagtttttttctgagttggaatgcttattacagattattccccttattacagattactcttttaatttatctcttagaatgatttttcgagagcccctgcctgcccgcgcctggtggaatggagcagagcctgggctgagccaggcgcgcaggggcctccgcacgtgccgcgccggtagcagacgccaagcgggcggacagtgagcgtgagaggccggctcggagtggccgccggagcagtgccggggatggaagaacagcccatcttcaccaccggagcacaggtcttccagattgaccccaacaccaaaaagcactggatgcctgcgagcaacaggcggccaccgtttcttacttctatgatgtcacaaggaacatctatgggatcgtcagtgtggacggagccaaggtgaccataaacagcacaatcacaccgaatatgaccttcaccaatgtgtcacagacgtctgggcagtgggccgacagcagagccaacacggtgtttggtttggggttttcctctgagcagcagctgacaaagttttcagagaaattccaggaggtggaggaagcggccaagacagccaaagacaagacccaggagaacatggagccctcgagtaataatcccgagaatccgggcatggagccccatcttctactccggcatccagtgtcaacgggacggacgatgaaaggcctctcaggccgctgcagctgacacgcacctgcagtctgggaaccacaagctgaaggcggcctcgacgcaaagagctgcccacgggaagaggtgggagatggagctgcagacccggcgggagagcgacgcccggctgcccacggcgctgcaggagtcggtggccagcgtggagcagaggaagaggccgtgagatccacagagaggagaagaacacgcagctgaagaggaagatagaggagctggaggcggagctccgagaaaacgagaaagagtggaagtccccaaaagcaaagtaaaactactcctcagctcaggtgagtgcaactgtgtctctgagaagatggaggcggcagagagaggatcaaaccctggaagacaaagtgcgttccctgaagagagacactgaggagagcaaatccagacagcgccacctgggggtggaggtgaagagtttcccggaggtgctggaccggaagatccacaacctgcctgacttccgcccaggccttgcatactgtgcaccaataactagggctggccgaggcccaggcccctcctgtgagtcccaagcgtgtgtgcgagaccagatggcgctaggacgttccctgtgtgcgttgcttctgtaaatgcaggcgcagtttcttgtatttccaaaccaactgtgccgtctactcaccccttcccagaatagaaatctcttgtccaggcacagtgtctcacgcctgtaatcccagcactttgggaggtcgaagcgcgggaggatcacgaggtcaggagaccgagagcatcttggccaacatggtgaaaccctccctgtctgtactaaaaaaccaaaaattagccaggcttggtggcaagcacctgtagtcccacctacttgggaggctggtgcaggggaatcgcttgaaccaggagagagagtttgctgtgagccgagatcgcaccactgtcctccagcctgggcaacagagcgagactccatctccaaaaaaaaaaaaaaaaaaggaaaagaaaatttcctctcgcttctctggccttgtgaggttgtggacaactggaagattttgactcaggaatccagaactaggtctaccttcaacatttacacagtcaggccagggatgtttatatttttcataagggctgttgaaaccatatgaactgaaaaaaagcactttctaatccaaatattgatattctttacaccaggtcatcgggctccttttatcgaatagcattcagggtatttgaatgtccatcaggcgccaggcccagggggcacagggagaacaacattcctctccgtcaataacgagaggctttaaaacaactgtttagtggagacttatcgagatgccaaacaggtttctggtgggtacattttctggcctggggatcacctgcatccacgatattgccctctgccccccagtttgtatggttgcgacaatgttccttttcttggttttaatttctgagcggatgattgtggtgcgggaacagcacacagtgagggtgcctagcacaatgcctggtgcaaagtaggttttttataaacgtttgtgcggctcacacctgtaatcccagcaatttgggaggctgaagcaggcggatcacctggggtcgggagttcgagaccagcctgaccaacatggagaaacctcatctttactaaaaatatgaaaaaaaaaatagccgggagtggtgcatgcctttaatctcagctactcgggaggctgaggcaggagaatcacttgataccgggaggcagaggttgcagtgagtggagatcgtgccattgcactccagcctgggcaacaaaagtgaaattccgtctcaaaaaaatttttttctaaagccccactcaaaaccagggtattattagcagtgtaatagttgggccacagttgaaaatacattcaattcagttcatgtgctctcaaatatcctttttccttttaaagttgttctcagttgtaatattactcaaaatattagtaatttatactaatgacacaggttacaatattgtatacataatttagtgacatttgattggaaaaaatacatgttccccatgtcttgagtattttttccttctctataaaatgtatgcttataattatttaagtttcagatgctagcattatctttttgatatctgggatttaattttagtaggtatactggaatgccttttattaattcatataataatgttcatattttagataggattttaatattaattttactatttactgaatttcaaacttttctactttttttgtttttatgagataaaattcacacataagaaaaaatgcatagatctgaaatgtgtcactagagagtttctggcaaatgtgaatacctttgtccccagcacctaaggtagcctgaagagcaagtctctccccaaaacatgcgtctttttctatgcctgtggtcaaatcctgcatggggaaaggtttcgatttctgacactatagatgtattttattctgctttgaactttatataaatggaatcaaacattatagactttttttggtaaggggctacttttctatttttgaggttaattcatgctagctaatgtataaaattagatcaacatattgtcgtttattcaattcatagacagactgtgatatgaaccaccaaaattttcatgtacatggagagagagagagagaaagagaggaagcagagatattttatatctgagtcagtccattaagtaaataaatgacaatattttcatttatttttatgtcagtggactttaaatttgtgtccagtttatgaatattatatgcagagctgttacaaatatcttagtgtaagttttctgatgttctatttttattgagaaaatatgaagtatgtatttctttattctaagagtaagtttaatttttttcagtggtattgaggcataattgaaatatttttataatatatatgtttaaggtgcaccaattgatgttttgatattgtattagtccattctaacactgctataaagaaatgcctgaggctgaggtgggcggatcacgaggtcaggagatcgagaccatcctggctaacacggtgaaaccccgtctctactaaaaaaaccaaaagttaactgggcgtggtggcaggtgcctgtagtcccagtactccggaggctgaggcaggagaatggcgtgaacctgggaggtggagctttcagtgagctgagattgcaccactgcactccactccagcctgggcgacagagcgaaactctgtcaaaaaaaaaaaaaaaaaaaaaaaaaaaaaaaaaaaaaaaaaaaaagcttgacactgagtaatttggaaaaaaaaaaagatgtaagatgtttaattgacttgtgagaactcaactcatgcattgtcatgaaaacagcaccaggagtcagttctaaaccattcatgaaggacccacgccatgacccagtcacctccaaccaggtcacacttccacaattgaggattataatacgacgtgagatttggggtaggacacagatccaaagcatatcagatatacattgtaaaatgctcatcatagtcaaggtaatttgcatatccatcttctcacagagctaccgtttaattttttttaaatgtagagcttgtgtgtgtatgtgtgtctgataacaacacctaagacctactcttagcaaaaatcacttttacaatatagtattaaatacaggaacattgctgtgcattagatctccagaaatgattcagcttgcacaactgaaactctgtgccctttgaccgatatcacccaatttccctctcctcccaggtcgtgggacccagtactctactcgctgctatcaagaacttggatattttagatcctacatgcagatgacatcgtgaagcatttgtctttcggcatctggcttattccacttagcaccatgtcctctagctccatccgtgttgttgcaaatgtcagaatttcctttttttttttgaaagccaaatgaaattcagtttatatatatacattttctttatacagtcatcaatctatggtcattaaattctttcacaaatctacactattataaataatcttgcaattaacatgtatttgacatcataattttatttcctttgacgatataacaagaagtgggatcaccaggtcatatgatagctttatttttcaatttattgactaaccaatcttaccatacgatataaggataccctcttcaccacattcttgccaacatttgttatcttttgtcttgctgataataaccattttaagtggtgtgaggtgatatctcattgggctttttatttgaattcccctgataattaggaatgttgagtacctttttaggatctgtttttcatctgtgggtcttctgaaaaaaaatctaaccaggtttttgccctctgtattaggtcagttgatatttgctgttgagttgtatggttaatttatatatttgggtggaacttcttgttagatatataattgcacatagttttttttactgtgcttgcttttggtattaaattcaaataatttctgaatcaatgacgaatatttttccatgttgtctatgatttatggtttcaggttatgttcatttttagttgatttttgtatatggtgttagagaaggtctagtttcatttcattttttttttgcacatgcatgaccattttctacaccattgattgaggagactgtcctttcttcactgtgtgttcttggcatacaaaattaggaagacacataattaaaaaagaaaacatcagatgaatattcctggtgaacatagacctaaaagttctgagcaaaatactagcaaatagaatccagaagcactttaaaatgtgatacatcatgatcaagtaggctttacccctggaaggcaagtttcattcaacatccaaaaatcagtaactgattcactatgtaagcaaaataaaagcgaaaaacatagattatctcaatagatgctgagaaagcttttaatagcatccaacatccactcataataaaaaccctcaacagactaggcatcagaaaaatatacctcgaaattataagagctatctatgacaaaccacagtcaacatcatactgaataagcaaaagttcaaaccccttgagaattgaaaaaagacaaggatgccgtctcaccactcctattgaacatagtattagaaatcctagtccgaggaaccaggcaataacaaaaataaaaggcagctgatatggtttggatttgtgtccccacccaaatagcatgtcgaattgtaaccaccaatgttggaggtggcgtctggtgaaggatgattagatcatggggatgtgttttcctctctcatgctgttctcctgacagagctctcaggagatctggtttcaaagtgtgtggtacctctcccttatctcttcctcctgctgcagccatgtaagacatgatgtttcccattctgtcatgattgtcaggttccccaggcctccccagccatgcttcctgtacagcctgcagaaccatgaattaaattaaattaaagaattaaatatctttataaattactcactcctgtgtgtttctttgtagtgtgagaatggactaatgcagcatccaaatgggaaaagaatgcaatgtatctgtccaaactgatgataaaattctatacctataaaattctaaagactctgacaaaataattcaagagagataaacaactttggtaaagtctcaggatacaaaaatcaatgtacaaaagtctccagcatttctatatcccaaccacatccaagctgagagtgaaatcaagaacacaatcctgtcccacttacaatgctcacaaaaaatgaagtgcctgaaaatacaggtaaaaaacaaggtgaaagaactgtataaggagaactaccaaacacagcagaaagaaatcacaaatgacagaaataaatgtgaaaacatttcatactcatggattggaagaattgatattgtaaaaattgtcatactgcccaaagcaatttacagattcaatgctatttacataaaactctcaccagcattcttcagataaatagaaaaaaaattctaaaatttatatggaataaaaaaaagaccctgaatagccacagcaatcctaagcaaaaagaacaatgccagaggcatcatggtactgaatttaaactacaccataaagtcatggtaacaaaaacagcttggtactggtaaaagggcagacatgcagaaaaagtggaacaaaagagaaagcagaaataaagctgcatgcttgcaaccatctgatatttgataaggctgacaaaacaagcaatggggaaaaaactctattcaataaatggattctggcagatatgcagaatgcaagagtgaaggaggttgggcagcttctacctagatttcagaagatgtgcatggagaaccctatatgccaaggaagaagcctgctgcaggagtggagccaccacagacagtgtctattaggacaataccaaagatggggaaagatggggtcggaacccccattcagagtccccactagggcacttcatagtaaagctgtgggaatgtggccacaaccctcaagatcccagaatggtagagtcaaaggcagcttgtcctctcagcctggaaaaccttctggcacttgactctaacctgtgaaagcagcaccatgggctgtgcccagctacagggatgatattcctgaggtttttgggaccccctttgtcctagtgtgccctggtggaagtacataaagtcaagagagactattttgtagctttaagatttaatatctgccttactaggctttaggtgtgtctagagcatgttggcagttcctttggccaatttattccttttgtattgacaatatttacccaattcctgtggcactattgcaccttggaagtaaacaactgtttaaaactttttttttttttttttgagacggagtcttgctctgtcgcccaggctggagtgcagtggcgcgatctcggctcaccgcaacccctgtctcctggcttcactgcctcagcctcccgagtagctgggattacaggcgctcatcaccacgcccgactaatttttgtatttttagtagagacagggtttcactgtattagccaggatggtcttgatctcctgacttcgtgatccacccgcctcggcctcccaaagtgctgggattacaggcgtgagctgccacgcccagcctgtttaaaacattttgcaagctcatagctgcagagaaattgccttaagactcagaggagactttggtattttcagtcggaggttgaccaagtgaagagtttggtcactattaaaaaaactattaaaaaaaagatgactttgcaatctaagaaggacatgagatcaggacacaagagtaaaatggtatagtttagatgatggtccctgctaaatctcaaggtgaaatgtgattcacagcatttgcggtggggccgactgggaggttttgagacatggggaaagatccttcaggaatggcttggtatccaccccatggtaattagtgaattatttctgtattatctactgtgagatctgattttcaaaataatctagcaaccatcctcccctttcatgtcctccctctcaccatgtaacacagcctgtttcccctttgccttccaccatgactgtaagctttctgaggccatcacatgatgcagatgctgatgccatgcttctcacttagcctgcagaactatcagccaaataagccaaatagactagtacactgtccaaagcaatatacagattcaatgcaatttctattaagtaaccaatataattgattacatattttaaaaaaccataaaatttatatggaatcaaaaaagagcttgaacatcaaaagcaaccctaaggaaaagtaacaaagctggaagcaccacattgccggacttcaaattatactacacagatataataagaatgacatcatcgtagtgacaaaaaataaaaattgatgtaacacaacagacagcccagaaataaagccaaatatctacgaccacctgttatttgacaaaactgacaaaaaatatacactggagaaacaaccctttattcaataagtggtgcttggaaaattgggcagccacacaaagaagaataaaaccagacttctatctcacaatagacaaaaattaagtgaatatggattcaacacttaaaaatataaactgaatctacaaaaatacttgaagaaaatgcaaaaaaaaagttctctggacattggcctaggcaaataaaacatgactaagatttcaaaagcaaatgcaatgaaaacacagacaaacaggacttaagtaaaaatcttctgcacagaaaaagaaataatcaacatggtgagtaaacaacctgcaggatggtagaaggtatcatctcacctcagttaacatggctcatattaaacacacacacacacacacacacacacacacaaacaaaacactaaccaatgctcgtaaggatacagagaaaagaaaactcttatgcattgttgaggagaatgtaaactagtacagtcactatggagagcagtgtggaggtacctcaaaaaactacaaatagaactaccgtatgatccagcaattccactactgcaaatttatccaaaggaatgaaaatcattgtatcagagaattctgcaccccagtgtatgtggcaggacctttcacaatagccaagatatggaatcaacacaggtgttgaacacaagagaataatggttaaagatgatgtggtgcatatacatgacgaagtactcatcagccataagaaatgaaatcatgttatttgtggcaatgaggatggaactggaggacattatgttaaatgaactaagccagggacagaaagtaatacaccttgttttctcactcataggtggatacttaaaaaaaaatggtctcctagaagtaaagaatagaacagaggataccagacgctgggaagggtagggtaaaggacgagataggcagagatttgttaaataatacaaaattagagctagggaggaggaatagattataatgatctttaccactgtaggatgatacggttaacaataatatgtagttttaaatagttagaagaaggatactgagtgttcctaacaaaaagaaatggtttgagatgatggatgtgctaattaccctaatctgacccctatgcattatatgtatcaaaacatcactatgtacctcatgaatagttacaattattgtctattaaaattatattttaaaataacacaaaattcattggcagtgacataaatggaggctctgggataggtgtggggataaagggaggctctgggatacattacaggcctaacatgtcagtgggcagaggagcttccattagctttttctatttgtagcactgagtagatgtgacatttctcaaagtttgccctacaatagagacctgagttccagggaggtcttgcaggcagctgtgcagatggaagaagcaggagtagagggttgctggcccattcaacaatagtaggatgattattgtgcatgtagagaagtcaacattgttttaagtagttgcatcactggatgacatgaaaaacaaatccagtggaaatccttaaatattattggtagtgaaactgttttgggtgaggaaatgttcactgaagttaagtgagccagtaaagctgttaagaactataaaaacattggattggattcagctttgtctgaatttaatgtgattattactggctcaggcaggggtcacaaatcaagatggataggtggtaccaaccagaaaaagccatggaccagaaagattcacagctgaatttattcggatgtataaagaagagttgctaccaatcctagtgaaactattccccaaaaattaggataagggactcctccctaaattattctgtgagaccagcattattctgataacaaaacctggcagagactaaaaaaaaagataactttgggccaatattcatgatgcaaaaatgctcaatgaaatactagcaaactgaccacagcagcacatcaaaaagctaatccaccatgatcaagtagactttgttcctaggatgcaaggttggttcatatacgcaaatcagtaagtgtgattcgtctcataaacagaactaaaaacaaaaccatgctatcaatggacatagaaaaggtattcaatgaaatttaacattgtttcatatccaaaaccctcaactaggcatgaagaaacatacctcaaaataataaccatctatcatgaacccacagccaaaatcatactgaatgggcaaaagctggaagcagttttccctgaaaactggaacaagaaaagcattcccactctaaccactcctgttcatcatagtcatggaggtcccagccagagcgtgcaggcaagagaaagaaaagcatcagaaccggaagagaggatgtcaaaccatctctgtagatgaaatgatcataatcccgagtctgtagtttggtgattgacattaatttggaaaaattgtcagtcatcattgctttaaatatttcttcttaacctttctctgttccttctctttcccatgtaataccctaataattgtctcacaattcttggataagctgttctggtttcttatgggtgtgtatttgtgtacttgtatgtttgtgtgtgtatttgtgtgtttactttttaaaaaaaatatttctccattttcagtttgggacattgctactgagatatttttaatttcagatttttttcctcagccatgctgcgtctacatataagtccattgaaagcattgcttaattctgttacaatattcttgatatctacatttttttgctttttaagagtttgcatatttcgacttgcataacacaactgttcctggatgccctctgcttaactcatcacagcccttagcatatgagttatagcggggtcttaaattccttgtttggtaattccaacttacatgacgtagctgagtctcattctaatgcttgttctgtctcattacactgtgatatttttcttttagtatgtctcgtgatttttttagccagaaattatgtaccaggtaaaagaaactgctgtaaagaggcctttagcgatgtcattgtaagatgtggagagaaatgtgttccataatcctacggccatggcttactctagcaagcttaggcctttgaaaataaacccttacatgaaagtgaaaacataagtcttagatttggagaatttgcttgcaaatcaaatatttggaaaatgacttttatcacaaatgtacaaattaccttacaattgaacaacaacaaaaccacacaaattaattttaaaatgggcaaagatctgaatagaaatcgcatctaaaaataaatataaagagatcaacttcattttcattaggtatatgcatgtttaatattcaaaaaatactactatcttatgaggatgggtaaaatacacaatatagataataccaaatggtgatgaggaagttgaaaaacaggaacattcactctttgctggtggtaatgctgaaatggcacatagacatgtacagttaataatttagtgtatattacaaaacagctagaagagaagatttagaattgttaacacaaagaaataatcaatgatggagatgaaagatataccagttatccagatttaatcactgcatataataatcttttatcaaaatatataccccataaagattttgaactcatgtatctatataaattaggtattaaaaaacagcaatgcaggggaatccagctaattgcacattccctgaatgtaccctttcttgtcaaaaaggagttccagagactcttgaaaacgtagtgcagttcatgtgagaaatagaggttcagaaatgcctcattataccctcctccctttggaattcaagcacaactaaccagtatttttcattaaaacagatcttaagactcagaaaacagattctttgcagcagtaagataccaaattctaacctgactcaagaataggatcacatgacagagagcagaccttgaaaagaatcaaagacttttaccctaaaatatatttatttgacatattttaaaatcaccctgcacagttatcttttgagagagaaatttacgttctgtagcgaatctccttccctttccaggtctagttgttagattagctgagagtctagcatcttttaaatgtcatagtagaaaacatttgctatctactgcctctaacggtggccacataagagaattcatctacataataagaatcttgttctccaaaacccgttatcctaacctatgtagggaaaagagagatcagactgttactctatgtagaaaaggaagacgtaagaaactccattttgatctgtaccctgaagaattgttttgccttgagatgctgttaatctgtaacttttgccccaaccttgtgctcacagaaacatatgttgtatggaatcaaagtttaagggatctagggctgtgcaggatgtgccttgttaacaatatgtttacaggcagtatgcttggtaaaagtcatcaccattctccattcttgattaaccaagggtaacaatgcagtgcagaaagccacagggacctctgcccagggaagccgggtattgtccaacatttctccccactgagacagcctaagatatggcctcgtgggatggaaaagacctgaccgtcccccagcctgacaaccgtgaagggtctatgctgaggaggattagtaaaagaggaaggcctctgtctcctgcatgtccctgggaatggaatgtctcggtataaaacccaattgtacatttgttctattctgagataggagaaaaccaccctgtggctggaggtgagacatgttggcagcaatgctcctctgttactctttactacactgagatgttagggtggagagaagcataaatctggcctatgtgcacatccagcgatagtaccttcccttgaacttatttgtgacacagattcctttgctcacacgttttcttgctgcccttctccccactatcaccctgttctgccacattccccttgctgagatagtgaaaataataatcaataaatactgagggaactcagagaccggtgccggtgtgggtcctccgtatgctgagcaacggtcccctgtgcctactgttctttctctatacttggtctctgtgtcttatttcttttctcagtctctcatcccacctgacgagaaatacccacagttgtggagggggtgggccccttcaaacacagaaacgtttttctactgatttcagctctttaaataaaaagttaagtctttcaatcagaaaatctttgaattcacctgtaagctgtaatcccctccccacactgcctcacttgtagctcttttatctttatgaaacaaatcgacacatgtctcatatgtattgactgatgtctttctctctaagacattaaatttaagctgcaatcaagccactttgggcacacgttctcaagatcttctggggctgtgtcacagggcatggtcctcacatttggctcgaataaatctaaatattttgcaaagttgactttttcattaatagttcttacagaacctactctgtgctctttgttacaagcataaaatcaatatagtattagttataatagtattgggtataccacatattggcaatttcttatgaagttaggcatagactaacaatgggatcaagtgtaaatgttttaatgtatttatgcaagttattttgatatttatgttctgcagatacttctatcagatttattatatcagctaattatttgttttatgattgggtgcattttttatagatgataacaccatatcttttctaggcctttattggagaaaattgtgtgaaactactcaggactacatgtgaaagtccttattggagtggctgacagaattgaagtacatttcctctgtagccaccagacacccagattcctccagtaacaccttaattttgtttcctgcttggctttggtcttcagtcttgtgctatccagagagactctgtcttacaaatcccccaggtcattctaaagccacatggaccggacaattgtcaatgtggtgggaagggtcgcactgaacggtcactctctgtccttctgagggagccatactgcaggcagacatggcagtcctggctcaggttgtgtccttccaagtatccctgccctcctgcaggtgtgatgctgatccatgcatcttcctcccattcctgggtagagggtctccttgttttttcccagatcttcttccagcagccactatgtcttcccactgatgtcttcagcttcctcttttctgcccttcccagcaggatgaggcttttattcctgaagaaagagagaggaggtgggagatgaggctgttattcctgagagaatgaacagggctttggagcttttctttcttctatcccagtttctatgagttcctccagtaccagtaacacaaaggtgttactggctttgcccctgcatgttaattctctagcaatgtagtggtgacagtggaggtgggtctggatgcatttcagctgcagttgctgtttttctttccagcacagaaccaacttgggagctacagggcaagagctttttgtaatgtgtcctcaatcctgggagaaaagttttcaatagcaataggaatctctcagttgtatgttctctgagaatttaaacaataacttatttattatactcaattttaaacaatgtaataaatatgtctaatttaatcttgcattagcttatgtgacatttgctggccattgccccagataaggccattttctcttcctgtttatccctgcaagtgactgacttttgcaagatgtaaggtttcttgtttgccctataacatcaataatctgaaatattaaagaaaatgtgctaatttgcagatcagtaaggttagttgtttctgtaaaaatatatatgtttttttgagatggagtcttgctctgtcaccatgctggagtgcagtcgtgtgaacttggctcactgcaacctccgcccccttggttcaagcgattctcctgcatcagcctccatagtagctgggactacaggagtcttggcctccaaaagtgctgggatttctggcataagccatcacacccagccaaaaataatatattttaaggggtgcatacatctccaggctgagtaggagctttatttgtagtactcagtaactggaattaacacaactattaaggagcattataaataaatagtaagggtgcactcattaactggaatactgttcctcattagaatcaacacatcctttagttcatgtcctttgcagggacatggatgaagctggaaaccatcatagtcagaaaactatcacagggacaggaaaccaaacaccgcatgttctcactcataagtgggatcttaacagtgagaacacatggacacagggaggggaatgtcacacaccagggcctgtcggggtggggagcaaggggagggacagcattaggagaaatacctaatgtagatgacaggttgatgagtgcagcaaaccagcatggcacatgtatatctatgtaacaaacctgcatgttctccacatgcatctcagaacttaaagtataattttaaaaacacattatttatatagaaccaaattactggctcacaagtaattatactgtgcaaaaaaccacacaaatgaaattgagactataagatttcacttgaacaaaatcttgaaaaatagatctaaagtaacaaagatgactgactcaatatggtgagaggaaaatgactgggaggcaggaatgagaggaacacagggaaacttttaagtgtaattcattggtatcttgattgttatttgggatgcacaggtgagcacatgtgtaattacatttttttcctttggagacattttcttgctttgtcatccaggctggagctccgtggtgacatcatagctctctgcagcctcagaccctgggtctccagcaatcctcctccctctgccctatctagctgggactacagctgtgcaccaccatgctcggcttcagtgtgtattcaaccagacactttaattatgcagtatttattacgtggcaataatgcctcaataagggtattgcaaataagtggatggataatttgttcaattaagattgatggaaatatagacacttacatgacaaatgtatgacaatcaagaaaataaaactgtaggaaacatactttactttttgttaggtaatcgcaacagtgcatacacatcacaccatgttctcattacagagaaaaggttctgcaaacctcacttggtgtgacctcctgtatgctgggcttggctcagggagaagtcaggaccagtggtgagaagcacaggcccagataaccagactcactctgaccaaatgtgagtgctggggacattgtacaatccatctgtgttttgctgatattttttcatctgtaacgtggaaataacattgatactacataccatggtttctgtgcatatggaaaaataaaagatgattggtgcaaactttaaatacacacagtttatgtagatcaattgtacctcaataaaactgttttaaaataaaaattacaaaactataagttttataggttttaagggtttatcatagaacaaacttacaataagaaacaagaatttccaaatgctatcaatatcacaaatctcccccaggacgctctgacatgctctgagccccactctctcctcaggcgtcccatcccagagcttggcatgtagtaggagacatgcaaatagagccctccctctgcttatgaaaaccagcccagccctgaccctgcagctgtgggagaggagccccagccctgggattttcaggtgctttcattttgtgatcaggactgaacacagaggattcaccatggagtcatggctgagctgggtttttcttgccgctattttaaaaggtaattcattgagaactattgaaattgagtgtgagtggataagagtgagataaacagtggatacgtgtggcagtttctgaccagggtttctttgtgtttgcaggtgtccagtgtgaggtgcagctggtggagtctgggggaggcttggtccagcctggggggtccctgagactctcctgtgcagcctcaggattctcctttagtagctatggcatgagctgggtccgccaggctccagggaaggggctggagtgagtggcacatatctggaatgatggaagtcagaaatactatgcagactctgtgaagggccgattcacaatctccgagacaattctaagagcatgctctatctgcaaatggacagtctgaaagctaaggacacggccatgtattactgtaccagacacagtgagaggaagtccgtgtgagcccagacacaaacctccctgcaggggcacgcggggccaccagagggtgcccaggatcccctgaagacagggacagcccaaaggcaggtgcagatggatgtcaagagggtctgtggcttcgtctacatctaactgtttcctggtgagcctctgtatatttatttttctgtgcccactaatgaggttggtaagtttaaacacttttttttttgagatgaagtctcgtgcttgtgccccaggctggagtgcaatggcatgatctcagctcactgcaacatccgcctcatgaattcaagcgattttcctgcctcagcctcccaagtagctgggattccagacaactgccaccacgcccggctaatttttgtatttttagtagagacaggctttcaccatgttggccaggctagtctcgaactcctgacctcaggagaccctcccaccttgggctcccaaagtgctgggattacaggcatgagccactgtgcctagccaaaaaagacttcattattataggaggaaaaattctcatctgcaagtgtcactgatggaagcagaaaaaatgcccaggaagtcaggtgaggctgtagacactgtcaacccaggatgcaaatctcaccacaagtgcaggagaaagggcagggggttgatggatcatcctaactaacgtatggtttaagctgagcccagcaagaccctcagtgcctccctaaccacagttgcccttcagggataacccatgtgctcaacagcagccacaccttagtatctccactgtgcagtcattgtctaggacaagctcccaggatgtggggctttggcacaaaccaggtcatggatgtcagagaggggcagctgggtgtctggtccataggctccctgatgttggagggttgagaggtgcattctctgggccaacatatactctagggatatttacttcagaacacataattttatttgttggtttatggttaatggggtattcatcccttcaatcatttgtcctttgatttacaaaaacattccaatttcactttggaagtaattttattatgtgcaattaagtcattattgattatagtcacactattttgctactaaatagtaggtgttattcattctttctaactctgtattttgtacccattaaccatatccacctgttctctggcccccactagcctcccagactccagttaccatccttctaccatccgtgttcctgagtttaattctgttgatttttagagcacacacataagtaagaacctgcaatgctttttttttcagtgcctggtctttttcacttaacatagtgacctccagttccatccatgttgttgcaaatgactggatctcatggaatacctaattttattcggttctttcatatgacatagagaagcaagcatgcagtctacaaacaactgtaattttcacatttaccccaaatgaattattacttatttctgtgcagggtccaggcacatagtagcctttctcttgagggactgttaaatttagagtgagatcacttgtttctcatattatatgattcctgtccatgtgcagagatcttaagtaatctgcttctttctgcacactaactctgaccttctcgacaaaaagagtagagattttcatgtttcctgagtctggggtaggagttagtcctacacaactcagagcctgcagagacctcccagtgcagttttatagacacaggtgctttctcatggggggtgagacctccacttcctgtgattgctgctcagatctaactgtgatttcagatttaggacaccattaggctctcaaaccatttctattctaaaaatcagcctcatcatagaaaatggaaataattcaatatccatttccctgaccgtatttcatccttgtttttaatttggtgcaagtttattacatatttgcctgaatctaacttcagaatcaactgaattggtctagaaatctcaaaaattgaacagaagtgggttttattatttttaccaaaatgtgtgtaggtagggtttccaatgtatcatccagaacttgtgcatgctaacaactgtttttctcagtcaattatcagcctggtgaagcccttgcaaaccccctcactcacctgtgctgcctctggattctctgtcacaatcagtgcttcctgtaggcactggatggaaagcacaggagtgggtcaggtgcatacgtgatgagtggaggatgaattccagcccacttatcatgaattcagacaagcccacatgttcccacatgcactatatcttcagacaagcagatgtgtctgcacatgaattcttctttcagacaaacacgtctgtcccctcatggactcttgccacacacaagcacacgtggcttcttgtggactgtactttcagacaagcacacattgtttcatgtggacatcttcctcccacaaatgcattttcccctgagtagactcttctcccacaagcccatatgtcctcacatggacatttctcacaggcaaacacccatttccccatgtagtcccttccctcagacaagcacacgtattcccaggtagactcttcccttagacaagcacagctgttcccatatgaacccttccatatgacaagcacacatgttcccatgtgaactcccgtataacaagcacacatatttcctcacgggctcatcactcagataggtctgcatgtccacatgtggactctactctcagacaagcccacaggtcctcacatggactcttctctcaaacacccgttctccattgtagactcttcccttagacaagcacgcattttcccatgtgaactcttctgcatgggaagcacacatattcccacagggactcttctctgaaacacccattctccattgtagactcttcccttagacaagcacgcattttcccatgtgaactcttccgcatggaaagcacacatattcccacagggattcttcactaagacaagcatgattgtctccactgtgacccttccctcagagaagtacacttgtctacatatggactcttctctcagacaagcaaacatgtccccacgtggactctttcttctgacaagcacacgtgtccccatgttgttataatcattttctcacctctgtctcacaaagttgccctgtcctccaagaataattttgacctctcacttctcattcacactatggtgattggtgcgcagcattttcacccaagagaaatgcaggcagctctcagaatttattgtgatggaggcaggaagacaaacacaaagataaaacttgtcgctaccttgctgggctgtgttctgtgcagagtctctgaaggctgccctggggctgtgtcctaagctgtatctctctgattccactaggagaatgcacatagagaaattcaagctgaatggtgtcctgatccctgcctcattctgctattcttccctattcctcagaaattcacccaacattgccctctgtcttgtattgtctacattctcacagactctctcatagaacttcagcttcaatggtcagagccctggtcacttcttcccaactctccgcacatgccaagtgcacattagagactcaataatgaggctcaccaggggcagtagtagtttcatctatcacagtggagatgaaaatccatgatttaaaataggtttctaaaaaagaaaatatgtctcacatcaaacacaaatgagagaatgcaacggcataattcattttcaggtttttcatatgtaaatctcctaaagtacataatttagtttttagtgtggttcctgatccatgaatccttttgccttcttcattatctttcattcaaacaaacagagaccatacccactgttcacagtgtagcctcatggagaacatcttcaccagtcagcccagtcagtgagtgaggcctttaaatccttcatgctaattcaaatttctggctttattcttagtagaccccaggttttcggggatgttgggttgtgccagcactcctaaataagggagatagaaattatttcctcaggcatcctcttgcaacatttggacaattgcccatagtttgattattgaggtgtgatgcatcaaaataatgttagttcaatcttctctcaaccagtcattgaacattgaaattttgtaattatttatttggatatctctgaagtttacctcttgaatatttaggtcatattataaatagtttaagctgcctactaggtaaaatgatctgctgcagaattttgacttccttgctgtgcatttttgcatttaaattgaagtttctattactcgtgtgtctagaatgtaaaaatacgtcttacattttctcgaatttttcatttcactggagtttccagaagatgagaaaacctcccttgtgtataaaatacctggtaacacattgctcaatagtttcgttgctgagaccagctcagtcgggagaccctaacccagcggtgctagaggaattaaagacacacacagaaatatagaggtgtgaagtgggaaatcaggggtctcacagccttcagagctgagagccctgaagaaagatttacccacgtatttattaacagcaagccagccattaatattgtttctatagatattaaattaactaaaagtatcccttatgggaaatgaagggatggaccgaattaaagggggtgggtctggctagttatctgcagcaggaacatgccctaaggcacagatcactcatgctattgtttgtggtttaagaacgcctttaagcggttttctgccctgggggggccaggtgttccttgccctcattccggtaaacccacaaccttccagcgtgggcattatggccatcatgaacatgtcacagtgctgcagatattttgtttgtggccagttttggggccagtttatggccagattttggggggcctgttcccaacatttcctctttaatttttttctcctctcatattgtactgttataagcaatgagatatcaggacacatcatcaacactttgctaagaaatatcttcagctaaattcccagagtatcatatactaatcctaattttaactaaggtaacataattaagatacattctataacaagtcacacatattatccagtatccagtaacatgtttgtgacagaaacaaagcaggtgcttcctctgcaaagggtcatctgaggtctgagttgagggtcacacaggtatttttctggtttacaagggtgggaacgacaacagtaataacgactctgaacagcactggcccttccttgaaaggttgcaggtaaagctactgctgctatatcaaattaacaccttactagaataaagcccagagggagggtccacatgctaggtcacagagtgaggagaaatggagctgtgctctgctctccacactacctacaagatcccagacacacgcccaggttccactgatgcaaggcatctacagtgcagttctaaggcacctgcttcctggggcagggagcatcctcctgtcaattgcgcacctgctccttctgcaagctattaagtgagcacttctattgccatgaattatacatgttctctctcttaacatgtatattgaacatgcttacttacattgcattttatttttctctgaaatacactggatgagcagaagaaaataaatcacacccctgatgctttccacacatacaaagattcctgaaggcagagctgactgatatcctcaccagtagaccactgcctttcagagatgatcttggtattcaagttccagcaattcttgaagttaaagggcacctctatctcctctccactgctttgcacctcacctgatatcagctttctcattagaatgccttgtgtttaaggaatgagagttcctgtcacaggtgcaaaggcccaggttctcccactggctccagtccagggctagggacacctgtaagaccatgatatcatctgatacataacctttacatcataagctttacataacctttacatacataacatcacacatagcattcatgatacacacatcagatcacctttacatgctctaacatgtaaagattaggaaagtcatcaagctcattcttatgtcaaaaaacatctgcacaatttgaacatcaacaatttttgaaatctatcaaggaattgaaattgcaagggaaattacccattccaaatactgaagatacagacatgtccaggatcagagttgacactggctgaactggaaaagaacttgaagaaagcacgagttggtgagagcacacacatggtaaatgctatgaaagcctaaacggcagatgtggactagggtgagattcctggggacctacactccatagtcttctgaactttccttcaaaatcttccagattctcaggtatacaatccaaataatttttttatgggtctgaattggggaggattaattactgagaaatgtaccaagagccttctaaaaaaaaaaaatcctataggaaatgagattttccagaacctggaggaacctacagttccctaaagacagacactgaggagaataaatctcgacagcgccgcctggaggtggaggtgaagagcttcctggaggagctggaccggaagatccacgacctgaatgactcccgcccaggcctcccaagctgggcaccgacaactagggctggtggaggcccgggatccccaccgtgagtcccaagcatgtgtgcgagaccagatggcgctaggacgttccctgtgtgcgttgcttctgtaaatgcagacgcagtttgtcgtgtttccaaaccagttgtgctgtccactcgctcctttccagagtagaaatctcctctccgccgggcgcggtggctcacgcctgtaatcccagcattttgggaggtcgaggcgggcggatcacgagatcaggagatcgagaccatcctggctaacacggtgaaaccctgtctctactaaaaatacaaaaaattagccaggcgtggtggcaggtgcctacagtcccagctactccgaggctatggcagtagaatcgcttgaacccgggaggcggaggttgcagtgagccgagatcattccactgcactccagcctgggcgacagaacaagattctgtctcattaaaaaaaaaaaaaaataggcttcaggaagtagctcctagatgggcagaatcggtttaaccctctgtgtccacaggatctggagcctctctctccttagattaggccacctcctcaggattacagggctcttcagttttctcaacatgctgttgttgccccaaataaacacaaaagcactttattttcttatgcttacctttaatttttcaaaacaacataaaggtgataattttaacaataaacatattacaacctactatacatgatacccttcctgtagttcgaggtttattctcaggaatttatatgtattacttattttcaattgctttctgatatgggatgtcaatgccactttactacagtctttattcttttaagttatctctaaaatctctaaaaattaatctttccaaagcaccactcaaaaccagtgtattattagaacttgtgggtgtaatcgttggaccaatattaagaataaattcttaatggactaactcagatataaaatttctgtccttcctctctctctacatatatacataacgactttgaggtttcagttgaatcagtccattcattgaatgtatgacaataggttgatctaattgtatacgttaaatagcatgaagaaacctcaacaatagcaaaagtagccccttaccaaaaacagctctattatgttagattccacttatgagaagttcaaaagagaaaaacatggatctgtattgtcagaaatctaaacatttccccacacaggagctgaccacaggcacaggaagacctgtgttgggggatggactgctcttcagtctaccttaggtgccggggacaagagtattcacgtttggcagaaactctctagtgagaaattccagatctatgcatttcctcttatatgtaaattttctcataaaaacaaaaaataatgtataaaataatttaaaattcagaacataataaaaatgacattacatgcctatccaaaacattcagtaatgaacattattatatgaattaataaaatccattcaaatatacctactgaaattaacttctggaaaataaaaagacaagggtaacatccgtaacttaaaaattaataagcatatatttcatagagaagaaaaaggtagtcaagacatatgtggaatgtgtattcttttttccaatcaaatgtcattaaactatttaaacaattttttaacctgtgtcataagtatagattactaatatttgtctgatattacaactgtgaacaagttttaaagaaaaaaggatatttgacagcatgtgaactaaattgaatttattcttaatattgagtccaacgattacacccacaagttctaataataccctggttttgagtggtgctttggaaaaattaatttttagagattttagagataacttaaaagaataaagaatgtaataaagtgacattgacatcccatacataacaacatattgatctattttttgttgatggactttaaatttgtttctagtttatgaatattataagcaaagctgttacaaataccttagtgtaagttttcctatgttgtctcatttttattgcgaaaacatgacgtatgcatttctttcttgtaagagtaattttaacttttttcagtttcattgaggtatatttgaaaaaattttttaaaagtatatggttgaggaacaatgcaccacttgatgctttgtcttaggccattctcacattgctataaagaaatgcctgagactaatttgaaaaaaagaaaaagatgtttaattggctcatgattctgcaggctctataggaaatgtagttgtttattcttctggggagactcaggaaagttagaatcatggcagaagacaaagaggagcagggcaatcacatggccagagcaggagccacaggaggcgtgcggtgggggggtgcggggcgggtctacacaccgttagacaccagatcttgtgagaactcacgcactgtcatgagaacagcagcaggagttgttgctaaaccattcatgaaagacgtaccccatgacccagtcatgtcccaacaggtcctactttcaggaatgaggattataatataacatgagatttgggtcaagatacggatccaaaccatatcagatacacattgtaaaatgatcatcgtagtcaaggtaatttgtgtgtatatcatctcacagagctacaattttatttttttaagtttactgcatgtgtgtgtgtgtctgatgagaacaactaaaatctaccctgttagcaaaaatcgtttttacagtaaagtattaactataggaacattgctgtacattagatttccagaactcattcaccctgcacaactgaaactctgtaccctttgacaaacatcacccaaattccctctcctcccaggtcctgacaccctctagtctactctctgcttttaagaccttggatattttagatcccacacgtaaatgagatcatgaagcatttgtctttctgcatctggcttattccactcagcatcatgtcctccaggtccatccacgttattgcaaatgtcagaatttccttcttttcaaagcgtcataaatttagttttatgtatacacattttatttatacatttatcaatgtatggcccttaaattagtttacaaatctacactattattaataatcttgcaatgaacatgtcttttgcataataattttatttccttttaatatataacaagaagtggaatcactagatcataagatagttttattttcaatttgttgagtaaccaatcctaccacatcatataaggattcctttttctccacattgttgccaacatttttaaagttttgtcttgctgataatagccattttaactgctttgaagtggtatatcattgtgctttttatttgaattcccctgataattaggaatattgagaaacttttcattttccgtttgccatgtgtgtgtcttctgaaaaaaaatctatccagaattttgccttttttaatcaggtcacttgttatttgttattgagttgtatggcttatttatatattttgtttgaacttcttgtcagatatataattacgcatagtttttcctgtgttttggtattaaattcaaataaatcagttctgagtcaatgacaggaagttttttctttttccatgttgtctatgagtttatggtttcaggtattatgttcatttttagttgatttttatatcatgttaaaggaggcctaattttatttctttttatatggatgcccagtttttacatcattattgaaaagactgtcctttctctactgtgtgttcttggcacactccatcaggaagagacataatgaaaaaagtatataagatgaatattcctgatgaacatagatctaaaagtcctcaacaaaatactagcaaatagaatccagaagcactttaaaatgtaatacatcatgatcaaatgggatttaccctgggatgcaaggttcattcaacatccacaaatcagtaactgtgattcgccatgtgagcagaataaaagcaaaaaacataggattatctcaatagatcctgcgaaagcatttgataggatccaacatccactcgtcataaaaaccttcaacagactaggcatcaaaacatacctcaaaataataagagccatctgtgacaaactcagtaaacatcatgctaaatgagcaaaagctcaaacaccttgagaactggaacaagagaaggatactgtctctcactactcctattcaatataacactataaatcctagttagaacaatcaggcaggagcaaaaatgaaaggcagctgatgtggttttgatttgtgtccccacccaaatctcatgtctaactgtaatccccagtgttggaggtggggcctggtgaaaggtgattcgatcatggggttgtgttttcctctctcacgctgttctggtgacagagctctcaggagatctggtttcaaagtgtgtggcacctcccccttgtctcttcctcctgctcctgccatgtaagacatgatgcttccctttctgtcatgattgtcaggatcctgatgcctccccagccatgcttcctgtacaactcgcagaaccatgagcaattaaaactcttttctttataaattacctagtctcaggtgtttatagtctgagatggactaacacagcatccaaacaggaaaataattcaatccatctgtcttcactgatgatacaattctatgcctagaaaatcccccaaagtaattctagaatagataaataactttagtaaagtgtaaggatgcaaaatcaatgtacaaaaatcaccagcatttctatatcccaaccacatccatgctgagaataaaatcaagaacacagtcctatcccatgtacaatatcttcaaagaaaatgacatgcttaggaatgcaggtaacaaacaagatgaaagatctcttcaaggagaacaacaaaacactgcagaaataaatcataaatgacacaaataaatggaaaaaaacatttcatgctcctggattggaggaatcaatattgccaaaatggtcatactgcccaaagtaatttgcagattcgatgttatttccatcaaattattaccatcattcttcacagaattaaaaaacccatacatattctaaaatatatatggaaccaagaaagaccctgaatagccaaagcaatcctaaacaaaaagatcaatgccagaggcatcatgctaccagatttaacattacaaagtaagaaaaacagcttggtactggtgcaagagcagacacacagaaaaaaaaaagaacaaaacagaaaacagaaatagagctacacacctaaaccatttgacatttgataaggttgacaagaatcaagccatagattaaaaaaaaaaaactccgtattcagtaaatagtgctgggagacctggattcgggcagatatgcagaatgcaacagtgaaggaggctgggcagtttctaccttgatttcagatgtgcagagagccctatgtgcccaggaaaaagcttgctgcaggagtggagccaccacagagagcctctactagggcagtgccaaagatgtggaaagatggggttggagcccccattcaaagtccacactggggcactacatagtggaactgtgggaatgtggccacagatctcaagactgcagaatggtagatccatgggcaacttgcaccctcagcctagaaaagcttacagcacttgactctgactcatgaatggagccccaaggactgcgcccagcaaaactacagtgatgggctgcctgaggttttggggagccaacccttgtcccactgtgccctggttgaattacataaatttgagagaggttattctgtaactttaagatttaatatctgctctactgggttatatgtgtgtgtgggggggggggagcgctgttggccattcctttggccaatttatttattttggattggaataatttacccaatgcctgtaccataattgtaccttggaatacacaacatttgcaatgtttttttttttaattttgcaagctcacagatggagggaaattgccttaagactcagatgagactttagacatttgagttggaggctgaccaagttaagactttttgttattttagtattattatactttaagttttagggtacgtgtgcacaatgtgcaggtttgttacatatttatacatgtgccatgttggtgtgctgcacccattaactcatcatttagcattaggtatatctcttaatgctatccctcccccatccccccaccccacaacagtccctggtgtgtgatgttcccattcctgtgtccatgtgttctcattgttcaattcccacctatgagtgagaacacgcggtgtttggtttgttgtccttgcgatagtttgctgagaatgatggtttccagcttcatccatgtccctacaaatgacatgaactcatcattttttatggctgcatagtattccatggtgtatatgtgccacattttctcaatccagtctatcattgtttgacatttgggttggttccaagtctttgctattgtgaatagtgccacaataaacatacgtgtgcatgtgtctttatagcagcatgatttataatcctttgggtatatacccagtaatgggatggctgggtcaaatggtatttctagttctagatccctgaggaatcgccacactcccttccacaatggttgaactagtttacagtcccaccaacagtgtaaaagtgttcctatttctccacatcctctccagcacctgttgcttcctgactttttaatgatcgccattctaactggtgtgagatggtatctcattgtggttttgatttgcatttctctgatggccagtgatgatgagcattttttcatgtgtcttttggctgcataaatgtcttcttttgagaagtgtctgttcatgtcctttgcccactttttgatggggttatttgtttttttcttgtaaatttgtttgagttcattgtagattctggatattagccatttgtcagatgagtaggttgcaaaaattttgtcccattctgtaggttgcctgttcactctgatggtaatttctttcactctgcagaagctctttagtttaattagatcccatttgtcaattttcgcttttgttgccattgcttttggtgttttagacatgaagtccttgcccatgcctatgtcctgaatggtattgcctaggttttcttctagggtttttatggttttaggtctaacatttaagtctttaatccatcttgaattaatttttgtataaggtgtaaggaagggatccagtttcacctttctacatatggctagccagttttcccagcaccatttattaaatagggaatcctttccccattgcttgtttttgtcaggtttgtcaaagatcagatagttatagatatgcggcattatttctgagggttctgttctgttccattggtctacatctctgttttggtaccagtaccattctgttttggttactgtagccttgtagtatagtttgaagtcaggtagcatgatgcctccagctttgttcttttggtttaggattgacttggcaatgcaggctcttttttggttccatacgaactttaaagtagttttttccaattctgtgaagaaagtcattggtagcttgatggggatggcattgaatctgtaaattaccttgggcagtatggccattttcacgatattgattcttcctacccacgagcatgcaatgttcttccatttgtttgtatcctctttaatttcattgagcagtcgtttgtagttctccttgaagagatccttcacatcccttgtaaattggattcctaggtattttattctctttgaagcaattgtgaatgggagttcactcatgatttggctctctgtttgtctgttattggtgtataagaacgcttgtgatttttgcatattgattttgtatcccgagactttgctgaagttgcttatcagcttaaggagattttgggctgagataatggggttttctagatatacaatcatgtcatctccaaacaggaacaatttgacttcctcttttcctaattaaatatcctttatttccttctcctgcctgactgccctggccagaacttccaacactatgttgaataggagtggtgagagagggcatccctgtcttgtgccagttttcaaagggaatacttccagtttttgtccattcagtatgatattggctgtggctttgtcatagacagctcttattatgttgagatacatcccatcaatacctaatttattgagagtttttagcatgaagtgttgttgaattttgtcaaaggcgttttctgcatgtattgagataatcatgtggtttttgtctttggttctgtttatatgctggattacatttattgattttcgtatgttgaaccagccttgcatcccagggatgaagcccacttgatcgtggtggataagctttttgatgtgctgctggattcggtttgccagtattttattgaggatttttgcatcgatgttcatcaaggatattggtctaaaattctctttttttgttttgtctctgccaggctttggtatcaggatgatgctggcctcataaaatgagttagggaggattccctctttttctattgattggaatagtttcagaaggaatggtaccaactcctccttgtacctctggtagaattcagctgtgaatccgtctggtcctggactttttttgtttggtaagctattaattattgccccaatttcagagcctgttattggtctattcagagattcagcttcttcctggtttagtcttgggagagtatatgtgtccaggaatttatccatatcttctagattttctagtttatttgcgtagaggtgtttatagtattctctgatggtagtttgtatttctctgggatcggtggtgataccccctttatcattttttattgcatctatttgattcttctctcttttcttctttattagtcttgctagtggtctatcaattttggtggtcttttcaaaaaaccagctcctggattcactgattttttgaagggttttttgggtctctatttccttcagttctgctctgatcttagttatttcttgccttctgctagcttttgaatgtttgctcttgcttctctactgaaaaaagatgatcatattttgcaatgcaaggacatgagaattttgggctcgagagtgcaatgatatagtttagatgttttcccttccaaatgtcatggtgaaatgtgattctcaatgttggaggtgggaccgactgggaggttttgggtcatggggaaagatccttcaggaatggcttgggaaccaccccatggcacttagtgaattcttgctgtgttagctactatgagatctgattgttaaaaagagtctggcaacccttcttgccactcatgtcccagctctcaccatgtgacatagcctgttccccctttggcttccatcatgattgtaaagtagatcctggtgccatgcttctcacacagccttcagaactgtaagccaaatgtgcctcttttctttgtaaatcacttggcctcaggtattaatttataggaatgcaaaagagactaacacaccgtccaaagcattacacagattcaactctatttttatcaaatgaccaatataattgattacatatttagaaaaaaaatactaaaattcctatagaatcaaaaaagagtctgaatagcaaaagcaatcctaagcaaaaagaccgaagctggaagcaccacattctctgacctcaaattatactacatgaatataataagaaagacagcatgctactagtagaaaaaaatagcccagaaagaaagccaaatatctaaaaccaactgttgtttgacaaaactgacaaaaatatacactggagaaacaaccctctattcaataagtggtgccgggaaaattaggtggcttatgtggaagaatagaactagacttccatatcaccgtagacacaaattaactgaatatggattcagtgtttaaatttataaactaaaactataaaaatacttgaataaaatctaaaaagagtcctctggacattggtctaagcaaacaatatatgactaagacttcaaaagcaaatgcaataaaaacagaagtagacaaacaggatttagttgaactaaaggtcttctgcacagcaaaagaaataaccaacatggtgaccagacaatctgcaaatggaaaaaatatctggaatctattcatcttgcaaagggctaatatatagaatctacaagtaactcaaataagtcaactaaaaattacaaataacttcattaaagaatagacataaacagacatttatcaaaagaatacacagaagtggccaacacaaataagaaaatatactcagcatcaccaatcatctgataaatgtaaattagaaacaacatgatacggcatcttccaccagtcagaatggctgttattacaaataaaaacagcaggtgtttgcagacaaacataggaaaaataatgatttatatatgcttggtgagaatgtaaattagtacaacctccatgaaaaacaacatagaaatttctcaaagaactaaaattagaattaccatttcttccagtaagctgtcccagtaggcatgttcctcccaaacttttatatcagagaatgttgcctgcactcatatgtttatttcaacaccattttcaatagaaaagtcaaataatctaagtgtcaatcagtggatgattagataaaatatgatatatgtaaatcatggaatactatgcagccagtatggtatgaattcagtgtgaccagcccctggacaagggcttgagtggatgggatggatcatcacctacactgggaacccaacatataccaacggcttcacaggacggtttctattctccatggacacctctgtcagcatggcgtatctgaagatcagcagcctaaaggctgaggacacggccgtgtatgactgtatgagagacacagtgtggaaacccacatcccgagggagtcagaaaccccgagggaggaggcagctgtgctgagctgaggcagtggtgcagcagtttctttaacttccatatgatctcattttgcatcatcttctacttttatattagctaagaacttggggtagacaggtgctcctaagagatccttaacttgcccattttgatggttttccagaagacgtgagaagccactttgttagcaaagcatcccaaatccatgccctgttctagatacatgtgagcccatttcctggtctttgcttaactgacaagctctcatcagtgcacctgggctaatttcacatcaggtagaggaacgcgttataaaggaaagctaatgttgtaatagcaattcctgcttaaaaaccttcagcttcattgtttttgtgtaatccatcagcaaattatgttagttcaaggttctcaatgggagtttctaataaatagaaaggatgtataaagcttcccctaattaaaatgaaacaattgtgaacacaacctcggtattcagccatgtctccacccttcacacccttcgccacaaaggaattttcacctctcctggaagctgggttcattttcaaattagttatttttttcaatgtaatatctcaagattatcgtatatgactattttagcagaaagtgaattatgggaacttgaactaaacaactgaaaacaaattcacaactaattaaacaagatgccagaatgtgattggctccagggtttgtaattcagcagttcatgtacccagactggaaatttacatgtcttcttgttaccttcacagcacagtcaactcccattatgtaagaaatggtgactgcattcccaagggttatgcatagatatgaaaatagactgggtaaggtgaggagttgattgtttaaattcccctctgaagaagcagcatcaactcaacaaaccacctctcttcactctgtgactagagctatgtcacaggccacatggacctaaatccttgatggatataacatgactacataaattgggctgatcatttttatgctataaaattaatagatgacactgcactccagcctgcacaaccaagcaagtcttcatctgtaaaatctaaaaaagaaaaattaataggtactgacttcgaaatttttgataataatattttcaccacccaaatttaatcacacccacatgttacctgcatcttcactgaaaagttcccagtcacgatgagttccttcaatgctccatgtgttcaaatctggacatcaagagagtccagagaataaaacacaatgacggcagtgaaactgatatatattcagcacctcttaactcaggaggactccatacaccctggcacacaggtgcttttctaaatggctcacaatgactccagctcactcacagagctcagacagaaacctcccttcagggtgggagctgggtggcagggggcactcagtacccgcagaggtgaaaatgagcttcagatggaacttccctgtcacctcaacatggaatttattgtttcatttcattacctctctttccataatggttcatttcttttggcctgttcattactgatatttttcagagcaatctcacttgaatctttactcttttggattttgtctccttgacaatgttgggaagttttacctccagcatcataacatgatctagtgatctgacacattgtgcaaacaatacctacaaattcagaacctctttgtttttctttccacaaaatataattctttctgttctgtgtatgagcatgtcttagcaaccctgtacacacccacatagatgtctacaagcctatgaattgttctctgtaaataaaaatttatctcaaattccttcaatgttcataattctgagagtgaggaaggtccttctcaatctgttcaaacaaaatgcccagagaccatccagtaggtaaggagttcacctggctctggtgtggggtctgtctctttccctctgttgtcccacaggtcagcccagttgttcacgtcctaacaagaaagcccaggtttgtcctgattttaaaacacatcaaacttctgatgactctcctgttacccacatccatggagatagattatttattatataattcagcaaactaatgtcaaatgcccaagttgcaataccgcacatcctagggtatgttcatgcaattcaatggaggagaaaatctttcagagacagatggatctgaaatgataaatatgtgggtaaggactctgggcttgagtatcattgtccagccatgtttcacaagtgtgtcctgtcagggaaggatcagagttccttgtgctctcagagggaaggggtcacagagttcctctctggttcccaggaaaggtaatcgcactaatcttcatgatcttcatgagactatcctccagtgctgacctgttacggagtttttgtctgaagttctcactgtaatccccaatctacatattttcaatcagaagtgtttagagggcaggacacatcttcaaggtcacacattgagaagtatggagatatgtcccactaccttctcctacgatctcagacagaatcccaaatttcaaaaggacacagaaggacagctctcaggtgcttttaaaaaatgacccacttccagggacagtgagcttccctgtaaccatggtggatgttctgaactacaataaacattggatggatccagtattgtttgaagtcactgtcattattacattcagctgttgtttcaatgtgtctgaaagggtaaatgactatttagatggcctgggtgtgtggtgggttttatatgaatctttaagggttgaacagtactgaccctattccaaaatctgtccttgatccaggatcacactcatctctcagaccagctccttcagcacatctctttacctggaagaagaggactctgggcttggagaggggaggcccaagaagagaactgagttctcaaagggcacagccagcattctcctcccagggtgagctcaaaagactggcgcctctctcatcccttttcactgctccgtacaaacgcaccacccccatgcaaatcctcacttaggcgcccacaggaagccaccacacatttccttaaattcaggtccaactcataagggaaatgctttctgagagtcatggatctcatgtgcaagaaaatgaagcacctgtggttcttcctcctgctggtggcggctcccagatgtgagtgtttctaggatgcagacatggagatatgggaggctgcctctgatcccagggctcactgtgggtttttctgttcacaggggtcctgtcccagctgcagctgcaggagtcgggcccaggactggtgaagccttcggagaccctgtccctcacctgcactgtctctggtggctccatcagcagtagtagttactactggggctggatccgccagcccccagggaaggggctggagtggattgggagtatctattatagtgggagcacctactacaacccgtccctcaagagtcgagtcaccatatccgtagacacgtccaagaaccagttctccctgaagctgagctctgtgaccgccgcagacacggctgtgtattactgtgcgagacacacagtgaggggaggtgagtgtgagcccagacaaaaacctccctgcagggaggctgagggggcggtcgcaggtgcagctcagggccagcagggggcgtgcggagctcacggaatacaaggccgggtcaggagcaggtgcagggtgagcggggcttgctcatcttctcagtcgtctccctcctcgccagcacctcagctttccgtagaggtcctctttctttattgtgtgtggttctacttcctcacatccttgtgccaggaaagaaaggagtaaggcaaattttcctgttacaattgaagtttcaccaattactaagaactttcctgcaagtacctgcacagcccattatacctcatttatatatgtatatattctaatgcttctcaccatctcttgatttgtgtcatcaatttaattgtgccctttttgaaattcatatgctgaaactttaaatccaatggatctatatcggaattttaatggtataattaatgttaaatgtggtcataaatgagaccctaatgcaatagagctgttgtctttattagaagaggaagagacaccagatacctctcacttctcacatgcactcagagaagagggcacgtggagacatagtgcactagaaggtgggcctctgcaagccaggaagaagccgcaccaagaaccaaccctgccagcaccttgatcttctacattcagactgcagaattgttagaaaatcaatatttgttgtttaagccacccactccttttgtcttcttacgaagacccagacaggctaataccacacaactctgttagctccgtctcctggagggagaagcagccccctgaagctgggcacatcgctcagattttcacatgaattaggcaaaaacagtagctctcatataaaaactgtcacgtccctgttgggacaaggtcttttaaacaagccctggggctttgtcacaaatgttgcattttatcctttattaggacttaactaattgacaatgagtaccagctggatggaaactgaccactgaccatcttctgctgtctccttattatatcacagaaaaccacagcaacattactctatgtcttcaactttctaaatttgtactgaatctattgctaaatgaggagctacatggggtctgagttttgttaccttcttcccagtcttccccaattaccaagcatagaagatactttcagtgaaatttagctgtcaatgcccccaacaccacatcatgttttaaggtccaaggactttctttggggggctattgaaaaacacttttgaatggaaaatcctaaagcatacaacagctgaaagaatggcccctgtgcacatgaaggctgaagggatggatgatagggtacgttcctccaaggtgttcctgggcatgtgatggttggatacctcatgcatacgaaaacaaggactgaactgagatagaaacaagggccatatcctataggaaaacaagaaaaaaacgggcatccctgaagagagttaattagacttggtgggtttaagatgaatttttttccaaagttttttaatgttctaagctaaatatgaatattttcaataaactgcaaattaaaaggagaatgaatttagaagtttagacagaaaaaagccatgagggtgtagaaagcaaatccacacaaaactgtcacatggcagaggccagaatggagctgatgcagctatatcattattctgcagacctagttgagaccctttggtgtttaaggcaggtccagcagtgaagaactcctttattttttgtctgggaaagttctaatctaatcttcatttctgaaaaggatttacatgataaagattcgtcttggcaggttttatttatttttagtcccctccaacccacgtcaatttgagtaaagtcatgtgttacgtaacaatgctgcagtcaacagtagaccacatatatgtttgtggccacataatgttgtaataccatattttcactaaactttttccatgttttgatgtgtttagatagagagatacttaccatggtgtttccatttcctgcagtgttcagtgcagtaacacgctgtacaggttagttgtctgggaaccctgcgctaatccacataccctgtgtgtagtagggtattccttgtaggtttgtgaaaattcacccttgatgcttgcacaatgatgaaattgcccagggacacatttctcaaaaagaacctctgtcaataaaccacacaccattgaatacaatccctgtgccttctgaactgaaaaccttctgctgagaaatctgttccttttctttctgttttctaaagcctcttttatttccagcaatgtggttttaaactgtgtcacattttttgtcattgggtttatcttacgtaaaatttatagagcttcttcattgtggatgaatatttgcttcccttctccaaatttggaaatattttttgctattattttgaataatttatctcttctctctctctctctctctctctctctctctctctccctctctctctctctctctctctctctctctctctctctctctctctctccccctctctcccttcactaccccttttgtcttgtctttgtataactcctcaaatgcgtagttgagtgtttagtgtctttcctggcccataagtcttgaactcttttttatttctttcacttaaatttttcttctctgtctctactatttcaaatgatctttctttgagtttactgtttcttctattacttgatctagtttggtctaaaatcttgttaaaatttttggctgtattcttcaggatcaatatttttgtttagtcatcttttaaatgttttatctttattaaaattctcacattgttcttgcatgctgccactagctcattgaacatgtttctaacatttactttaaagtttctgtcaggtaatccatgttcttccttttcattgatgtcagtttatggaccttttggttgttcttctgtttggaccatgttcccctgcttcttcattttccttgactgtctttgttgttatctgttctttataacaaaagccatcatatacttcttcaaagactaggctcatagagatcaccctcaccaatcagcccagacagtaattgtgggtctctcaaaacttgataggattcaaacttctgtctgttcttagtggcccctaggttttagaggatgatagattgtgccaggactcacaggtaagggaggtagaaactatgtactcatgaccatggggtctgtgctgatctgagcttctcttgtcatcactctcaatattcaacttccccgtggatcaggctcagctgtggctgctccacgtggggctgttctcagtctgttgcctctgtgtgtgcagaagtcctctgtgaagttaactagtggagtcagacaggaaaatactacagaccaagaattctcagactgttctgcaaagcccctggattcactgaaaaaagaacaagtttggtccagcaggattcatggcaagtgttggtgagggagataacagtaattcaagtggaagttctcaatgggactcgccttcagtacaaagaagattaacagtcctcagagacactgttcagaagattctcttttaagataataaaactgagagcccaagacaagtctgtgtattactgtgagggacacagtgtggggacatctatgtgagcacagacacaaaagtccctgcagggagacaggaggggactgcatgttagttgctgctcagaaccaccagggggcattcaggacaccagtaggcactcagaaccaccaaggagagctcagaatcaccagggggcactcaggaaactggcaggtgctcagaaccaccaaggggcgctcaagatcccagcgggagctcataaccaccagggggcgctcaggacactagggggctcagaaccactagggggcgcccaggaccaccaggtctctcaagacaggagggcgcactcaggacactagggggcgctcagaaccatcagggggcaatcaggacaccagagggacttcagaaccaccagggggcgctgagaaccaccagggggtgctcaggacatgaccggccctcaggaccaccaggggattttcagaacaccaggaagcactcaggacaccagagagcgatcagaacaccagggggcactcagatcctccagggggcactcaggacaacagggagctctcaggacaccagggtgagctcagtaaaccagtgttcgctcagaaccaccagggagcactgaggacaccaccgctcccttaggaggcagctccacatcaggtccctggatccgggaagggagggcgggtccttttggatcttgccactaacctttggggagttttcctgcttcctttgtggtttcaagaatcatttgcagattcttctcatgtacaaagctctgctttcttggattatgtaatgtttttggctttggatgctaccagaattacgttgtactgtgagaggattcattcgtggtgtgtgcaatagtgaatgaaagctccaatgttaggggtggctttgaaagctacgttaggggtggctgagggcagttagcagaaaatgatcatcactatagaaggctactcatttctttgcacatttgcataaacaattgtagtttatgccctaaaaactgcatgttttcttggccctttttcttaaatggctccactctaagtccagtaatctaattaagctgtgtttcaaagaccaccaatcaagttaattctgtttaatgcaacactttgtaaaggaaaatgtacatctgttttttagagtcagctttaaattttacattactttacaaatattgatttgtcaaatttagtctcataactatcttcagtaatttaaaatcttagtcatgtcatgttaaattaagtaatcctaggtttctcacttgaattagggttactaagaattagaatagtaaaagagtataattagcttttggtgaggtttataaagaaagatgaggattttttttttttttggcttaaaaatattctgtttcccagtttacagggcttttcaactggttttaagataaccactgtttacatctaaactttttttggtaaatgactgctgagtttctatacatattccatagctagagtttcaaagtaaaagctctagtatctttgtattagtgtgtgtatgcgtagatgtgttaatatgtgcatgtatatatatgtgtgtgtgtgtgtgtgtgtgtgtgtgtgtgtgttgtggctactaggtacaaaattggctttgaaataaatattttcaaattaagtaaatgagcccaatgcatttgaagtacatgtgactcaaataaatatttaataaataagttggctttaaaattattggtaaaaacaaattagagatattttaacaattatcagcataccttatagtttatattaattcatcaagtgattttatatttaaaatcacagctagatattatatggtgtcaaaattttttatgatgattataaaattattaacctcgttggccatatgcggtggctcacacctgtaatcccagctctttggaaggctgaggtgggtggatcacgaggtgaggagattgagaccatcctggctaacatggtgaaaccccatctctactaaaaatacaaaaagaaaaaaaaaattagctgggcatgctggcaggcgcctgtaatcccagctactctggaggctgaggcaggagaatgcttgaaccccagaggtggagcttgcagtgagctgagatcgcaccactgtactgcagcctggatgacagagcgagactccgtctcaaaaaaaaaaattataaacctcattaaaaccagaatgatctttgtaattttttgacaaatatgatgtttaatattgttgttttaataaaaaacaggtaaatagttattagaaaaacaattatttgcttaattattaggtttttactcaggcaagcacctgaaattcatgggttattacatgggtaacagagaaaaaactttaaaggatgaattacaattttcatacagtaatcttgataagctacttaaataaaatagggaaatgtaatcaaataaaccccccaaataaacttgttcttcaatttaaaaatctaaagtttaattaaataatagatattgactaaatgtttaggtcattactaattgttttaaaaaatatataagaaaatatttttcttaaaaaattattcttagaaaaataatgtaattcaaagttatttatataacatcataaaaagtaagagagttttaaagaaatttattgacatagagaagtacttttggtaagaaaggttaaaataaaaaaattttatatgagaaataatcttgcatggtaattttttatcctaaaataaaatgactaagaaagaatgacgtttagaataaaacaagatgttcaactatgccataaatggtttgtgtaagtgaaaataagatttataaaaagttaatttattaaaaaaccttcatattatcaagttgactataattgaaagggaagtatttataatagtctttatagagatctggcttttatataaaatatagtaatacactgaagactggttagaatgacaaaattgtcttaaagtgttgatttactaaataaaattataagatattttaattttttaacccccaaatttaacttttattgcatcttgccattgtgattttttccctttgagaagacttgagaggctctccattttttcatcacgtcctttaacattttttttcttacaggcgattagcttcttactgacttaacttctaactgttgttagcttttaactgctattattgtctgatgctaaaaacattttatctttaagttctaaataaaatgttttctttcaatataacattctacactcttggcttatctttaaatgtctacatttttctatgaaaccaaagtcttcacgtgtaatctgagtcacattcttggtatgtctaattaattcaaatgcttttttcattagagttgacctgcaggttatctacatgcattttccaatagggaaaagcaatcacactgtaaaaggttttgctttgctatttggtaactggcataaaacaaattttatattttattgaaataattcctatgttactgttattaaggtttccaacttactgagattttaagaaaatataaattaatgttattacattcatgtagctatctacattacttttaaaggccttgtgctgccacattactgacctttgactcctaggtctaaaaaggacacacagcattttgggagactaaggcaggcagatcacctgaggtcaggagtttgagaccagcctggccaacatggcgaaaccctgtctttataagaaatacaaaaattacccaggcatggtggtggatgcctgtaatcccagctacttggaagcctgaggcagggagaattgcttgaacctgggagacagagattgcagtgagccaagattgtgccactgaactccagcctgggtgatagagcaatattccatctcagaaaaaatatataaataagagaaaaaggacactaagtcctgctaaatcttaaacactgacagtaattaaagccccatctacagacctggaagaaaatgacaataaaaattcatcatactcttaagacataaggccagaaattgaaactactcaacaactccaggcccagggactattacagaagtggatttgtaagattgtaaaagctaattttgagatataatattacttgagagtttctttataagttaagcattaatattaaatgcacactaatggaagtctagcatctgggcccctgtgacagattgacaagggtttcttgaagaagtaatccactctttagcttaaaaaattattaaaatttataaaagacctatgaaaattatattttatggtaaaagtagttataatttaatagacttatttctcagaattgagagatagttttaatttttctcatgatgttcttataaggggttattgtttagaaaattaattctttcaaaaataaaagtttttgcttttttaagaaatcactgagttttcacttggctaaataaataacttactttacaataatctgtaattccattttgtaatatcaagtgttctaaataaacctttgatatttgacctccttcacacaataaaagtctaaattcagtcatttgacctcattattcttttttgatatttgatctcctgaagccaaaaagaaacatatttagcttctttggtacaattaaattatactggaagcaatgtcaaatttgaaatggtgtttaactttggactatatttatataaatgtgggctatataattggagtatattcatataaattaaagagtacatgttctaaaatggtatgaggttcaattgactttgatatgtcagtatattttgtcagtagtacttatgattattatataaaatttttgttcatcacagaaataaccaaactttctcctcaattctgtctttaaccgtggctattctaaaacttcagccatccacaattgttttcctttgattctttatcaggtggcttataataatctatagaattttgaggggtactcttaaatacacaattgtgacaattttataaattgtgccatttatatacagagaaaaacttccaagactctcatggagacctgatgcatttatgatggttgttaatataatgtcaaacaggacaggacttaattgcatgaactgaactaacaggagcctgaaataaattttatggcttattctttaaagcatttgctaattacttacattttgtttttcagaatcaaaaaaaaaattctcttaagctattcattgtttttaacaattgagtatagtatattctagtgagaaaattcaaaaacacaatttcttcttctctacataatttctccaaaatttggaaactgtgagtattgttatatcaaaatattaattcacataggttcaatataaatctgctttcttccgtaacagggcacaattggagacaatgatcattttaccaagactttaacttgaatgacatattttcatatttactttataaaatgaatttaagctggatagctgataaaagccccttgggaaaactggcatgtaacctgttttgttcagggccctgagctgtagtaagtcaataattttactttctgacagacccaggaatcccaagttgtcttggaaaattgaaaaaagaagaagtaacccaattcatatagctgtctgaaggcacagatgaaacaatgtctgggcttgatgcttttaaagattctacccttagatttcttataaaaaatttccagcaaggtcaatttatgaattaaatagcctatgtacaaaaaatagaaaaaaagagagctaatatgttaaattactatttttgcctcatcttatacaaaaaaattaagcctaaaacttatattacaaataaatttgccctactatgattgtgtctctaataactttggggaattatagagagaaatactgtttcaaaataaacaccagtgcatctgttattagattctaaccttgtccacttgtttttcaatttatattattttctacaatttatattagtttctacaatttatattagtttctataaaaatttatatttgcagaagcctccaaaatatttttcctgatttaaaattaccagaagttaaactgtgctttcttatagctagacatcttatactctaaagaaaataaaatcaatgacatgatttggctctgtgtccccacccaatctcatcttggattgtaataattcccacatgtcaagtggaaaaaggtgggaataattgaatcatggaggctgttttctccatgctgttctcctgttattctcacaagatctgatggttgtataaggggcctccctcttcccgtggcacttctctcttgcagccatgtgaagaagcacgtgtttgctaccccttccatcatgattgtaaatttcttgtggctttctcagccacgcagaactgtaagacaattaaaccttttttctttataatttacccagcctcaggtatgtccttatagcagcatgaaaacggacaaatgtaagcaacttaattatataccaaaactcttttatacctgcctgctgtgtgaagggaaaataagtcttgaggccgccaaatcaccaagctaaatgggagagtcaaactggtgttacaggagataggaagaaattattttggtagatagttagggtgacagaatttctgccgaaaacatttcttctaacaaaaatcagcttggcaattacttattttctattcacacagagttcaaagaaatcacttctaacaaaaagcagcctgaaagatcaggctgtaaaacatataagcaactctgccacagagagggtgtttctgggtgtaatcaccaaacttcacatacatacactgggccctagtaaaaacagtgggccttaatgagcacattcctttccttttctgggggcactataacatcagaaagctggaaacttgcacaagtttaggatgcctgcacttgcaaggaggtacctgggacctagcatggaaaatcctcttcccctttttagcactctgggagtggagccccagccttgggattcccaggtgtttcccttcagtgatcaggactgaacacacacaactcatcatgcagtttgtgctgagctgggttttccttgttggtattttaaaaggtgattcatggagaactacagatgttgagtgtgagtggacatgagtgagcaaaacagtgggtttgtgtggcagtttctgaccttggtgtctctgtgtttgcaggtgtccagtgtgaggtgcagctggtggagtctgggggaggcttggtacagcctagggggtccctgagactctcctgtgcagcctctggattcaccgtcagtagcaatgagatgagctggatccgccaggctccagggaaggggctggagtgggtctcatccattagtggtggtagcacatactacgcagactccaggaagggcagattcaccatctccagagacaattccaagaacacgctgtatcttcaaatgaacaacctgagagctgagggcacggccgtgtattactgtgccagatatacacagaggggaagtcattgtgcgcccagacacaaacctccctgcaggaacgctggggggaaatcagcggcagggggcgctcaggagccactgatcagagtcagtcccggaggcaggtgcagatggaggctgatttcctgtcaggatgtgggacttcatcttcttccaacagtttctctaatgaacctccctaattttagaattctgtggttcctaatgtcatctctacatattttcaaaaggtcattttaatatgaggacataacctctcatgtaccaaatgcacattgatgcttacaaagatgaaaagttctcaaccattgtcaccaggatcgcagtcctgaggaagctcacgggtgtctgatgagtctcctccattcaggcccaggacagaaacctcagggagactcctggactagaacggcagggattctgatcacagccaatagagagcctgggccagggtcagtgtcctgtagaagctcacagggttcacatctgacccttctcctgaccctaaagccaatccgcatcagcactgatctggtgctccttttgctcccaatacatgttctttctttggagtgtttgttctcccttttttatttgcttttctttcttcctgaaaaagaaacacatggtctctatgctctacactccagggctcaaggcattttcttagaactcaggcaaggctcaggcttggctactccagcccacgtgggagaggctgatgggatttccttctctccccatattctcagggccctcctctgtgttgtgtgtagactcatctgggaatgcaattggccgttaatagtgaaggggataaactcatttgatcaaaatgggatgtggatgtggaattaaccctgttctatgcacactgtcagagtcatcttcttcagaagtagtgttagaaagagcttgtgaactttatcagaatcaaaatggatccacttgtgttaaaaccctaatgaatgaagctggggaaggccatgaaggagggttctaacacacatatttcctgataagaagaactatcataaatagaccctgcacagccacaaccttttacacagaggccaccacagccttaaaagctttatttctccaagtaaatctgccccgcaactgcctattcaaccttacaccgctatctcaaaatagctgctgtcaccctcctcatttttccttaattctcttttttattattttttaaattatactttaagttctagggtacatgtgcacaaagtgcaggtttgttacatatgtatacatgtgccatgttggtttgctgcccccattaactcatcatttacattaggtatttctcctaatgctgtccatcccccttcccccaaccccactacaggccccggtgtgtgatgtttcccaccctgtgtccacatgttctccttaattctttatcttccttttcctacctgaatgtacccatacatattttaattgaaacgcacatcctagaaaaaatattattatactttagagtctctgtctgttattcaggttgacatgacaagctacagacggacatgccacttttctgtgagacatagaggatgacagtttttggagatgtctaggaatatccaatgtccataagatcagccatcaataagtgcagactggaggtcccagagagaggcgaagctgctgaatcatcgtggaatttcatcttctccagttctgctctgatggaatcaggcccacccattttatcaatgacaatctacctaacctagagtcagctgatgacagtattaatatcatctattaagtaaagtcataactatatatatagtgagagagggagagagagagagacggagtctcgctctgtcacccagggtggagtgcaatgtcgtgatcttggctcactgcaacctctgtctccggagttcgagcagttctcctgtctcagcctcctcccagtatctgggaatacaggcacacaccaccatgtccggccaatttttgtatttttagtagagatggtgtttcaccacattggtcaggctggtctcaaactactgacctcaggtgacccacctgccttagcctcccaaagtgctgggattacaggggcaggccaccaagtccagctaatttttgtatttttagtagagaccaggtttcacgatattggtcaggctggtctcaaactcctgatctcagcctcccaaagtgctgggattaaagatgtgagctactgtgcccggccaacaccacctatattaatgttggattgaataactacaaagtctaccctaaccaagtgtaccatcaaacttaccattacccagaggaaagaatctttaacatgagatctatattcttaaatgttttaaggtgtaaaactgaccacagtacaatcacccaattatgattttggtaatgagttgtagaaactgcatgtatattttggatattaacattttttcagatgcacaccttataattatattctctcattctgtaggttgcaattttttccacactttgcgggatctttttgttgggaggtggttctgcttgttcaattctgattttattatctgtgagtttaatttgaaatatagaaaatcatccttttttatatactttaaattttagagtacatgtgcacaacatgcaggtttgttacatatgtatacatgtgccatgttggtgtgctgcacccagtaacttgtcatttaacactaggtatatctcctaatgctatccatatcccttccccccaacccacaacaggccccggtgtgtgatgttccacttactgtgtccatgtgttctcattggtcaattcccacctatgagtgagaacatgcggtgtttggttttttgtccttgtgatagacttctgagaatgatgatttccagcttcatccatgtccctacaaagggcatgatctcatcattttttatggctgcatagtattccatggtgtatatgtgccacattttcctaatccagtctatcattgttggacatttgggttggttccaagtctttgctattgtgaatagtgccgcaataaacatacgtgtgcatgtgtctttacagcagcatgatttataatcctttgggtatatacccagtaatgggatgggctgggtcaaatggtatttctagttctagatccctgaggaatcgccacactgccttccacaatagttgaactagtttacagtcccaccaacagtgtaaaactgttcctatttgtccacatcctctccagcacctgttgtttcctgactttttaatgattgccattctaactggtgtgagatggtatctcattgttgttttgatttgcatttctctgatgaccagtgatgatgagcattttttcacgtgtcttttggctgcataaatgtcttcttttgagaagtgcctgttcatatccttcgcccactttttgatggggttgtttgcttttttcttgtaaatttgtttgagttcattgtagattctggacattagccctttgtcagatgagtagattccaaagattttgtcctattctgtaggttgcctgttcactctgatggtagtttcttttgctgtgcagaagctctttggttctacatactcaaatcaataaacaaaatccagcatataaacagaaccaatgacaaaaatcatatgattatctcaatagatgcagaaaaggcctttgacaaaattcaacaaccttcatgctaaaaactctcaaaaaattaggtattgatgggacgtatcttaaaataataagagctatctatgacaaacccacagccaatatcatactgaatggacaaaaactggaagcattccctttgaaaactggcacaagaaagggttgccctctctcaccactcctattcaacatagtgttggaagttctggccagggcaatgagacagtagaaggaaataaagggtattcaattaggaaaagaagaagtcatattgtccctgtttgcagatgacatgattttatatctagaaaaccccattgtctcagcccaaaatctccttaagctgataggcaacttcagcatagtctcaggatacaaaatcaatgtgcaaaaatcacaagcattcttacacaccaatcacagacaaacagccaaatcatgagtgaactcccattcacaagtgcttcaaagagaataaaatacctaggaatccaacttacaagggatgtgaaggacctcttcaaggagaactacaaaccactgctcaatgaaataaaagaggataaaaacaaatggaagaatattccatgctcatgggtaggaagaatcaatatcgtgaaaatggccatactgcccaaggtaatttatagattcaatgccatccccatcaagctaccaatgactttcttcacagaattggaaaaacctactttaaagttcatatggaatcaaaaagagcccgtattgccaagtcaatcctaagccaaaagaacaaagctggaggcatcacgctacctgatttcaaactataccacaacgctacagtaaccaaaacagcatggtaccggtaccaaaacagagatatagaccaatgaaacagaacagagccctcagaaataatgccgcctatctacaaccatatgatctttgacaaacctgacaaaaacaataaatggggaaaggattccctatttaataaatggtgctgggaaaactggctagccatatgtagaaagctgaaactggatcccttccttacaccttatacaaaaattaattcaagatggattaaagacttacgtgttagacctaaaaccataaaaaccctagaagaaaacctaggcaataccattcaggacataggcatgggcaaggacttcatgtctaaaacacgaaaatcaagggcaacaaaagcccaaattgacaaatgcgatctaatatgaaattcttaatgagttctatagttataagtacattatttctccttattaaaactaatcttttttgctgaatgggtggaagatggtggcttccctccaaaagaaaacatagttggttctgtaaagagttcacccatttcttccactataggcctgccctggcataatacaagctcccaacttaagaacttatgattttccatccatgggagaagccatcttttccatctattattaaaacagaagacacttcattaatatcactcccaaaataggctatgtcatatccagtgaggtaggatggctgacagtggtgagaatccaagtaattggtcaagcactgctatgtgtgaagaaacaccacagcatactctacactgtcactcatgatatggaattgttgcctcctcagcaatgtaactgagcccttaatatgtggctgggatgacaaagcaatgccagcctgcagagtggaacctgttcttccttctgggattagccaaaggccggtggcactcatggctgaccctactttccttacaactggacgaagcgaagcaactggatatgaacttctatcccaggatgtaactgtccaaagtgccttctctttatgtcaactggaaaagtgtgaaagacagacactattctcataaacggatatcctagttattccacccactagccagctcttccccccaggtggcagtcatagatttagaattgcaagtagaggccctggctaagcataccaccagtccctttaacaacacctaccataccatcatcattcttactgaagaaacctcacagatttgacaagtgacactatgaagctatatgaccctaggtattgcaactacagccaaaggtaacacttgtgtattaatgaaccctgaatgttgcatatatatacaagattagtcccacaatataactcaagctatgcaagcattagatacccatatttctgctagagatggatgccctctctcaggaccctgcgacagcatggtttagttgacttcctaacacatggaagactttcatatatagtagagctggtatactcttcattgctatcttcagttgctgtggattttattggtaccttgcactttaagtgagaatgtaatactgaccttctcaaaaactcctaggtccttgcaccataatgctccaacaaacacctactgtaattccggagactccagaatatttccaactccagtttaatggattcccttccaatatatacaagctatgccctttctaagaagtagccagattgactatgacacacgttttccatagaaacaaaatggaatttgacagtggggaatgatatacaggcagcttaatttcaaaatgcattttaaacttattttttgaggttttaatattattttcatactccttgaaacctgaaatttcacacttacattctaattgagacttaataacaaataaccagaacacatgaattgcctgtaatctctataccttgtattgtaagccacatttcaagtgtaaccttacttgtcagcacagtatgtttaccataggcataattgcttgtcctgactgtccagaaggcagggtggtattaagtatgcggcctctggagctgggaagtctggctttgtatactgtctctgccactgctaactgaaggacaatgggccagttacttcctgtaccccagttttgtcatatgtaaagtagggttgttgtaagaatgaaattagttaatatttagtacctaacaactagtaggcattacgtggtagctattcgtattgctatcgtcagagaacacacaggagtccattgttatttttaccctccccctccaaacaaaatgtgtaagacactagacatggtagctctgtaacggggttcgtcatgtattaaactgtgtacccaaatgatatgtcaaagtcctgacaaccagcacttcagaacacgtccttatttggaaatatggtagctggagatgttattagtgaagatgaggtcttacttgagcagggcaggccctcaatgtgggaagatggttgtctttctaagtacaaggaaatttggacacagagacagagacatacagtgtgccatatgacagcagagccaaagatcagagtggtgcagcagtaaaccaatgcatgtccaggattaccagtcacctccacaagtgaggaaagggcaaggaagaagtctcctgagtctcagagggagtgcagcccagctcacacttgattttggacttctagtctctagaactgtgagacaatacagtcctgtcatttttaagccacccagtttgtagtatttcattttggcagccctacgatattcatacagagttcttcacccaaaaggaagcactctttctcacaaacagtcaaagtcctggatgacggacaacctggagattgcaaacctccaaggaatcaaaggaggttctataaagtctaggagccccatctttcaaaggctgctcctcaagtccacacacacactttggaaggagaatcctgctcttggacatgggatccttagtgagccaactgccaataatccaacatcatcatgaattaaagatctctgacatttcctcgtcaccaacgggaattctgtcaagtagtaagtaaaacccttcttcaggaatctccacaccaaacagttctgcatggcttgggacgcctcaggaaacttataatcatggcagaagaaaaaggggaagcaaggcagtcatacatggtggcagaagagagaggttaaacttttcagtctctcttgggtgtaaagatacaatcttgaggcaaacagcagaatcaattttcttatgccttgaaattctccctttcaccataaatattcccttcacattaatctaactttatgtttgcatcgaactatgtgcctttttggaagttccggaagctaatttgagacagatagacaaagtcgggagaccctgatgcagaattccagaggtgacttcaatgttgctagttaacaacccaggcattgcccagatgatgccagcccaagatccaggtggactgggatgccagagagctgccagaacaagacgcacagacctggttctcagcccaaatcttgcatgcctttcttaccaactttcccttttttaaacccctgcctttccttcaaaattgaagtggttgcttgggatgggaatgcgttcacttcccctttaccattatggttaatacaataatttttgtaccagatctctctcttgttaattggatcctgcaggtggcagattccggaccagagtgacgttagaaactgaatgcacatactgggtggttcacagacacagtgttctgtgaagtttatgggtggattcctggggaagcctgcaagcctgttagtgattagcagaaccgcatccagctactgggatctgcacgccaggtgccgtgagcccctcaccatgttccctggtcccagctgcccgcggatggttcagccttgacaacgggctcggtgttctgggtggtgggagagcaagggggccccttggggagcgtgctacagggctgtgaatccaggggcccacccggtgttccctgtggagtcactgagggaatgaggggcttctcagggcacagagctgtaacgcctttgtgcagtggtggctgaatacagtgacactgggcgcgtggtgagaagcggggcaaggtcagttcactggaccctccgccctgagcctcagatgagtcgggggtccccagacaggcccggtctctgccctgcggcggacactggagcctttgctgtggccgccaccgaggagccttgacctcaaaggagggggaacctctctacccacctcggaaacctgaagggagcggcggtctctcccagacaggatctcgccggcctccgcgtctccaggcccaaccctgtaccacataaaggaagtccgcgctgagctaccgggacacagcgccgttgggtgggcgggcgcggcgcggcgggaagcaccggggcagctgccacagagatgcgcggggactgtcgggaagtgggcggtccgggaggcgcggggctgatgggacgtgggcggtccggggacgcgcgggggatggcgggacgtcggcgatcccgagatgccagggggcagctgggacgtgggcggtcttgagaggcgcgggggcagctgagatgcaggtggtcccgcacgcgcgggggctggcgggttgtgggaggtccagggatgcgagggggcagctggtacgtgggagttccggggacgcgtggggtcgccaggaagcggggtctaggacttagatccgccttctcttcaggccatgcagccccgaagctccgaatcctgggatgactcctgtccatgttggaagggaccctgccagtcctggcaaggttcaacggccttagggcaagaaatgttagtagagtcctggaagacgatgtggggaacgggtagcggccaccggatggtgatcgttcttctacaagaccttgacatggatggggagaaacagagaagaaccttccaagtttgtcccactggacatgcccaccacactttaccagccctttctagaaggcctgtgcgtaacacatgaaaaagctgctctcgacctttccctgaccttttaaaagaaaacatttgctgcatctaatccgcctagatgtaaggaggttcccaaatgtatgacagagtcagacaattacatgtcttgtaagttaccatgtgcttgtcttttgttttccgttttttttcgtttttttgttttttgtttttgagacggagtctcactctgtcgcccaggctggagtgcagtggcaggatcttggctcactgcaacctctgcttcctgagtttcaacaattgtgctgcctcagcctcccgagtagcttggattacaagtgtgcaccaccacgcctggctaatttttgtagtttttagtagagatggggttttgccacgttggccaggctggtcttgaactcctgacctcaggtgagccacccaccttggcctctcaaagtgctgggattacaggtgtgagccaccgtgcctggccgtaagttaccgtgtgctttttaaacaaatcatagcaaaggggtgtcttctggaaatgacattttgaaatggagttactagaccacccctggaagggacacagtaaccacacgtccacgttcgttcagtgggtgagaggacatggaggggagacctgggcaggaagggaagagggttccatgccaggctgctcatatttaaaagacattttcattgtagggacatggatgaaattggaaaccatcattctcagtaaactatcgcaagaacaaaaaaccaaacaccgcatattctcactcataggtgggaattgaacaatgagatgacatggacacaggaaggggaatatcacactctggggactgtggtggggtggggggaggggggaaggatagcattgggagatatacctaatgctagacgatgcgttagtgggtgcagcacaccagcatggcacatgtatacatatgtaactaacctgcacaatgtgcacatgtaccctaaaacttaaagtataattaaaaaaaaaaaaaaaaaataaaaaacattttcatatcgttgtcattgttttcttgtgtgcattttattcctcgctattgtatacatcattggaaattctaagtattcttttgaaatatctagtctttctagatgttctgaagtgcctgatgtatgttaaaattacaggtggtaaaataataaattttgtaaatgtctttttgttaaaattcatatgcagtgttttattttattttgatgttggtggggggtggggaggatggccaaatccctgcttgatcaacacacattgcgtttgtgctctgttcaggggaggagagaggaggagaaagtgcagatttccaggcttctgtgcgcaccgggaggagagattaatgatcatctcttctgtctgtgtgtttgttttatttatctatggatatcctgtgtataaaggatgaacaagtcctatttataacatctaatcttttcaggtgttaagttgccagcgtatgacggaagtagcattattaaacgaatgcagcttgtacatattgtgttaaaattcataaaaagccagtcttctgaaaagaacccttgggccctccctccgcagcctccggcgccagctgcaggaagacctggccaggggaaggcgggcggcagaagctgctgctggctgtggggaaggcggtggagcccaggcctccacaggctccccacaggctccccacaggctcgcgcggctctggttgctgggctccgcacgggccgcgtgggggcgcctgctgggagcgaggaggcgccatcctggctcgcctgctccaggaggacactctgggcctgcgcagatgcagttctccaggatgggcgcgggcgctgggggcggcgctccttgggctgctgcgcctccactgagccgcctgggtgtgaggacctcgcgccggcgcctccgggaaggacgcggagccgccgcggccgatcccagggctgcagctgctgcccgacgcccgcgggaaggcccttccgccaccgcccgggggttcgaacttggagcagctgctgccagctgaggcgccagcggcgtcgggagctcctcagagtcagtgttttgtgctggattcggcatgtcctctgaaaactcgggaatttgtcactgaaatggtgacaggaggtgagaagtttttttagacgttgccttcgctggcctgacgcggggctcagacctggaatcccaacactttgggaggctgaggcgggcggatcgcttgagctccggaggtggagaagctgccttcgtggtaactgtggtcttaagttcagctgagaacgataaatggcttttccttgaagtggctgcttttgtgatttctctcaggctcatcttttgtcagttagaaatccagtggtaggtgtagcttagagacgggaaatttttggttttgttttggctacacgtaagtgttggaaattattttctttaacgttccagtgtgagcaaatccagaaggatgtcagattaaacaccgaatttaacaaattcaaccgggcacggtggctcacgcctgtaatcccagcactttgagagaccgaggcgggtggatgatgaggtcaggagtttgagaacagcctgaccaacatagtgaaactccgtctcttctaaaaatacaaaaattagccgggcgtggttgtgcgcgcctgtaatcccagctactcaggaggctgaggcaggagaatcgccgagattgcgccactgcactcagcctgggcgacagagcgagacttcgtctcaaaaaaacaaaaaaaaatcaatcattggaatactgttgttcattacaattaatgaacgtttgatagacgcataaacgaactaaattcacaagtacatataagtaaaataagccaaaaaaaaaaaactacatcccgtatgatgacacttttatacattctacagaatagaaactaaagtgatatgaaggttgggagttgaatggagaaaaggtgagcgaaaagagggaggacggaggagttgcaagagaacaagagaaaatgttgagggtaattgatctgttttctatcttaataatggttatggttacatcaataatttctaaattgtacattttgtgtgttaattataattttatattattcaagctattacaaataaatacctgtataaatttcttagggacggtttaagggagatggataaatcacataaaaagtcagatatttctgaatgtacaatgaataacccttagctctatctttattttttggtaattcttaaatgcagcagatttttttaatgtttttattacaagaagggtttcttcaaaccacaccaggtgtgtgtaactctgggctaaagttggttaagggagcagtgggatccggtggagaggagcacaggcctcgatcctggagcccattcttgtcacatgtgagctcctggacacatctcatagctccctcatgcttctgcgtttacattctcatctgtaaatggaggaccaatgggcatctgcctctaacaatgtattttcatgtgttaagatgatgtatgttaagtgtttactatagcacaatcttttaataagaaattacatttttttccaaatactatcattgtcttcaagcgccaccaaccaccagaaaacttaatatgctctgtgccctgccctgtcctcagacatccagcccaagagacttttatatagtaggagatatgcaaatagttccctccctctgctgatgatgaaaaccagcccagccgtgaccgtgcagctctgggagacgagctcaagtgccaggattcccaagtgttttcacttggtgatcagaacttaacacagaggaatcaccatgttgtttgggctgagctgggctttcctttttactattttaagaggtgatacatgaagaactacagatattgttcgtgagtggatattagagaaacagtggatatgtgtggcagtttctgaccaggatgtctctgtgtttgcaggtgtgcagtatgaggtgcagctggtagagtctgggggagacttggtacagctgtggtggggttgggggtgtcctgagactctcatgtgcagcctgcggattcatcttgagaagcaatgacatgaactgggcccaccgggcttcaagaaaggggctggaatgggtctcatacattagtgctagtggtggtagcctatactatgcagacactgaagggtagattcaccatctctagagacaatggcaagaacatgctgtacttgcaaatgaacagtctgagagatgaggactcggctgtgtgagagacatggtgaggggaaatcagtatgagcccagccagaaacctccctgcaggaaccctggggtggggggaaatcagctgcagggggcactcaggacccactgatcagaatcaaccccagaaggaggtgcacatggagattaggggctggattccttccaggatgtgggacttcaacttcttctgacagtttccccagggaaccgctctaagtttagaattctgtgtcatctctatgtatttaaaaaagatcattttaatgtgaggaactaactattctcacatgcacaaaatgcagattcacactcacagagatgaaaagtcctcaactgtggtcactaggatcagagtcctgaggaatctcaggcgttcctggtgagtcttctccaatcagacccaggacagacacctcagtgagattccatgactagaacaggctttatggattttaaaaaatagagactgagccagggtcagtgtcatgtagaacctcacaggtttcacatctgacccttctcctgacgctaaagtgtgcaaatcagcatcaatactgatctggtgctgcttttgctcccaatctgtgttctttcttgagttgtccctttttcatttgcttttcctgctccctgaaaaaagaaagatgttgtctctgtggtctaaattccagggctcaagcccttttcttggagctcaggtgggtctcaggttgtggctcctgcagccacgctggggaggctgatgggactttcttctctcccattgctcagggccctccactatattgtgtggagactcatctcagaatagatgtggccagtgggagctgaaggggacaagcttgtttggtcaaaatgagatacaaatatggaattcaccctgtgctgtacaaactgtcacagagtcactttctgaaacaatagtgttagaaagaacttgagaaagttgtcagaatcaaaattgggtcacttgtgttaaaactctgctgaatgaagctgggaaaggccgtgacggaatgttctcatgctcatatccctgataccaagaactatcgtaaatagactcttaaaaccacaatcttgcacaaaggtgcccacaaccttaaaagaattacttctctgagtaatcttcccagcagctctctgtgtaagattggacttgatgccacccttgttattgattcttctatcccggagaagttgtctcaaaacagcttatgtaaccctcctcatttttctttaaacctttatctttctttacctgcctgagtgaacccatgcatgttcccattgcaatgtccatcttcaaataattatcattttactttagagtctctttttgtctgttattcagatttgacaagctgcagatggacacatcacgtttctgtaagacttaggggatgacagttttgaggcatggctggggaagtacaatgtccataagattgaccctcaataagtgcaggctgtaagtctcagagctgaagctgctgaatcaccatagaatttcatctttagttctgctctgatggaatcaggcccacctgtgtaatgaatgacactctacctaacctagagtcaactgatgacaggttaaatatctagacagcaaatttgcaacaccacttagattagtgtttgaataactacaaagtatagccgagccaagtatatcgtaaagcagactattatacatggagaatctttaacatgacatctacaattcttaattttttttacgtataaaactgatggttttacaatcaggctgtcatgattttgctaatgagttgtagaagttacatgtatgttttaaatattaacagttttttcagatgcctggtttgcaactatattctcccattctgtagatttggaattttttccatgctttgcaaaatctttatattttgatgtagttccagtccttcaattctgcttttgttgtctgtgcttttaatcttaaatttaggaaatcattgctaaccttttggtgggagagaattttacaattgcaggctatacatttaactgtttaacccatctagagttgattttttgtgtttattctaacctaatattcttaactatttgcaagtgaaaacccagtttgtttaacaccctctttaggggagagtatgatttagccgttgtgtagaaaatgttataaatcactttgccttcatattggttctcaacttgaaaatgagtttgccatcaatacgtgggtttatttctgagctctctatatgtatttatgccagtaccatcctgttttgattatgtttgtaattaattttgaagtctgagagtaaaatgcctccaagtttattcttgcccttttgcagatattagacaaaatattttaacatttcaccatgaagtatgataacagctatggcttttcataatgaattttattgtgtttaggttattttcttgtatttctattttgggtagagtttttatggtgaaaccttgaatttttttaatgttattttctgtctgagaagttaatgggaccttcttcgtatttaatttggcataccaaatgtattgatttgaggattttgaatcatctgtgcatctcaaaaataaatttgagttggtcatggtgtatgatccttctaaagtcctgtggaacttagttgactattatttggtgtgtggagggggctcatttatgtctactaggaatattggtctgtagtttacttttttgtgaccttgtctattactgaaaatacggtaatttgggccttatagaaagactggaaggttggcatctcaccaatttttgaaaaagttagagaatggttggcattacttctttaaatgttgagagtcctttttttacttaacatgtgacctatcatggagaatatttagtctttgcttcggaagcatacatattacactgctcttggttggaaggttctgtagatgtctattaggtcaatttgttcaatagtgttgttcaagtccactgtcttcttaagaattctcttaatgatgttctatccatcattgaaagtgaggtgctaaagtcttctcctaatttttattattttctatttatctctccatatctcttaaggtttgcttaatgcagttatatttatttttgtacaaatatgtaaaaaataaatgaaataataattgctaagtaattttaatggcaaaatcacataataagaaattatattttcccaaatgctgtcattgacactaagctcctccaggaatctcacatctgctctggacacggctctcctggtgtcctaccccagagcttgctatagaggaggagacatgcaaatagggccctcactgtcctgatgaaaaccagccttgcctgcgtctacgggagaagagccccagtccagaagtaccaggggtttccatttggtggtcaggtctctgaacacagaggactcactatggagtttgggctgagctgggttttccttgttgctaatgtaaaaggtgactcatggagaactagagatattgagtgtgagtggacacaagtgagagaaacagtggatatgtgtggcaggttctgaccagggtgtctgtgtgtgtttgcaggtgtccagtgtgaggtgcagctggtggagtctttgggaggcttgttatagcctgggggtccctgagactttcttttgcagcctctggattcacctttagtacctttattaggtactggatgagctgggtccatcaggctcctgggaaagggctggagtaggtctcatttatgagttgttgtgtaggtagcacaagctatgcagactctgtgaagggtcgattcaccctctccagagatgatgccaagaaatcactgtatctgcaaatgaacagcgtcagagccgaggataggtctgtgtattactgtggtggcattgtgtgcatcccttgtttaggtacatgcagagatgctgctttggtgtgttcaggggctcctgttttggggacaccaattttggagtttgcagtatccttgagtccagtacgttcatggtggcattgggtctggggtgtgcagtggcaatgagtccaggatacatgcagctgatgccgtatcttgtgaggacaagaacaactacaaaacgatcctattaataaataggcaaatgacttgaatacacatttttcaaaaaatacatacaaatgacatatagatatataaaatgttaaatatgagtaataatttttaaaattcaaatgtaatctacaataaattatcaccccatacctgttagaatagctatttttaaagaagatgaaagataaccagtattggggcagaagtggagtaaagggagcctatatatattgttactgaaaatgtcaattagtacagacattatggagaatactatggaggttcctcaaaaaataaaaatagaactaccatagtttccaacaagcccactactggctatgtatccacaggaagtgcaatcagtatgtcaaagagacatctgtgcccccacgttcattggaggaatatttatgatagtaatgatgtgggaacatcctaaattaccataaatggatgaattactaaagaaaatgtagtatgtacccaatggagtaatgttcatcctaaaataagaagggaatcctgcatttgcaacagcaggcatgactctagaggaccatatgtgaagttccacaggcaggcgcagaagacaagtaattcgcgatttcactgtagtttgtttaaatggtagactcacagaagtagagtggagtgttggttaccaggggctggaggggtggactggaaaaggcgagattttggtcaaagggtgaaatgttccagttagacagaaggagaaagttacagtgttctaatgcacaagatggaaaatatggctaataatgcattatatatttcaaaatggctaaaaatgcaaatgttaaaaattttctcactaagaaatgatacagcctgggcgcggtggctcacacctgtaatcccggcactttgggaggctgaggcgggcgaatcacaaggtttggagttcaagaccagcctggccagatggtaaaaccccgtctccactaaaaacacaaaaaatagccaggtgtggtggcacgcggttgtaatgccagctactcgggaggctgatgcaggagaattgcttgaacccgggagacagaggttgcagtgagctgagatcatgccactgcactccagcctgggtgacagtgagactccaactcaaaaaaaaaaaaaaagaatgaaatgatagctgtgtgaggtgatggatatgtcaaatagcttgattaacaattccataatatatacatgtatcatagcatgtgtgaggtgacctgtatgaaggtgaagtgacctgggggctgtgtaagattacctgggggtatgtgtgaggtgaacacggcacatatgaggtgaccagagacacatgtgaggggacatgggagatatgtcgggtaagccagggggatttgtgaggtgacacagagcaagtgtgaggtgacgtggatgcatgtaaggtgatttggggcacatgtgaggtgacgtgggggatatgtgtgagctgacctcgggtgagtgtgaggtgatccaggatggatgtgaggtgacctgggggtgtgtgtgaggtgacttgggcacatgtcaggtgacatcggggattggtggtgatgtgggtgtgtgtgaggtgacctaaggaggtatgaggtcacctggggcatctgtggggacctggaaatgtgtgaggtgggtacaggtgaagtcacctagggcacatgtgaggtgacctgtggaatgtgtatggtgacctgggaccgtttgaggtgacatggggaatgcgtgaggtgacctggggcatgtgtgaggtgacaaagggcatgtgtgcagtgacctgggtgcatgtgaggtgacctggtgcatgtgttaggttacctgggggatgtgtgaggtgaacaggggcaggtgtgaagtgcctgaggaatgtgtgaggtgaactggtgcatgtatgtggtgacctgggggatttacgaggtgacctgcgggatgtgtgaggtgaccttgggtgagcgtgaggtgacctgacgtatgtatgaggtgaccagggtgtgtctgaggtgatgtggggtatatgtgcggtgacctggtggatgtgtgaggtgacctgcaggatgtgtaaggtgacactggggatgtgtgaggtgactcagggcacatgtgaggtgaaattggggatgcgtgaggtgattcagggcatatgtgaggtgaccttggggatgtgtgaggtcaccttgggtgagtgtgtggtcatctgggatatttcccaacttcgtaaggaaagcctgcaacaacacatggcattagaagcttcacactctagcaccattaatgcgtacatcctcaaggaactctaaatgttttgaggttagcttaaatgccatggagcggcaccttccccaggcacactcatatatgcatcctgggtctccctgccaagctgtatctcctcaaatttacagtttatgtttgctctgtgacatcaactctgatatgttcaagtgtgtttttttttctttatttgtagttgttcaggcttgttgtttcactctcattactctgggctcagtcctctcctcaggtgtcccacttcagagctcgctgtgaaataggagacatgcaaatagggccccccctttcctgataaaaagcagcccagtcctgaccctgcagccctgggagagaagcaccagccctgggattctcaggtgtttccactttgtcatcagcaacaaacaaattaccatggaatttgggctgagctgggtttttcttgctgctattttaaaaggtgattcatgaagaactaaggatattgagtgagtggacatgagtgagagaaacagtggatttgtgtggcagtttctgaccagggtgtctctgtgtttgcaggtgtccagtgtgaggtgcagctggtggagtctgggggaggcttggtacagcctgggggatccctgagactctcctgtgcagcctctggattcaccttcagtaacagtgacatgaactgggtccatcaggctccaggaaaggggctggagtgggtatcgggtgttagttggaatggcagtaggacgcactatgcagactctgtgaagggccgattcatcatctccagagacaattccaggaacaccctgtatctgcaaacgaatagcctgagggccgaggacacggctgtgtattactgtgtgagaaacactgtgagaggtcggaagtgtgagcccagacacaaacctcctgcaggaacgttgggggaaatcagctgcagggggcgctcaggacccactcatcagagtcaaccccagaggaggtgcacatggagggtggggtttgtttcctgtcaggatttgggacttcctctgcttctgacaggttctctagggaaactctttaattttagatttctgtgcccaccaatgtcatctctacatttttttaatcattggttttgaggactcggtctcacatgcacaatatgttttttgccacctatgggaatgaaaggtcctcaaccctggtcaccagcatcagagtcgtgaggaagctcaggggtgcctggtgagtcttctccagtcagactcaggacagtaacctcaaggggattcccttgtgagaactcacacattttcatgagaacagcaccaggagtcagttcttaaccattcatgaaagacccactccatgacccagtcacctcccaccaggtcaccccttcacaactggggattataatacaacatgagatttggggcaggacacaaatccaaaccatatcagatacacattgtgaaatacgcatggtggtcaggtaatttgtatttctatcacctcacagcgctaccattttattattttttttaatttactgcatgagtgagtgtctgatgagaacacctaagatctaccctttcagcaacaatcatttttacaatacagtattaactataggaccattgctgtacgttagatctccagaactcatccaacctgcacaactgaaactctgtacaatttaacacacatcacccaatttccctcacctcccaggtcctgggacccactattctactctctgctttcaagagcttgaatattttagatcccacatgtaaatgagatcatgcagcatttgtctttctgcatctggcttattcaactcagcatcatgtcctccaggcccatccgtgttgttgcaaatgtcagaatttccctcttttcaaagccaaacaaaatacagatgtatgtatacacattttctttatacattcatccatttacagtcattaaattattttacaaatctacactattattaataatcttgcaatgaacatgtctttggcaaagtaattttatttcctttgcatatataacaagaagtgggatcaccagattatatgatagctttatttttaacttatcaagtaaccaatcctaccacaggatatttccctttcccccacattcttgccaacatttgtcatctgttacatttctgataatagccatattaactagtgtgagttgatattgcattgtgcttctcatttgaattcctctgataattaggaatgttgagaactttttcgttttctgtttgccatgcatgtatcttctgaaaaaaattatccaggtttttgcccttttttatcagttcatttgttatttgctgttgaggtgtatgggttatttatacatttggacagaacttcttgtcagatccataattgcacatagtttttcctgtgctttgttattaaattcaaagaaatcagttccgaattaatggcaggaattttttttgctccatgtcatttatgagtttatggcttcaggtattatgtccatttttagttgaatttttttttttttgggagacggagtcttgctctgtagcccaggctggagtgcagtggcgcgatctcggctcactgcaagctccgcctcccgagttcacgccattctcctgcctcagcctccgagtagctgggactacaggcgctggccaccgcgcctagctaatttttttttgtatttttagtagagacggggtttcactgtggtctccatctcctgacctcgtgatccgcccgcctcggcctcccaaagtgctgggattacaggcgtgagccaccgcgcgcggcctattagttgatttttttatatggagttagagaaggcctaattttatttcttttgcatatgaatgccagttttacaccattattgaaaagactgtcctttctctactgtgtgctcttggcacacaaaatcaggagagacataatgacaaaaaaaaatgagatcaatagtcctgatgaacatagacctgaaagtcctcaacaaaataccatcaaattgaatccagaagcactttaaaatgtgatacatcatggtcaggtgggctttacccctgggatgcaaggctcgttcaatatccacagtaactctgattcacaatgtaaacagaataaaagcaaaaagcatatgattatgtcaatagatgctgagaaagcttccgataggatctaacatctactcatgataaaaaccctcaacagactagacatcaaagaaacatacttcagaataagagccatctacaacaaacccacagttaacatcatactaaatgagccaattaaaacacttatctttataaatgacccagtctcgggtgtttctttacagtgcgagaatggactaagacagcatccaaataggaaaggaagtcaatccgtccatcttcactgatgatataattctatatctagaaaatcctaaaaactctgccaaaataattctagaataaacaactttagtaaagtgtcaggatacaaaatcaatggacaaaaattaccagcatttctataagccaaccacatccgagctgagagtataatcaagaacacaatcctattcgacttacagtatccacaaagaaaatgaaatgcccgggaatacagataacaaagtgaaagatccctacaaggagaactatgaaacacagcatacataaatcataaatgatacaaataaatgggaaaacatttcatgctcatggattggaagaatcaatattgtaaacattgtcataatgcccaaaggaattcagattcaatgctatttacataaaactatcatcatcattcttcacagaatcagaaaaaaatctattctaaaatttatatggaaccaaaaaagaccctgaatatccaaagcaatcctaaggaaaaagaataatgccagaggcatcatgatactgaccttaaactacaccataacgtcttgctaacaaaaacagcctgtactggtacgaaagcagacctgcaggaaaaaaaatagatcaaaatagaagacagaaataaagttgcacacctgcaaccctttgatctttgacaaagctgacaaaaacaagcaatggaaaaaaaaaactctgtgttcagtaaatggttctgggataactggattctggcaggtatgcaaaatgcaagagtgaaggagcctgtgcagcttctacctagatttcagatgtgtagagagccctgcatgcccaggaagaagcctgctgcaggagtggatccaccacagaaagcctctactagagcagtgccaaagatggggaaagatggagttggagcccccattcagagtccccactagggcacttcatagtaaagttgtgggaatgtggccacaaccctcaagaccccagaatggtagagctacgggcagcttgcaccctcagcctagaaaagcttccagcacttgactctcacttgtgaaggcagccccgtggtctgtgcctagcaaacctatagggattggctgcctgaggttttggggacccaatccttgttccagtgtgccctggttgaagtacataaagtcaagagagattattttgtagcgttaggatttaatatctgcagtgctgggttttatatgtgtgtggggcctgttggttgttcctttggccaatttatccctttgggattggaattatttacccaatgcctgcatcatcattgcaccttggaagtaaacaacttttattttttaaatttgcaagctcacagctggagggacattgccttaagactcagatgagactttgaaaatttgagttggacgttgatgaagttaagattttgggcactattgaaaaaaggtgattatattttgcaatgtaagaagaatatgagaactttgggtccgagagtgcaatgatataatttaggggttttcccctccaaatatcatggtgaaatgtgacccacaatgttggaggtggggccaactgggtggtttgggtcatggggaaagatttttcaggactggcttggcatccaccccatggtaattagtgaattcttgctgtattagctactgtgagatctgattgttcaaaagagtcttgcaatcctgctaccctctcatgtaacccctcctcacaatatgacacagccatctccccctttgccttccaccatgactgtaagcttcctgaggccctcacaagaagcagatgctggtgccatgcttctcacacaacctgcagatctgtaagccaaataagcctcttgtctttgtaaatcacttggcctcaggtattaatttatagcagtgtaaaatagactaatacactgcccaaagcaatatacagagtccatgcaatttctatcaagtaactaattaattatgtatttttaaaaatcctaaaatttatatagaaccgaaaaacactctgaatagcaaaagcagtcctaaccaaaacgaacaaagctggaagtaccacattccctgacttcaaattacacagcacaaagataataagaaaggcagcatggtagtggtagaaaaaaaatcaagagcccagatatatagccaaatatctacaaccaacagttctttgacaaaactgacaaaaatatacactggagaaacaaccctctattcaataagtagtgctgggagaattagatagccttatgtagaagaataaaatgagacttctgtatcatcatagacacaaattaactgtgaatatggattcaatgtttataaactcataaaaatacttgaaaaaatctaaaaataatcctctggacattggcctaagcaaataaaatatgactaagacttcaaaagcaaatgcaatgaaaacaaaattagacaaacaggattaattgaaccaaagatcatctacacatcaaaagaaagaaccaatatggtgaacagacaacctgtgaatggtaaaaaaaaaaaaatgtgcagtctattcatcaaatatatagatctacaagtaactcaaataagtcaactagaaataacaacttcataaaagagtgagcaaaaacgagatatttctcaaaagaagacatacaagtgttcaacagaaataaaacatgctcagcatcacaaatcatctgataaatgtaaattacagacaacatgatatagcatcttccaccagtcagaatggctattaaaaataaaacagatgtttgcagagaagcataggaaaaataatgctttttatatgcttgatgagaatacaaattggtacaacctctatgaaaaacaatacagaaatttctcaaagaactaaaattagaattaccatttgacccagtaacccctcctggtgggtatgtttctcccaaaaggaaacttctatataagaaaaagtcacctgcattcctatttttattgcaacactattttcaatagaaaagtcaagtaatctctctaagtgtcaatcagtggatgattaaataaaatatgatagatgtaaatcatggaatactatgcagccataaaaaatgaaattgtgtctttcacagcaacatgaatagagttgaaggacatttcctaaataaaataactcaaattctcttttataattggaaagcacacaatgggtacacatgtacatagagaaaaacaatagacactgggtactgcaaaagaaggcaaggtgagaggaaagtgagggttaaaaaatcagctattggctccaatgttcactatggggtaacagttacatcagaagcacaaacctcacctttatgaaatatattcatgttacaactctgcacatgtgcaccctgattctatgaaaataaaaacagaaaacatgaacagaattgttagactgctagctagattgaccaacaaacaagaaaaatgcaaaagtagcaattctttgttttgtaaccctttctcattttctggtaccataagaaattgtagactatcgtcctatattcttttctgaagtgctaccattagccatttctcaaagaaattctggttccttttttcttttattttctttcattttttttagacagagtctgcaacgtccacctcccaagttcaagcgattctcctgtctcagcctcccaagtagctgggattacagacgtgcaacaccacacctggctaatttttgtatttttagtagagatgaggttttgctatattggccaggctggtcttgaactcctgacctcaaatgatctgcccacctcagtctcctaaagtgttggaattatgggtgtgagccactgcacccagccgctggttccttttacagaagaatagtattaaaaactcatatcttgattcttgatgtactttttgttaatttcttgtagaacatctcaagtaatcaatacaggaagtatttgttgtgtattaacccatatatatatatacccacatctaaacggtttttatttatgttcctatattatgctaaacttgcaaatccactgagataccctaagttaataccacatgaatgattttcaccttccttctatgcctttccctaacctagcactccaaccgtggggaaccccctcccaccacacaccatccattccctttgtagtccatttccaggattcctgtagagtggaacccgattgtgtaagttgtgctcttttgtggaacatcatcaagtggagtccagtgctgacgtgcagtttcttttttctttaatcttatggactacactatttctgaacctacttagtacctcttttgatttcatacattagtataatggcataagatattttctatatagtctgcattccatcctggaattcctaatcacctatttttttaaaatttcttgtggattaagattgtattagtcagtgtcccctagagggacagaacaagtaagatacacatacacacacacacacacacggagtttattaaggagtattaactcacactatcacaaggtccacaataagccatttgcaagctgaggagcaaacaagccagtccaagtcccaaagctgaagaacttggaatccgatgtttgagatgaggaagcatccagcaggggagaaagatgtaggctggaaggcgaagccagtctaatcttttcatgttcttctgtttactttttattctggccacacttgcagctgattagattgtgccacccagattaagggtgtatctgcctttttcagcccactggctcaaaggttaatctccttcggcgacaccgacacagacacacccgggatcaatactctgcatccttcagtgagatcaagttggcactcagtatttagcattacaagtccaccctttgtcaacttgaacccatacacatctcctgagattatacataatcttcaaataaagacaagaataaagtcataattatgcctaataatacaattattcttcttacaactggaaacacaccaatccccaatccaaatggtactacatatgctccactccctcaaggacacagccaggatcatctgatgacttggtgtctagatggcttcagcacttttaattttacctccaatgttagactccactttatcaatgcagatgtagcagaatattttaagacattgatatgctgaaaaattcaacagttcataaaagttgccttcccaccacagccagtggttactactgaataaggacctgccatcctctagggagaagctataatggatggggtgcactgttggtggttatggaaatcgatccatcgtggcaaatggcagcatctttctttgataacattatattctattgtgcatatataccacattgtctttattcatttgtctatctactgacagattttttccatatgtttgctgttattaatagtgtttcaataaacataggatgcagatatcttcacaaggtggtaatttcatctcctttggatatactcccagaaacaggattcctggtcatacaatatttctggctttaattcatttaggagcctttatactgctttccataattgtgaaaatgtagaatggtatagccattatgaaaaacagtttcagttttgaggtatgatctgtaaacaaataatgtttgttatggctctcaatgagagtttctactaaatatgatggaaggtcaggaaggtctctcaccttaaagcagggatggattatgcctcttatttcctaaaagcaaaagattggaagcatgcatgatggaggtggttggcaggtttcaggatgatctcataagaggagaatctgttggataaaactgttgggttttcagtcatagacacacctacactcaatatgaaatgatgaaatcaagtgaggatctagaatgtgttcgcttgaagcaacagcatattctcaaaggcacctattgctccatcacaagggtgatgaacttttgaaaccagtaaagtgtgagagcacagtaagtgataaagttatcacatttacatgaagtttgtttaatgtgccaagggctcgcacagattaatcataaataaacacaatgtattttagcatacatagatgtctagagaagaatcttcttagagaaacttcttcaggttacagaaatctgtgtaagttgtagatctaatggagaagtgtctatgaatactggtctgtttttgaagtatggaaagatgatctcttttggagtaggcttgcgattgtgttgatttcttaattgtttcttgagttgtaacaaaagaaccaaaaaaatgactaaccggagtttcatggctgtgttgataaaaatttttcataagctttctgtcaattatttgagaccagatttcctgatttttttctccaatagatacatgttcacaagatctcaggaaaccacctctcaggtgctttagtttaaaagactagcttcctagaaaaagaagattctgtctaaccatgacaagttggtttcatctgcaaaccatcaagtttgagacctcattgtcaagaatcataaaaattttaactccaatgtactgaaaatcataaatctcgaatttaatgttgataggcattgacaaaatggttcattcttggatgcgtcctatgttgctggctcaacatatcagttaattgagaatcctcacttagctccctctgtttgtagcactgagttgattgtcaatcttcagagtcatccgttgaaggagagtcctgaggttcatgggattcttgtagacactcaggggaacaaaagaaagaaacagaattgagggctgccagccatttccacatcactaggaataattaccatctaagtataaaggtctgcatcattcagaacaccctgcatgacaggctgatgcaaaaaatccaaccctacagaggctccacagcaacctttacagttctttccgggaagaaataatctccaagttaagtgagtcagtaaagctgctctgagctacagtaaaaattggattgggcccgatttgtctgagttcagtgtaattattatactcagctgctgccccaatatagactgaggatggataatttaaatgagcctggctatgtggtttgttatatatctgaactaaataaacataaagggcctgtctggactagcgtgagggtgagagatcctgggagccccagccccccatactcttatctcccttcctccaggaacctctaggttctcagggtgagaatccacaagatccattcatggctctattaccaggagaccaaaatctctgaccttgttcatacagacaaacaggcgaaggacatttttagatccttatctatgtggcgaaaggcaatctatccccattacaagccttaccagcaaccttcctttgtcatgaaaatgggtaaaattagccaataagattacatttaagaaaattttcctgtgatgttccagccagaaaacagcaaaaatcagcttcacacctggagacttcttgcatcggtcacagcccagagaaagaagatcaccatagcattaaaatgcaactgtaagaacatgtaatgcttccatgttccacgcattacgtctcaccagtttagtcaatatggattaaatatgagagtgtggcaattcgcaaactctatctgaggaggaaaatcggataaaaaatgttatgaaaaataaagcaatttgaagcctctgacttcagcaacttcaccactaatgaaatgatgtaaccctcattggcctcaaatttagttttcacggggcatctgcagggttccaaagtgagaccaggtgaattcaatgtgcatgcacttcccaagtgtccacttgtattctgtttctttacttctgtttacagaaagtagacacatattcagtcttagtaccagtgtagggagcgctttccatgagatggataccagaaaaaaatggcaaacatgggatccgttaatataaaaattagccacgatgtatatatatatatgtgtgtgtgtgtgtgtgtgtgtgtgtacacacgcgcgcgcatgtgtgagttgaatagcagagttggagtgggtttctatccacatgtacctgcacctgcaggtattctcaggtgccataatcaactgtaggaccctaaaggaaataagagtctcccctcaacccctgaagagtgtttgggttcaccgtgtgtccaatgattctgtgcctcttgagctccaggaaagggctccctggtgatgcatgagatcttttcttggagtctctctgcagagttcactgggtttcctaaaggcaattcactatttcaaaagatggtgtgaggagcatgtggtgtccctaaaggagaattctgagccagggcacaaccactttatactgagctggatacactggtaggaatatactctgtcagctcagatagaaacctccctgcatggttggggctgggctgcagggggcgctccggatacacccagcacaggctcccgccccagagcaggtgcacaggaggctggggagaggttcctcccagggcctgggacttcctttaaaaatatctaaaataagtatttcacaaagactgctgaagtttgtataaatatctattcaattgtgagcatttatcaaactggatgttgtaatgagaaccacttttacaatggggatttcaaactctgctggaggtcaggaagagatcctttcttataaataaatgcaatttttggataaacacagtcattccctaaataacgcattcacatattatggtctagaaatgatgcaagttgaccctgagacagtcaaatgtggtttcaaagtgaggtgctgtccttgaggagcttgttctccagtgggggaagctctgtcaacacagagttcagggatgtgtaggggacacatggcctctaacaggattacggcttgaaccctcagcttctacagttgtgtcacccatgtgtctgtttctcatactgggtcaggaattgggctattaaatagcatccttcatgaatatgcaattaactgaggtgactatagtatctccgttccctgagagcctcacccaacaaccacacccctcctctggagaagcccctagatcacagctcctcaccatggactggacctgaaggatcctcttcttgatggcagcagcaacaggtaaggggctccccagtctcagggctgaggaagaaaccaggccagtcatgtgagacttcacccactcttgtgtccactccacaggtgcccactccctgcagctggtgcagtctgggcctgaggtgaagaagcctggggcctcagtgaaggtctcctataagtcttctggttacaccttcaccatctatggtatgaattgggtatgatagacccctggacagggctttgagtggatgtgatggatcatcacctacactgggaacccaacgtatacccacggcttcacaggatggtttgtcttctccatggacacgtctgtcagcacggcgtgtcttcagatcagcagcctaaaggctgaggacacggccgagtattactgtgcgaagtacacagtgtggaaacccacatcccgagagtttcagaaagcctgaggaaggaggcagctgtgctgagctgaggcagtggtacagcagttttctgaacttccatagtatctcattttgcattgagttccgctttaatattagccaagaatatgggatagacgggtgctcctaagagatccttaacttgcccattttgatgggttttcccaaagacgtgagaagccacttttttcgcaaagcatcccaaagccatgccctgctccagaaacacgtgtatccatttcctggtctttgattaactgacaaactctcatcagcgcacctgggctaatttcacatcaggtagaaatatgtgctttaaagcaaggctaacgttgtaatagcaattcctgcttaataaccttcagcattgttgttgtgtgctccatcaactaattacgttagttcaaggttctcaatgggagtttctaataaatataagggatgtatagaagttcccctaattaaaacaattgtgaagacaacctcagtgttcaaccatatttcaacccttcaccacaaaggaactttcatctctcctggaagttgggttcattttcaaattagtttttttattttaatatctcaagattattgtatgtgactattttagcagaaagtgaattatgggaacttgaactaaccaactgaaaatacattcagaactaattaaacaagatgccagaatgtgattggctccaggcattttaaattcaacaggttatgtaaccaggctttaaatttgcacatcttcgtgttaccttcatgacacagtcaactcccattatgtaagaaatggtgagtgcattcccaagggtcttgcacagttataaaaatagacttgatgaggtgaggagttgtttaaattcccctctgaagaagcagcatcaacccaacaaaccactctcttccctctgtgactagagctctgtcacaggccacatggacctaaatccttgatggagattacaggactacgtaaattggactgatcgtttttatgctgttaaattaataggtgagtctgcactccagcctgggcaacagaataatcttgtctgtaaaatacaaaagaaagataaattaatagatactgactttgacatttcggataataatattttcataaaccgaatttaattatacccacattgttacctacaccttcactgaaaagttcctagttatgttgagttccatcaacactccacatgttcaaatctggacatccaagagagtctagagaataaaacgcaatgagggcagtgaaacttgcgtatattcagcacctcttaactcaggaggactcaatacaccctggaacactctgcttttctgaatggctcacaatgactccagctcactctccaacctcctcaaacatctggcctctgtttgccctaagttcacgctctgctcttagtctatgttctgaagtctttgtagaggtgaaaatgagctgtcagatggatcttccttctcactgcaacatggaatttgctatttcacttaatgaccactctttccacaatggttgatttcttttggcctgttcattactggtgattttcaagggaatctcagttgaatctttactgttttgcattttgtctccatgacaatgttgggaagtttttcttctagcagcataacatgatctagtgacctgacacatttgcagcaaacaatacctacaaattcagaagctctttggttttctttccacgaaatataattcttgctcttctgtgtatgagcacatcctagcatccctgtacacacccaggtagatgtaaacacgccgatgaaatattccctgtaaataaaaaaagtatctcagtttctctcaatgttcataattctcctgagggtgaggaaggtacttctgggtctgctcaaacaaatggcccagagaccacctggtaggtaggtaaggagctcacctcgctctggatattgagtctgtctctttccctctgtcgtctcatagaaggccagcccacttgttcagctcctaagaagagagcccaggtttatccagattatacaacacaaccagcttctgatgactctcctgttacaacatccatggagatattttgtgtattatataattcaccaaactaatgtgaaatgcccaagttgcaatactgcacaccctagggtatgttcttgcaattcagcggaggagaaattctttcagagacagatggatctgaattggtaaatatgtgggtacgaattctgggtttgagtgtcattgtccagccatgtttcacaggtgtgacctgtcagggaagaaccagagttccttgttctctcagagggtagagctcacagaggtcctctctggttcccaggaaaggtaatttcactaatcttggtgatgagactatcctccagtgctgatgtactatagagttttcatctgaagctgtcactgctatccccaatgtacatcttttcacacagaaatgtttagaggtcaggccatattctcagggttacacattgagaaggatggagatatattctactaccttctcctgagatctcacacacaatctcaaatttcaaaaggtctcagaagggcagctctcaggtactatttaaaaataacccacttcctgggacaggtagcatccttctaaccatgatggatgttctgaactacagtacacattgcatggatccaggtttgtctcaattcactgtgattattacactcagcagctgtttcaatatgtctgaaggggtaaatgacaatttaggtgacctgggtgtatggttggtgttatatgaatctttaaatgtagaacagtattaactgtattccaaaatctgtctttgatccatgatcacacttgtctcccagaccagctccttcagcacatttcctacctggaagaagaggactctgggtttggtgaggggaggccacaggaagagaactgagttctcagagggcacagccagcatacacctcccagggtgagcccaaaagactggggcctccctcatccctttttacctatccatacaaaggcaccacccacatgcaaatcctcacttaggcacccacaggaaatgactacacatttccttaaattcagggtccagctcacatgggaagtgctttctgagagtcatggacctcctgcacaagaacatgaaacacctgtggttcttcctcctcctggtggcagctcccagatgtgagtgtctcaggaatgcggatatgaagatatgagatgctgcctctgatcccagggctcactgtgggtttctctgttcacaggggtcctgtcccaggtgcagctacagcagtggggcgcaggactgttgaagccttcggagaccctgtccctcacctgcgctgtctatggtgggtccttcagtggttactactggagctggatccgccagcccccagggaaggggctggagtggattggggaaatcaatcatagtggaagcaccaactacaacccgtccctcaagagtcgagtcaccatatcagtagacacgtccaagaaccagttctccctgaagctgagctctgtgaccgccgcggacacggctgtgtattactgtgcgagaggcacagtgaggggaggtgagtgtgagcccagacaaaaacctccctgcaggtaggcagagggggcgggcgcaggtactgctcaagaccagcaggtggcgcgcggcgcccacagatcccgaggccgggtccggagcaggtgcaaggagggcggggcttcctcaacagctcagtggtctgtctcctcgccagcacctcagatgtccccaggactctctttctttattatctgtggttctgcttcctcacatccttgtggcagggaagaaaggaggaagacaatttttctgtttactgttgaggtttcaccaattactagaaactttcctacaagttcctgcatgactcattttgccatatatggattctcaccatctcttgatttgtttcatcaatcgaattgtgccctatttgaaattaacttactgaaaccttaaatccaatggatctatactggaattttaatgatgtaattgaggttaaatgtggtcaaagtgtgagaccctaatgcaataaaccgttgtctttataagaagaggaagagacaccagagacctctcacttttcacgtgcacacagagaagaggccatgtggagacgtagtgcactagaaggtggccctgtgcaagccaggaagaagccatactaagaaccaattttgccagctccttgatcttcgacattcagactgtagaattgtaagaaaatcaatatttgttgtttaagccacccaatcctgttgtcttcttacgaagacccaaactgactaataccacctaactctgttagctctgtctcctggagggagaagcagccccctgaggctgggcactgcatctctcagatttccacgtgaagtaggcaaaaatagtagttctcatataaaaatgtgtcatggctctgttggccatttttgagcatggtctctgaaaccagccctggtgtgtgtgtgtaacaaatgtcccttatcttttatttggacataacaaatagacgataggtaccagctggatggagattggccactgatcatcttctgttctccttagtatgtcacagaaaaccacaccaacatcaccagcatcactgtttttcttctaccacctcaaacggactacagaaatgatccctgcagtatggtctatttcttcggctttcgaaatttgcactgaatctcttcctaaatggggagctacatggggtctgagttttgttcctttcttcccagtcttccccaagtaccaaggacagaatagacttaaaatttggccatcaatgcccccaaacaccacatcactttctaaaatccacatcctgcatccatccttctctggacacccctcatcaggctacccaggaatggccagaatctggtatcagcttatgggctgaggccacgagttatacacatgtgtgatttcagtcacacacactctacttcaggaccacacctgtgttctgaggagctcaggcacctgctgatctcagtaattctctaataaatcacacacctcttattaataaaggtccagatggccccatcagctgcagagcagtggagtaaagctcatgggtgggtccatcaggcagaagtcagacaatggaagggatggctggtcacttccattttcactgatgttcgcaatgaattttaatggaataaaacaatattaactacaaagagacagaaaagaagactggctcgtcaagatatttaaggacaaggaactttatttggggggaaagtgaaagacacttctaaatggaaatccctaaagcacatacagcagctgacagagtggccactgtgcacatgagggctgaggagatggatggtagagtccattcctgcaacatgtctctgggtgtgtgatggttagactcctcatgcatatgaatataagagctggactcatggagaaaaaaagggccatatcccataggaaaggaagaaaaaaaaacagatgggcacccctggagagagctcattagatttggtgtgtttaagatgaaaatttcttccaaaaattgtaatgttctaagctaaatatgaatctcttcaataaactgagaataggagaatggagctaggacttgagagaggaaacaaatcttgagagagcagaaagcaaatccacaaaaactgtcacatgacagaggtcagaatggagctgatgtagctacttcactattctgcagacttattgaccatgtggagaaggggcttgaacaaatggagacgttctccaaccttctgaatcagcctccttcttatgcatgagtagaaatcatagttctgggggtgaccttcccaattttcctgtccatacctcttcccccaggggtagagtgtcttcccaaccacaatggtttctcaccagtgttctcagcttctcctccattgtacttaccctgcagattaagaatttcttctagatggagttctttgggaattttctgttttctttagtttctgttgactccaccacacccccataggatacaggttttattggatttcccctggaaatagtgggggtggatccaggcgttcaacagtcctcgctgttcttcccttcctgtcagcaccacaggacagcagataagggagttgactgtggatttttcaaattcctgggaaaagcctgcaaggactagtagattcacactctaataccattagcacatgtatccaaaaagaaacctcactaaatatttccaggttagcctgttcctctctcagtgccatccagtggcacctgccctgggttcacgaacatgtgggccccagtcctctctgctggcatctctctcctcacatttcagtcttctcgttagctctgtgaaagcagctcagatatgttaaaaggttttcttcttcatttattcagtttttcaggtttactgttaaggaggtcagaataagatcatagtttcctcatttttcacatttgcacgctgagtagccactttctatataaaagccagaaactaagggaacaaatcaaatatccatatccactacaggtgaacgttaaaaaatttgacatatgattatggactaaagtacaatgcagaattagaatcaaggcatcctcattctcataaaagcatgtctacattctcaaataactctgctgagtgaaagtagctgaagaattaagagtgcacttcataaacttctaattgtataaactgcagaaggtacaactattctaaagtaacagagcagatttgaaatttgggagaaatgggtgttgaaagtaattgggtggtgagatgaaattacagagaagtgacagaaagatttaggggttaacttaattgtacacaacctgattaaagtttgcacacatacgttaccattttccaaatggtgcagtgtagatttgaattaattattaattgtacttaaagcagtaacaaagaaacaaatgaatatgttggttgaggaggagcaaaaaatagatgggtatgaacactcaaaacatctcagactcttgaaagtacacatgcttgaacactggttttctctgtatactttaggtaaagagcagaatacattaaaagaaaacagagatgtcctggcgggggtggaatcctgcaaacctcactaggcgtgtcccacactgccctggagttgtctcaggggagcagtctcctctagtggtcagagacacaggcatggataatggggctaatactgtccagctgtgtgaccttgaacacattgtataaacactgttccatatgtaatttatcttccttaaaatgtaacattgacacttgcattaaatgtattctacaaatatgtcaaaaagaagatgacgactgctaaatgattatcaaggcacaatcatataatataatgatattttcctgagtgataagatgactaccaatctcccccagggcactttgtttgctctgagccctgcgcctcctcaggattcccatcccagagcttgctatacagtaggagacatgcaaataggtttctccctctgctgatgaaaaccagcccagtcctgaccccacagctctgggagagaagcgccagccctgggattcccaggggtttctatttggtgatcaggactaaagacagaggacccaccatggagcttgggctgagctgggttttcactgttgctgttttaaaaggtgaactagagagattgagcgtgagtggatacccttgagagaaatggtggattatgtctgggagtttctgaccaggatgtctacgagtttgcaggtgtctagtgagaggtacagctcgtggagtccggagaggacccaagacaacctgggggatccttgagactctcctgtgcagactctggattaaccttcagtagctactgaatgagctcggtttcccaggctccagggaaggggctggagtgagtagtagatatacagtgtgatggaagtcagatatgttatgcccaatctgtgaagagcaaattcaccatctccaaagaaaatgccaagaactcactgtatttgcaaatgaacagtctgagagcagagggcacagctgtgtgttactgtatgtgaggcaccaggtaagaggacatcagtgtgaacacagacacagtttcctgcaatgacaagggaggaggctgggctaaaaggggcactcaggacccactgaaaacgggcagctctagggcaggtacagatggttatcatgggctgctttccttcagggtctgtggcctcctctgcatctaccagttcccctcggagcctctggacatttatgtttctgtggccacccctgacatctctggattagaaaagtttattataggaagaggaaacattctcatttgtcccaaagcagatgtaagtaatggaagcaaaaaatgcacaggaggccaggcggggctgtagatactgtcaccccagaatgtcaatctcaccactagtactggagagggaagggagtttgatggaccttccctaacaaccctgtggtccaagataagtccaggaagaccattggtgcctcccagagcacagttgtccatcagggatgtccaatgcgtcccagcagcagccatgcctcagtgtctccactgtgcacagccactgtctgggaggagctcccaggatgggtgtctttggcacacaccaggtggcgggtgttagagtgcagtgcagcagctggctgcctgttctattgggctccctgatgctggagagatgggaggtgcattcgcagggccagcaccctgtttgtgaatttttatataaaaaccctgattttacttcatttttgcagatgacatagataactaaaaacagaatctgcaaagaaattgtaattttcaactttaccccaaattcattgtttcttaattctgtgcaagatccagacatattattgccttcctcatgataatttattctatgtaaaaccgaaatcattttttctcctactctttgtttctgttcaagtacagagatcttgagcaaagtaagttgggttctttccacacactaaccctcaccttccccagagaatgagcagagattgtcctcagtctgagtctaagggaggagctgtttctgcacaactcagagcctgcagagacccccaggtgcagcttcagtgaagtcagacatttctccatgtgggcgacctccagtgcctgtgactgctgctcaggcctaattgttggttaagtattacgacaccctttaggtgatcacatctcaagcctattctgaaaatcaccatgaacagagatagttcaatggccattctcctgacataagtttctctttattacttggttccaagtatggagaaaaatgtgaccctatatttgtctgaatccaacatcagcatccacggcattacgctaggagactcactaattgagcacaagtgagctcgttattctcatagaaatgtaagtatttggaaatttcagcgtgttctccagaacctgtggctgccaacaactgtatttctcggtgcactcttggcctggtgaagccttcacagaacctctccctcacctgtgccatctctgcattctccatcacaaccagtgtttccttctggagctgcatccatcagcgcccccatgggaggtactggagtggatcgggtgcataggtcatggagggagcacagattactcccctcttctcaagagtccagtcaccatctccagatccatgtccaaaaagtacttcttcttacaggtgaactatgtgagcaacaaacacatagccatgtattttagagcaaaagacacagtgaggaaaccacagtgtgaactcatacccaagcctcccctgtgggggtgcataggacagccagggttactcaggacaccaggctccctcaggacaccaaggggcactcaagaccattgtagaggcatgcaggtagctgggggctctcaggaaccatgggggaaaatcaggacaccaaagggtgcttggtacagcagggggctcaggattattgtggggattcagaaagagcaggttcaaggctcaacctcagggcatgtgcagctggtgtgaaaaggggctggatgaggcgttttgtgtcaccatcatgtttcaccaccagacaccctccactacctctattctaatgcatgtgtttgtatgattagaaaatgatattgatataaatatataaccatagctaggtgtgtcaagttgtcctctccatcttatatcagccttgtctgtaaggactaattccccataattacttgagaacctcataaattgtggtcaattatgtaggattcctctctttttctgccttccttcctccctccttctctctctcacacagaaacttatatacagccaccccacaacacacataaatctataacttttattacctgatgtattgataagtaatctaaagttacataaaaatcagtagttcactgtcaatattgtaggagaagggaaggtctaggaaggaggaattacagaacaagaggatattttgagggtaattgacttgttatctatgtggataatgataatgtctatgaccatatttgtaaaattgaacacttcgtgtggagactattatttttttatttaaccccatgccattattttgccgtattctagcatttctctaaaaatacagaaatgttcagcactcattcatgtgtatattcaggagtttctgacttttcatgtattttatttatctctgtctaattgctttgataccaaattttacctagtataattagtactacctttagcactgattataagtctcactcctccatcatctccttttttgccacacaagctgaatctagtttggactcataggagctgcttcattcaatgccagtgggagtttcaaaccctatcaacccccctataaactgtcattaagaaagtttatcaaactccaccagtcatgtgatattagttcgttttcacagtggtataaagaactacctgagacgaggagtttacaaagaaaagaggtttagttgactcacagttctgcatggctggggaggccacaggaaacttataatcatggtggaaggtgaaggcgaagcacggcacatcacacagggcagcaggagagagagggggaagtgacacatagttttaaactatcagctcttgtgagaactcactcactatgatgagaacaacatgggaaaactgccctcatgatccaataacctctcacctggtccctcccttgacatgtggggattagaatttgagatgatatttaggtggggacacaaaacaaatctatagcacatgtccagctgtgtcctggagttgtttcagggatccagtgtgtactgttgatagaaacagtgatcatcattctagccggtgtgagatggtatctccttgtggtttagatttgcatttctctgatggccagtgatgatgagaattttttcatgtgtcttttggctgcataaatgtcttcttttgagaagcgtctgtgaaaaaaaaaaagaaacagtgacaccaagctcacaccatccgttgtagttgacaacatgcaaagccaagagatctcaactgagatttagtgtgtgtgtcatgtctgatgaagtcataagctcagagcaagtgaatatggaaaagtgtattatctgcacagtgtaggtgtctgctgagtgcagggcaggtctcgcaggaaaatctaaaatggcttgaaagaagaggaaaggagactggctcagggtttttataatggtttagtggtggtggcacagtgaggcttcccactcacagatcggggtttataaggtttgaaactcccactgccattgaatgaagaagctcctgtgagtccaaactagattcaccttgtgtggcaaaaaaggagatgatggaggagtgagccttaagtaatcaacaggcatgcaccaaaagatagagcgacaacttattctaggtagcaagaataaaaataatgaaaaagaaataagggttcagtatgggtggacaagacccagatctacagaaatgagatgactttagaaatataaggaaataataatgagaaaaagaaggaggggatggggaattagggtcctggcctaatgtcttgggtagaagcttctcacaatcaaggactatcagcttattctgcaggtcttgggtcacacgtctgcttaaaaacatcagaaatgccaggcaatcaatgaggatgctcagtttagcatctcctatttgagtagatttacagttgtgtggaattcttaattgattctttttggtttgtttttagaggcaggctctcacactgttccacagcttaaagtacagttgtgtgatcatagctcactgtaattttgagctccggactcacgtaatcttcctgtattagcctcctgaatatctagaattagaggggaacgccacccctcacctgcttattctttaaaatattttttcatagaaatagcatctctttatgttgcccaggttggcttcgatttcctggtctcatgtgatttccctcactttgcttctgaaagtggtgtgattatagggaagatccactgcatctgtcctgaattgattcttcagttgtaaaacatgaagccaataattaactgcctgactgttttgtgcagtgagttagttaaaagtttctgataagattccttccaatatgattcaagagcagtattttctgctgatgttcctttcagtttccttgttgaagatcagaagacactgcggaaaagatgtagtaaaaaggcagttttaactcttcatgattggagtggatatcacataggaatccctttccgtattttgtaacacatgcatgcaatagaacaaagatgatcccttggtgtaaaatctataaacgtatgggccttttagctaccaagtcatagggtaataactgatggaccctgaggagtgaaccatgattccatagtgctagtgggagaacccttggccaaggaagtttacattttattaaaattgataatttttatgtagcgatgccattttttaaacattcccagaaggttgtgagtgggattgactctgtcttctgtgaacaatgacagtgccctccatggttagataatattttaaactagattgagctagagtggtttctgtattgaatcactatatttttttagcttcatgttagctttttgtgtgttagcatttgctttaaaatgatattaatcagccctctagtaggtagaaattcatctgagggtttcttcccttgttgtccatctcaataggatttccagaagacgtaagaaccctctctgtttctaaaaatattccaggctgggcgctgtggctcatgcctgtaaacctagcactttgggaggccgaggtgggtggacccctcgaggttgggagtttgagaccagcctggtcagtatggtgaaacctcatctctactaaaaatacaaaaattcgccgggcatggtggtgtacactcgtaatcccagctacttgagaggctgaggtgagaggattgcttgaaccctggaggcggcggttgcagtgagccgagattgtgccactgcacttcagcctgggcgacacagcgagactccgtctcaaacaaaacgacacaaaaaattccaaagttgtgcaccctctaaaagcatatgtacttaattctcatttttaatttattaaacatctctaataagttcaatgtttcctgccttctgagttgatttcctaacacatagaagaatatatcctaaatgaaagtttgtgttcttaatacaaattactagttaataacctttacttttattattgaggtattatacatcaatgttaatcaatcctctcaatgggactcttacctaaagaatatataaaatattttcctgatcatgacatataatagatgtgaacacattcttagcattcagccatgtctcttgtctattaatattataaaccacatgctaactttgattttattggtaattgttctaatttcttttttttcccacttctctggttgttttttttttaactttaagttttagggtacatgtgcacaatgtgcaggttagttacatatgtatacatgtgccatgttggtgtgctgcacccattaactcgtcatttaacattaggtatatctcctaaagctatccctcccccctccccccaccccacaacaggccccagtgtgtgatgttccccttcctgtgtccatgtgttctcattgttcaattcccacctaggagtgagaacatgtgttgtttggttttttgtccttgcgatagtttgctgagaatgatggtttccagcttcatccatgtccctacaaaggacatgaactcatcattttttatggctgcataggattccatgatgcatatgtgccacattttcttaatccagtgtatcattgttggacatttgggttggttccaagtctttgctattgtgaatagggaattgttctaatttcaaactagttaatttttatcttcatgcagctagattattatgtgtggctatttattccgagagggataaagacaacattaacaattttcactgcaggcatgtctaggcaactccctgtgcactatgaccctgggacgttggagattctatggggactcttccctacctgcctaggagagttctctgccttctacctctagcattttcctctttgaagaagtacatctaactgtcattagaatagagacaaagacaagtcttaactgcttccagctgaggagggatgctgtttggggaagatctctcttggaggtctaagggaccccaggaaaagggagccattatcccaggcttcagttgcatgaccatttggagtttgatggtctgaaaatgagaagaggcaaatctggttattagaagacatgtatgaaaaccaaacaaggtggcaaggacagcttgaaagaaaattccaaggctgctgacattcctagataactgcagctgtagttatgcctgctaaggtttgggcgcatggggcttggcttttgtcagctccctgggatttattttcccaaacaaagaaacctccaggttaggggcaccctattcattcccatcacctggcatgatttaaaggataattgcttagaattaaaatattgatccagattttttatattccccatcgctttttgtttcttctgggctgtagccagagatcattgattggcgctcaggaataagcagagttagtctaaaatgcaggcaaatacttaaacaactgaagagattagaatttaaagacaagtgtatgatatgttttgaaatacaatgtttctctttccagttttggtttttgtcggcagcaaataatgataagactgagttgtttgcaaaataaactttagtcttaaacttggcctgattatttgcataaagtgcagcaagaatattaataataattctgtaggaaaagcctgcaagcaccaggagcttcacagtctaacactatgagcacgtgcatcctcacgcaactcactgaatatttccaagccagcctgttccgatcttaaatgccatccagtggcatctgccccaggtacactaatacatgggtcctgcttctctctgcagcctcctctctcctcagatttcaggttttgtttattgtttgttttctctctgacatcaacacagatatgttgaaggttttcttttttttatttgtagttgttcagctttgttgttaatgaggtcagaataagctcatagtttacacatttttacattcccatgccgagtagctgcttttctctatcaaatccattaactgagagaacaatcacatttcgttacaggtgaacagttaaatagtttggcatatatttctgtgctggaatctaatgcagcttgaaatcaagtcatgcctcactcattgaaaaaaacatggctaaattctcaaagaattgtgctgagtgaaagaaactaaggaattaagagtaaattttacatgatacatttgtagaaattttagaagatgccactattataaattaacatggagaagatttaaatgtttctgagaatatgctattgggagtaatggggatgtgagttaaatttcagaggaataagagaaagatttagggattaattttttcaaaccttgattgaagtgctgagtaaatggttgcaaacataggtctacatttttcaaatcattcaccataaatttgaattatttattaattacactcgaataaagcaataaagaaactgatgagataatatttgactgaattgcatcaataaatagatcgatattaacacaaggaatataactgatttccaaaaacatacacatgaaccatggttcactctgcgtatttagataaattacagaaagttgtcataacagatggggaatcctgcagacttcactaggcatgggccatgctgccctggagttgtctcaggggagctgcctcctccagaggttagagcacaggcccaggtaataggactaaatttttagatgtgttatcttagacacactgcacaactgctgtgttctctatgtaaattatctcctgtaaaatataacattgaagcctgcattaaatatattgtgtaaatatgtaagaataaaagaaagttatgagagctaagtgttaatcaaggcacaagcatataagatataactatattttcctgaatgatggaattactaccagtctcccccaggacacttcatctgccctgagcccagcctctcctcagatgtcccacccagagcttgctatatagtgggggacatgcaaatagggccctccctctactgatgaaaaccagcccagccctgaccctgcagctctgggagaggagcccagcactagaagtcggcggtgtttccattcggtgatcagcactgaacacagaggactcaccatggagtttgggctgagctgggttttcctcgttgctcttttaagaggtgattcatggagaaatagagagactgagtgtgagtgaacatgagtgagaaaaactggatttgtgtggcattttctgataacggtgtccttctgtttgcaggtgtccagtgtcaggtgcagctggtggagtctgggggaggcgtggtccagcctgggaggtccctgagactctcctgtgcagcgtctggattcaccttcagtagctatggcatgcactgggtccgccaggctccaggcaaggggctggagtgggtggcagttatatggtatgatggaagtaataaatactatgcagactccgtgaagggccgattcaccatctccagagacaattccaagaacacgctgtatctgcaaatgaacagcctgagagccgaggacacggctgtgtattactgtgcgagagacacagtgaggggaggtcattgtgcgcccagacacaaacctccctgcaggaacgctggcgggaaatcagctgcagggggcgctcaggagccactgatcagagtcagccctggaggcaggtgcagatggaggctgtttcctgtcaggatgtgggactttgtcttcttctgacagttccccagggaacctcttaaatttagaaaactgtgcctaacaatgtcttctctatgcatatgaggaccttttctccctggcacaaaatgcagattgacgctgacacggatgaaaattcctcaaccatggtcacaaggatcagagtcctgagtaacctcagggcttcctggtgattcttctccaatcagacccaggacagggacctccgtgagattccctgactggaacagtctttatggatcctggtcacagacaatagagaggctgaaccagggtcagcgtcatgtagaacgtcacagatttcacgtctgatccttctcctgacacgaaagtatgcaaatcagtatcagcaccgatctggtgcttcttttgttcctaatccatttactttcttttttcgtcgtttttctcctttttccatttgtttttcctgctttttgcaaaaggaagatgttttccctgtgagatgcaggggatgacaattttgggagatggctggaacatccaatatcctcagggccgaccatcagtaagtgcaggctagaagtctcagaaagagctgaagctgcttaatcaccgtggagttttaccttctccagttctgctctgatggaatcagggccaagcaggttatcaatgataatctacctaacatagagtcaactgattccagtttcaataacgtctgttaaaaattcacaccaccacctggattactgttttgtcaaatcaatacacagtattgtccagctaagtagacccaaagacggaccgttgcccatggagaaaaacattaacctgagttctaggttcttacagtgttaaaggtgtaaaactgattattaaaaatgaggctatttttctttttgctgttgagttgtagaagtttcttttccattttgacatgaaaactttttcagatatatggcatattatccaattctgtaagttgtagttattttgttgctttgcagaatctttttcataatctattcccacttgttcaattctgcttttttttgtaggtgatttgaatgtaaaatcctgaaaaagattgctaattttttgagtgttgagagttttacaattagaggtattacagttagatatttgaggcatttggagtgaatttttgtgtttattctaacctaaaattcttaattcttttcatgggaaaatccagttttcataccaccctctttggaagacactacaatttagccatgttatattgatggttctcatgctaaaaatcagcttgtcatcaatatgtgggtttatatctaagctctatataggtatttaagccaaaactttctatgtttttaataaatgttgaggcctggaagtgaaatgcctaaagctttcttcttgccttgttacagatattgtaccaaaatattctaaccttttactattgagtgtaataatagctgtggcctttcttaacggcttttattatgttcaagttgttttcttgtcttcctactttgttcatagttttaataatgaaactgatttttttcaaagtctttttctgtgtctgatgaaatgttactgagatattttttctttagttttttaatgtgtaccaaactgattgatttgagaatgttgaatcaagtatgcatctcaggaagaaatttgagttggtcatggtgtatgtcttctaaaacactttggagcttagtttactattgttggggattaattcatgtctactaatgatattggtctgtagtttcctttattgtggtgcctttgtctattactggtaatactatcatggtagtctcatagaaagagtttagaaggtgtatggcagactacctttaaaatagattttatcagtggagaaatggtgatagttttttcttcacttttctgttgggaagaattttatgttgtttaaaagatattcagaatgacttaacctggtttatgagctttcattctattcctttcttccattctttttgaagaactgcttacctttcctatttatttttaagtttgtttttagacatatgcaatacattttgaggtgaaacctggtggaattttttccaataaattagtaaaaataaatcatttaattgactattttattcaggttgatttgtttaatatttgctaaaggccagttctttaagctatgacacataataaatcccaaatggcagtacctcattgtttacttagcttttgtacttatatttttcagaggaagaaccactactgtaaattgtaaatagccaatacataattgtattgtatgcaaatctgtgactgtttacagtgtcatctctgagaaacataaagtttatttactatatatatataaagagtttggaaggtggactccaccaatttttgaaagagttacagaagggctgctattacttctttaaatgttaaggttccattttatgatgtaacagataacctatcatggagaatgttcaatgtgttccttgagaaggatgtgtattacgtgactcttggttggaaggttctgtaaatatcattcagataaatttgttcaatagtgttgttcaagttccagaggcacattgagaattttctttctggatttgctaaacattatggtcatgaggtattaaggtcttgtgttatttttgtattgttttctatttctttatatctcttacagtttgcttaatgcagttatatttgtatttgtacacatgtgtaaaaacaaaaatcataattgctaaatgagttttatggcacagtcacattataagtaatatttttccaaatgctaccattgccactaaagtcctcctggagtctgacgtctgctctgggcactgccttcttctcaggcgtcccacactggagcttgctatagaggaggaggcatgaaaacaggcccctccctctcctggtgaaatcaagcccagacctgaccctgcagctctgggagaacagccacagccctgggattcccaggggtttccatttggtaatcaggactgaacacagagaactcactatggggtgtgaattaagctgaatttttcttgttggtattttaaaaggtgactcctagggaactagagtgagtgagagtgagtggatatgagtgagagaaacagtggatatgtttgccagtttctgaccaggatgtgtgtgtattttcaggtgttcagtgtgaggtggagctgatagagtccatagaggacctgagacaacctgggaagttcctgagactctcctgtgtagcctctagattcgccttcagtagcttctgaatgagccgagttcaccagtctccaggcaaggggctggagtgagtaatagatataaaagatgatggaagtcagatacaccatgcagactctgtgaagggcagattctccatctccaaagacaatgctaagaactctctgtatctgcaaatgaacactcagagagctgaggacgtggccgtgtatggctatacataaggtcccaagtgaggaaatatcggtgtgagtccagacacaacatttcctgcaaaaagaagaaaggagtctgggccgaaggggacactcagcactcacaaaacaggtgcagccccaaggcaggtgcagatggagggagggtaagggctgctttccttcagggtctgtggtttcctctgcttctaatatttcccctctgaacctctgtatatttatgttttgtgcccaccatgaggtccctggattagaaaactaatttaaaagaggaaatattctcatatgtcccacaaacagatgtaagttttggaggcataaaaatgcataggagccgcgtgagtctgtagacactgccaccccacaatgccagacccaaaactagtgctggagaagggtgggagtttgatggagcttccctgatgaccccgtggtccaagctaagtccagcaaggccattggtgcctcgctgagcacagttgtccatcagggatcctcccatgtgtcccagcagcagccatgcctcagtatctccactgtgcacagccatcgtctgggaggagctcccaggatgggtgtctttggcacacacaggtgatgggtgttagagtgcagtgcagcagctggctgcctggtctattgggctcctggatattggagggattggaggtgcattctcaaggccagcacgctgtttgttaatttttgtataaaaaccatgtgatttaattcattttctcagatgacatagataattaataacacaatctgcaaacaattgtaattttcaactttaccccaagttcattgtttcttaattctgtgcaggatccagacatggtattgcccttctcatgagaaattgttcgacctaaactgaaaccagttgtttctcatatactttggttctccccacatgcagagatcttgattagagcaagtttggtactttccacgcactcaccctcacctccccagataaagagcagaagttctccttagactgagtctgagggaggagctgttcctgtaccactcagggcctgcggagacccccaggtgcagcttcactgagtcaggtgtttcactccctgtgattgctgctcaggtctaattgtgggctcagaattaggacagtcttcaggttatcacagatcaatcatattctaaaaatcatcattatcacacaccgtggtaataattcaatgttcatttttctaaacagcagtttctcttttttatttggttgcaagtttgaggaaaggagcatgtgataatactttttaatctaacctcaaaatctactgaattgttctaggagactcacaaattggacaagagtgagctccttgtgctcataaaaaatgcatgtatttgggaatttcaccgtgttgtccagaaactgttaacatcaacaactgtgttttccagtgcacttctggcttgagacatcctcacagaccctctccctcacctgcactgtctctggattccccatcataaccagtgtgtcctgctagaattgtatctgcttgcccctagaagatggacaggagtggatcaggttcatgggttgtaaagggagcaaaaattacatcccacttctcaagagtccatatccagatccaagaaacagttcttacagctgagctctgtgcccagtgaacacacaactacacattttgaagcaaaagacgcaatgaagggccttcattgtgagcctagacacaaacctccctgcaggggtgaataggagcagcagggggcattcggggcagtatgggggcttagcatgattgttgggggtcaagatgagcaggatcaaggctcatcatcagggcaagtgcaacagggcagaaaaggggctgtagatgtgggttgttctcaccatcatatttcaccaccagacaccctccactacatctcttctaatgtgtctgagtgttgatatgattagaaaatggcatttatgtaaatactaatgtatacccaaatggaggtgcatccagttgtcctctccatcttatgtggaccttgtccatcaagggctaagttcctgtatttacttgattacctcatacattatggtcaaaacaggtagggtctcattttggcatggtctctcctcctcccttctctctgtcgcacaaaaacacatgaactgacacacacagagcttcccaacttcaattatctgatgtattgaagcaaattgattagtgtgcagcttttctgctttgcctgctattcatgttatgtaaaaataagacccgtgtgtttctcagcttgttacttctctaagctaagtagcatctttgtttattatacccagagaccaaaagcgattcagctgttattcagcagcttaactggtaaacaaattgtggaaaattcatttactggaataatacccactgttacaatgaagtactgctggatacactcagtaccatgcttaaaataacaagtacctgaataagtaaaataagtcaaacaaataaaagtgcatacatatgattccacttctataatttctataaagtaaaaatgaacttaaagttacataaaaagatctgtagttgactggggacatggtacaagaagagaaggtatagaaaggagaaacgacaggagagcaaaaggaaatttctaggataattttttctctgttagtaaaagtgaggattatgtcactatttgtaaaattgtacactttatgtaaaggttcttatttgctaatttcacctcattaaaatattgcaaattttaaaatatctaatttggtagaaaaggtagtagagagagatgaataaaatacataaaattcagagagtcctgaatacacacatgaatggaccctgggtctcactgtacttttagggagacactagaatacaaaaacataatgacaggatttcagtacatgaaaggagcttctcagaccccaggaggcctgtccaactgcgtctgggagttaactcagggagcaggcatgtcctttggaaggagcaatgacaccaagctcccagcatccattgtagccgacaccatgccaatgccaagagatctcgactaaaattttctgtggatgttgagtgtgattatgccacacactcacaccaagtgagtatggaaaggatagttacctgcatccttaaggtgtctgctgagagcagggcaggtctctcattaaggtccaaagtggcttgatagagcagggaaggagactggctctgggttgttatcatggcttggtggggagcggggcagagcatcctacttgcaggaagggttttgtggggtttcaaggtcaaattggcatcaaatgagggagctcctgtgatttctaactagatttaccttgtatgcttaaaaaaagagatgatggaggaatgagcctgaagttatcagcagtcaggcctaaacacagagtctgatgacttactctaaatagcaagtatacaaatgatgagtaagaaaagagacaagactccaatatgggtggacaacagccaggtctgcagaaaatgagaagactgtttataagcaaagaataatgagtaggatatggaggaggattctggtccaatgtcttgtgtggaagcttctcatgatttgagatcatcagcttattctgaaggtcttaggtcacctgtcttcttcaaaatatcagaagtgcctgatgatatgtgaggatgcacagtttaacttcctctatttgagtagctttacaattgtgtagagttcttaattaattaatttttttttttggagacggagtctcactctgttgtgcaggttggactgcagtggtgtgatcataacatagctcacggtgatttcaaattcctggctcatagaatcctcccacctcaacctcctgactagcaagtagctaggtttccagggcccttcatctacacttggccggttcttttcattctttttttttttttttaggtggagtttccctcttcttgcccagactggagtgcaatggtgccatctcagctcactgcaatctccccctcccaggttcaggtgattctcctacctcagcctccagagtagctgggatcacaggcatgtgacaccatgccccgctaatcttgtatttttatcagagatgacatttctccatattggtcaggctggtctcaaactccctacctcaggtgatctttccacctcagcctcccaaagtgctgggattacaggcgtgaggcaccgcaactggcctcttcatttttattcatatgttccttcagcagccactatgtcttcccactgatttcttcagtttctgccttttccttttgaataaggcattattcctaagggaagtcgggaggtgggcctggacagggacttggtgcattcctctctcccgtcccagttcttattggtttctccagtggctgtagaacagcagttttgatggctttacctctgcagataatttctcttgcaatgtagtgctgatggggaggtgtgtctggatgcacttcacctatagttgctgttttgctttcccagacagcaccatcccaaggggtagagggtggagcattttgtgatgtatccccagtactgaagaaaaaggcttcaatagcaggaggaattcctcaactgtatacactctgagaatttaaacaataacttctctatcatactcaaattgaaaccatccaatgaatatgtctactttaatcgtgtgctaacttaaatggcatttggcagcctctgtgccagaaaagattatcatctgctcctgtttatttccctgcaagtccttatctctcttcagatttcagatatattgtttgtcctataacatcaaaaatttgatgtatatgtgctaatttgcagatcagtaagtttagtagctgttgtaagaataataacatatttttatggggtgcttacatctccaagctgagaagcacctctatgtgtaatactaagaaactagaaatgatacaaatatcaagaagatacgtagataaaaagtaatggcatgctaatttactgtaataacatccatcatgagaatcaatacattgttgatgctcaacatgtttgcatcataagtagttatgtgcgagaagccacacaaatagaacacatactatataattcctgtataattcttgaaactcaaaactaaagcattaaatatgaaggactgactcagaatatggtggggaagaaaatatttgggaaggaggaattgtagaggaacacaaggaaacttttaagtgtaatttgtttgttcattatttggatggcttttggggatgcaaaggtgagcacgagtggaataacattttgttttgtttgtttgtttgtttttctgaagagatgtggtccttctctgtgacccaggctggagtgtagtggtgggatcatagttcaatgtagcctctaacttctggtctccaacaatactcctgcatctgccatctaagtagctggaactaccgttgtgtgccaggaggtttggcttggcttgagtacttattaaaccacacactttttgcaatatttaatgtatagtaataatgtctcaataagactattacaaatcaatgaatgaataatttgttcagtacagattcatggaaaaatagacactaacatgatgagtgtctgacatttatgaaaatacagctgcatgaaatgtgcttctctttacattcattaggtaaacacaatagtgcatacacatcacaccgtgctttcattacaggaagaaagttctgaaaatgtcactggggtgaaccacacggtgctgggcttggttcagggagcagtcaggcccagtgttgtgaccttcaaccacagaatccttaaaaaaaaaaaaaaaaaaaaaaagaggctgcctcaaagtccgcatcagttcccggactcgctatgtttctggatcgtatcagtgcatccggatctccctggtggctttagtgattccttgcttgccatgctgaggtctcgctgtagattatgttgggttttctaagaccgttttgctattgtaagatccactccctgggacagagcgattccctctaaacctgatagaggttctgaactaaaaataacattaagtgaatcctggtgtgtctgaactcaagtgattgttacattaagctgctgttccaatctgtttcctcacctgggaaaagaggagccaggacatagtgagttgaggccccaggaagataactgaattctcagagggcacagccagcatcctcctcccagggagagtctaaaagactggggcctccctcatcccttttcacctgtccatagagaggcaccacccacatgcaaatctcacttaggcacccacagaaaaccaccacacatttccttaaattcagggtcctgctcacatgggaaatactttctgagagtcctggacctcctgtgcaagaacatgaaacacctgtggttcttcctcctgctggtggcagctcccagatgtgagtgtctcaaggctgcagacatggagatatgggaggtgcctctgatcccagggctcactgtgtgtctctctgttcacaggggtcctgccccaggtgcagctgcaggagtcgggcccaggactggtgaagccttcacagaccctgtccctcacctgtactgtctctggtggctccatcagcagtggtggttactactggagctggatccgccagcacccagggaagggcctggagtggattgggtacatctattacagtgggagcacctactacaacccgtccctcaagagtcgagttaccatatcagtagacacgtctaagaaccagttctccctgaagctgagctctgtgactgccgcggacacggccgtgtattactgtgcgagagacacaatgaggggaggtgagtgtgagcccagacacaaacctccctgcagggaggcggagggggcgggcgcaggtgctgctcaggaccagcagggggcgcgcggggcccacagagcatgaggccgggtcaggagcaggtgcagggagggcggggcttcctcatcagctcagtgctctccctcctcgccagcacctcagctgtccccaggcctcctctttctttattatctgtggttctgcttcctcacatccttgtggtaggaaaggaaggaggaaggcaaattttcctcttacagtcaaagtgtcactaattactaggaactttcctacaagttcctgaatgtcccatttttccttcttaattaaaaaaaatatatattctaatacttctcaccatctcttgatttgtgtcatcagttgaattgtgctgtctttgaaattcaaatgctgaaaccttaaatccaattgatctatattggaattttaaggatggaattaaggttaaatgtgatcataagtctgagattctaatgcaatagatctgttgtctttataagaagtggaagagtcaccagagacctctcacttttcccgtgcacgcagagaagaggccatgtggagacatagtggactagaaggtgcaagccaagaagaagccgcaccaagaaccaaccctgccagcacctggaccttggacattcagacttcagaatggtgagaaaatcaatgtttgttgtttaagccacccactcctgttgtcttcttatgaagacccagacagactaataccacataactctgttagctcctggagggagaagcagctccctgaggctgggcacatctctcagatatccatatgaagtaggcagaaatagtagttctcatataaaaatgtgtcatggccctgttggccatttttttttgacggagtctcgctctgtggccaggctggagtgcagtggtgcaatctcagctgactacaaaccccgtctcctgggttcaggcaattctccttcctcaacctcctgagcagctgggactacaggtgtccaccaccatgccagcctattttttttttgtatttttagcagagacagggtttcactgtgttagggtggtctcaaatctcctcactgcatgatctgcctgcctcggtttcccaaagtgttgggattacaagtgtgagccaccgcacctggcccctgttggccattcttggggcaatgtctctgaaaccagccctggtgcctgtaccacaaaattttcttttatctttcatgtggatataacaaatggacaatgaggaccagctgcatggagactgaccactgaacatcttctgctgtctcctaagtaagtcacaggaaaacacaccaacatcaccaacataactgttttccttcaacttcctcgaacgaactatagaaatgatcccttaaagtatagtctattccttcaactttctcaatttgcactgaatcccttcctaaattaggagctacatagggtctgagttttgttccctttctcccagtcttccccaagtatcaaggacagaatagatttaaattaaatttggccgtccatgcccccaacaccacatcggtttctaacatccttgtcatgtacccatccttctgtgggcaccccacatcaggttggccaggaatggccagaaggtgtcatcaccttatgggctgaggctacaagttatacacacgtgtgatttcagtcacacacactctactgcaggacacacctgtgttctgaggaactcaggcgcctgctgatctcaggtcttctctaataaattacacacctcttatgaatgaaggtccagatggccccatcagctgcagagcagtggattaaagctcatgggtgggtcagtcaggcagaagtcagacaatgggataatagaagtcagacaatagtcactgaggttcccaatgtattttaatggaataaaacaatattagcaacaaaggggcagtaaagaagactggctcttgaaggtatttaaggaccaggaactttatttggggggaaagtgagagacacttttacatggaaagccctaaagcacatacagcagctgacagagtggccactgtgcacatgagggctgaggagacggatgataggttacgttgctccaagatgtccctgggtgtgtgatggttggactcctcatgcatatgaaaataagagctggactcagggagaaacaagggccataccccatagaaaaggaagaaaaaaagcagatgggcacccctggagagagctcattagatttggtaggtttgagatgaaaattacttccaaaggttttaatgttctaagctaaatatgaatctcttcaataaagtgagaattaaaagaagaatggagctaggagttgagagaggaaacaaattatgagagagcagaaagcaaatccacccaaactgtcacatgacagaggccagaatggagctgatgcagctacttcactattctgcagacctagttgaccatgtggagaaggggttcgaacaaacggggatgttctccaaccttccaaaacaacctccttcttatgcatatgcagtaatcatgattctcagggtggccttcccaagtttcctgttcttacctcttcccccaggggtagagtgtcttttccaacccacagtggtttctctgccatgtcctcagcttctcctccattgtacttaacctgaagattaaggatttcatctggatggagtttcctgggaatcctctgttttctttggtttctgatgaccacatcacaggccataggacacaggttttagtggatttcccctggagacagtggaggtgaatccaggcgttccacagtccttaccgttcttctcttcctgtcagcaccgcaggacagcagataagggagctgactgtggatttttcagatccccgggaaaaagcctgcaaggactaatagtttcacatctaacaccattagcacatgcatccaaaattaaaaaaaaaatcctcactaaatatttccaggttagcctgttcctctctcaataccataccgtggcacctgccctgggttcggtaacatgtgggccccagtcctctctgtaggcgtctgcctcctcagatttcagtcctcttttttgctccgtgaaagcaactcagatatgttaaaaggttttcttcttcatttattcataatttttcaggtttgttgttaatgaggaaagagtaagatcatggtttcctcatttttcacattcccatactgagtaactgctctctctctatgaaagccagaaattaagagaacaactcaagtatccatatccattacaagtgaatgttagacaatttgatgtatgattatgaactaaagtacaacacaggattagaatccaggcatcctcattctcataaaatcatggctgcattcacaaataactgtgctgagtgaaagtagctaacaaattaacagtgcacttcataaacttctatttgtataaactgcagaaggtacagctattctaaagcaacagagaagattacatattggtgggaactgggttttgaaagtaatggggtggtgagatgaaattacagagaagtgacacaaagatttaggtgtgaattgtacacaaattaattgaagctctgattaaagggttgcacacatgttaccattttccaaattatgcagtatatatttgaattaattattaattgtatttaaataaagcagtaacaaagaaacaaatgaatacatttattgaggtggagccaaaactaaatgggaatgaacactcgaaacatctctgactcttgaaaatacacaagcgtgaacactggttctctctatgtatttcaggtcaatagcagaatacactaaaagaaaacagagatgtcctggcaggggtggaatcctgcagacctcactaggcatgtctcacactgccctggagttgtctcaggggagcagtctcctctagtggtcagaggcacaggccgagataatggggctaactctgtccagctgtgtgaccttgaatgcattgtataaacactctgttctctgtgtgatttatcttccttaaaatgtgacattgacacttgcattaaatgtattctacaaatatgtcaaaaagatgatgactgctaaatgattatcaaggcacaatcatataatataatgatattttcctgagtgataagatgactaccaatctcccccagggcactttgtctgctctgagccctgcacctcctcaggattcccatcccagagcttgctatacagtaggagacatgcaaataggtttctccctctgctgatgaaaaccagcccagtcctgaccgcacagctctgggagagaagcgccagccctgggattcccaggggtttctatttggtgatcaggactaaagacagaggacccaccatggagcttgggctgagctgggttttcactgttgctgttttaaaaggtgaactagagagattgagcgtgagtggatacccttgagagaaatggtggattatgtctgggagtttctgaccaggatgtctacgagtttgcaggtgtctagtgagaggtacagctcgtggagtccggagaggacccaagacaacctgggggatccctgagactctcctgtgcagactctggattaaccttcagtagctactgaaggaactcggtttcccaggctccagggaaggggctggagtgagtagtagatatacagtgtgatggaagtcagatatgttatgcataatctttgaagagcaaattcaccatctccaaagaaaatgccaagaactcactgtatttgctaatgaacagtctgagagcagcgggcacagctgtgtgttactgtatgtgaggcaccaggtaagaagacatcagtgtgaacacagacacagatttcctgcaatgataagggaggaggctgggctaaaaggggcactcaggacccactgaaaacgggcagctctagggcaggtacagatggttatcatgggctgctttccttcggggtctgtggcttcctctgcatctaccagttcccctcggagcctctggacatttatgtttctgtggccacccctgacatctctggattagaaaagtttattataggaagaggaaacattttcatttgtcccaaagcagatgtaagtaatggaagcaaaaaatgcacaggaggccaggtggggctgtagatactgtcaccccagaatgtcaatctcaccactagtactggagaggcatgggagtttgatggagcttccctaacaactctgtcttccaagataagtccagcaagaccattggtgcctcccagagcacagttgtccatcagggatgtccaatgcttcccagcagcagccatgcctcagtgtctccactgtgcacagccactgtctgggaggagctcccaggatgggtgtctttggcacacaccaggtggcgggtgttaagagtgcagtgcagcagctggctgcctggtctgttgggcctgatgctggagagatgggaggtgcattcttggggccagcatgctgtttgtgaatttttatataaaaactctgattttacttcattttcgcagatgacatagataactaaaaacagaatctgcaaagaaattgtaattttcaactttaccccaaattcattgtttcttaattctgtgcaagatccagacatattattgccttcctcatgataatttattctatgtaaaaccgaaatcattttttctcctactctttgtttctgttcaagtacagagatcttgagcaaagtaagttgggttctttccacacactaaccctcaccttccccagagaatgagcagagattgtcctcagtctgagtctaagggaggagctgtttctgcacaactcagagcctgcagagaccccccaggtgcagcttcagtgagtcagacatttctccatgtgggcgacctccagtgcctgtgactgctgctcaggcctaattgttggttaagcattaggacactctttaggtgatcacatctcaagcctattctgaaaatcaccatgatcagagatagttcaatggccattctcctaacataagtttctctttattacttggttccaagtatggagaaaaatgtgaccctatatttgtctgaatccaacatcagcatcaactgcattatgctaggagactcactaattgagcacaagtgagctcgttattctcatagaaatgtaagtatttggaaatttcagtgtgttctccagaacctgtggctgccaacaactgtatttctcggtgcactcttggcctggtgaagccttcacagaacctctccctcacctgtgccatctctgcattctccatcacaaccagtgtttcctgctggagctgcatccatcagcgcccccatgggaggtactggagtggatcgggtgcataggtcatggagggagcacaaattactcccctcttctcaagagtccagtcaccatctccagatccatgtccaaaaagtagttcttcttacagctgaactatgtgaggaacaaacacatagccatgtattttagagcaaaagacacagtgaggaaaccacagtgtgaactcatacccaagcctccctgtgggggtgcataggacagccagggttactcaggacaccaggctccctcaggacaccaaggggcactcaagaccattgtagaggcatgcaggtagctgggggctctcaggaaccatgggggaaaatcaggacaccaatgggtgcttggtacagcggggggctcaggattattgtggcgattcagaaagagcaggtccaaggctcaacctcagggcatgtgcagctggtgtgaaaaggagctggatgaggcgttttgtgtcaccatcatgtttcaccaccagacaccctccactacctctattctaatgcatgtgtttgtatgattagaaaatgatattgatataaatatataaccatagctaggtgtgtcaagttgtcctctccatcttatatcagccttgtctgtaaggactaattccccataattacttgagaacctcataaattgtggtcaattatgtaggattcctctctttttctgccttccttcctccctccttctctctctcacacagaaacttatatacagccaccccacaacacacataaatctataacttttattacctgatgtattgataagtaatctaaagttacataaaaatcagtagttcactgtcaatattgtaggagaagggaaggtctaggaaggaggaattacagaacaagaggatattttgagggtaattgacttgttatctatgtggataatgataatgtctgtgaccatatttgtaaaattgaacacttcgtgtggagactattatttttttatttaaccccatgccattattttgccgtattctagcatttctctaaaaatacagaaatgttcagcactcattcatgtgtatattcaggagtttctgacttttcatgtattttatttatctctgtctaattgctttgataccaaattttacctagtataattagtactacctttagcactgattataagtctcactcctccatcatctccttttttgccacacaagctgaatctagtttggactcataggagctgcttcattcaatgccagtggttgtttcaaaccctatcaacccccctacaaactgtcattaagaaagtttatcaaactccaccagtcatgtgatattagttcgttttcacagtggtataaagaactacctgagacgaggattttacaaagaaaagaggtttagttgactcacagtgctgcatggctggggaggccacaggaaacttataatcatggtggaaggtgaaggcgaagcacggcacatcacacagcgcagcaggagagagagggggaagtgacacatacttttaaactatcagctcttgtgagaagtcactcactatgatgagaacaacatgggaaaactgccctcatgatccaataacctctcacctggtccctcccttgacatgtggggattagaatttgagatgatatttaggtggggacacaaaacaaatctatagcaacatgtccagctgtgtcctggagttgtttcagggatccagtgtgtactgttgatagaaacagtgatcatcattctaactggtgtgagatggtatctccttgtggtttagatttgcatttctctgatggccagtgatgatgagaaatttttcatgtgtcttttggctgcataaatgtcttcttttgagaagcgtctgtgaaaaaaaaaaagaaacagtgacaccaagctcacaccatccgttgtagttgacaacatgcaaagccaagagatctcaactgagatttagtgtgtgtgtcatgtctgatgaagtcataagctcagagcaagtgaatatggaaaagtgtattatctgcacagtgtaggtgtctgctgagtgcagggcaggtctcacaggaaaatctaaaatggcttgaaagaagaggaaaggagactggctcagggtttttataatggtttagtggtggcggcagagtgaggcttcccactcacagatcggggtttataaggtttgaaactcccactgccattgaatgaagaagctcctgtgagtccaaactagattcaccttgtgtggcaaaaaaggagatgatggaggagtgagccttaagtaatcaacaggcatgcaccaaaagatagagtgacaacttattctaggtagcaagaataaaaataatgaaaaagaaataagggttcagtatcgatggacaagacccagatctacagaaatgagatgactttagaaatataaggaaataataatgagagaaagaaggaggggatggggaattagggtcctggccgaatgtcttgggtagaagcttctcacaatcaaggactatcagcttattctgcaggtcttaggtcacacgtctgcttaaaaacatcagaaatgccaggcaatcaatgaggatgctcagtttagcatctcctatttgagtagatttacagttgtgtggaattcttaattgattctttttggtttgtttttagaggcaggctctcacactgttccacagcttaaagtacagttgtgtgatcatagctcactgtaattttgacctccagactcacgtaatcttcctgtatcagcctcctgagtatctagaattagaggggaatgccacccctcacctgcttattctttaaaatattttttcatagaaatagcatctctttatgttgcccaggttggcttcgatttcctggtctcatgtgatttccctcactttgcttctgaaagtggtgtgattatagggaagatccactgcatctgtcctgaattgattctttacttgtaaaacatgaagccaataattaactgcctgactgttttgtgcagtgagttagttaaaagtttcctgataagattccttccaatatgattcaagagcagtattttctgccgatattcctttcagtttccttgttgaagatcagaagacactgcggaaaagatgtagtaaaaaggcagttttaactcttcatgattggagtggatatcacataggaatccctttccgtattttgtaacacatgcatgcaatagaacaaagatgatcccttggtgtaaaatctataaacgtatgggccttttagctaccaagtcatagggtaataactgatggaccctgaggagtgaaccatgattccatagtgctagtgggagaacccttggccaaggaagttcacatttcattaaaattgataatttttatgtagggatgccattttttaaacattcccagaaggttgtgagtgggattgactctgtcttctgtgaacaatgacagtgccctccatggttagataatattttaaactagattgagctagaatggttgctgtattgaatcactatatttttttagcttcatgttagctttttgtgtgttagcatttgctttaaaatgatattaatcagccctctagtaggtagaaattcatctgagggtttcttcccttgttgtccatctcaataggatttccagaagacgtaagaaccctctctgtttctaaaaatattccaggctgggcgctgtggctcatgcctgtaaacccagcactttgggaggccgaggtgggtggaccctcgaggttgggagtttgagaccagcctggtcagtatggtgaaacctcatttctactaaaaatacaaaaattcgccgggcatggtggtgtacactcgtaatcccagctacttgagaggctgaagtgagaggattgcttgaaccctggaggcgggggtcgcagtgagccgagattgtgccactgcacttcagcctgggcgacacagcgagactccgtctcaaacaaaacgacacaaaaaattccaaagttgtgcaccctctaaaagcatacgtacttaattctcatttttaatttattaaacatctctaataagttcaatgtttcctgccttctgagttgatttcctaacacatagaagaatatatcctaaatgaaagtttgtgttcttaatagaaattactagttaataacctttacttttattattgaggtattatacatcaatgttaatcctctcaatgggactcttacctaaagaatatataaaatattttcctgatcatgacataaagtagatgtgaacacattcttagcattcagccatgtctcttgtctattaatattataaaccacatgctaactttgattttattggtaattgttctaatttctttttttttcccacttctctggttgtttttttttttaactttaagttttagggtacatgtgcacaatgtgcaggttagttagatatgtatacatgtgccatgttggtgtgctgcacccattaactcgtcatttaatattaggtatatctcctaatgctatccctcccccctcccctcaccccacaacaggccccggtgtgtgatgttccccttcctgtgtccatgtgttctcattgttcaattcccacctaggactgagaacatgtggtgtttggttttttgtccttgcgatagtttgctgagaatgatggtttccagcttcatccatgtccctacaaaggacatgaactcatcattttttatggctgcataggattccatggtgcatatgtgccacattttcttaatccagtgtatcattgttggacatttgggttggctccaagtctttgctattgtgaatagggaattgttctaatttcaaactagttaatttttatcttcatgcagctagattattatgtgtggctatttattccgagagtgataaagacaacattaacaattttcactgcaggcatgtctaggcaactccctgtgcactatgaccctggggcgttggagattctatggggactcttccctacctgcctaggagagttctctgccttctacctctagcattttcctctttgaagaagtacatctaactgtcattagaatagagacaaagacaagtcttaactgcttccagctgaggagggatgctgtttggggaagatctctcttggaggtctaagggaccccaggaaaagggagccattatcccaggcttcagttgcatgaccatttggagtttgatggtctgaaaatgagaagaggcaaatctggttattagaagacatgtatgaaaaccaaacaaggtggcaaggacagcttgaaagaaaattccaaggctgctgacattcctagataactgcagctgtagttatgcctgctaaggtttgggcgcatggggcttggcttttgtcagctccctgggatttattttcccaaacaaagaaacctccaggttaggggcaccctattcattcccatcacctggcatgatttaaaggataattgcttagaattaaaatattgatccagattttttatattccccatcgctttttgtttcttctgggctgtagccagagatcattgattggcgctcaggaataagcagagttagtctaaaatgcaggcaaatacttaaacaactgaagagattagaatttaaagacaagtgtatgatatgttttgaaatacaatgtttctctttccagttttggtttttgtcagcagcaaataatgataagactgagttgtttgcaaaataaactttagtcttaaacttggcctgattatttgcataaagtgcagcaagaatattaataataattctgtaggaaaagcctgcaagcaccaggagcttcacagtctaacactatgagcacgtgcatcctcacgcaactcactgaatatgtccaagtcagcctgttccgatcttaaatgccatccagtggcatctgccccaggtacactaatacatgggtcctgcttctctctgcagccgcctctctcctcagatttcaggttttgtgtattgtttgttttctctctgacatcaacacagatatgttgaaggttttcttttttttatttgtagttgttcagctttgttgttaatgaggtcagaataagctcatagtttacacatttttacattcccatgccgagtagctgcttttctctatcaaatccattaactgagagaacaatcacatttcgttacaggtgaacagttaaatagtttggcatatatttctgtgctggaatctaatgcagcttgaaatcaagtcatgcctcactcattgaaaaaaacatggctaaattctcaaagaattgtgctgagtgaaagaaactaaggaatgaagagtaaattttatatgatacatttgtagaaattttagaagatgccactattataaattaacatggagaagatttatatgtttctgagaatatgctattgggagtaatggggatgtgagttaaatttcagaggaataagagaaagatttagggattaatttattcacaccttgattgaagtgctgagtaaatggttgcacacataggtctacatttttcaaatcattcaccataaatttgaattatttattaattacactcgaataaagcaataaagaaactgatgagataatatttgtctgaattgcagcaataaatagatcgatattaacacaaggaatataactgacttccccaaacatacacatgtgccgtggttcactctgcgtatttaggtaaataacagagagttgtcataacagatggggaatcctgcagacttcactaggcatgggccatactcccctggagttgtctcaggggagctgcctcctccagaggttagagcacaggcccaggtaataggactaaatttttagatgtgttatcttagacacactgcacacctgctgtgttctctatgtaaattatctcctgtaaaatataacattgaagcctgcattaaatatattgtgtaaatatgtaagaataaaagaaagttatgagagctaagtgttaatcaaggcacaagcatataagatataactatattttcctgaatgatggaattactaccagtctcccccaggacacttcatctgccctgagcccagcctctcctcagatgtcccacccagagcttgctatatagtgggggacatgcaaatagggccctccctctactgatgaaaaccagcccagccctgaccctgcagctctgggagaggagcccagcactagaagtcggcggtgtttccattcggtgatcagcactgaacacagaggactcaccatggagtttgggctgagctgggttttcctcgttgctcttttaagaggtgattcatggagaaatagagagactgagtgtgagtgaacatgagtgagaaaaactggatttgtgtggcattttctgataacggtgtccttctgtttgcaggtgtccagtgtcaggtgcagctggtggagtctgggggaggcgtggtccagcctgggaggtccctgagactctcctgtgcagcctctggattcaccttcagtagctatggcatgcactgggtccgccaggctccaggcaaggggctggagtgggtggcagttatatcatatgatggaagtaataaatactatgcagactccgtgaagggccgattcaccatctccagagacaattccaagaacacgctgtatctgcaaatgaacagcctgagagctgaggacacggctgtgtattactgtgcgagagacacagtgaggggaagtcattgtgcgcccagacacaaacctccctgcaggaacgctggcgggaaatcagcggcagggggcgctcaggagccactgatcagagtcagccctggaggcaggtgcagatggaggctgtttcctgtcaggatgtgggactttgtcttcttctgacagttccccagggaacctcttaaatttagaaaactgtgcctaacaatgtcttctctatgcatatgaggaccttttctccctggcacaaaatgcagattgacgctgacacggatgaaaattcctcaaccatggtcacaaggatcagagtcctgagtaacctcagggcttcctggtgagtcttctccaatcagacccaggacagggacctccgtgagattccctgactggaacagtctttatggatcctggtcacagacaatagagaggctgaaccagggtcagcgtcatgtagaacctcacagatttcacgtctgatccttctcctgacacgaaagtatgcaaatcagtatcagcaccgatctggtgcttcttttgttcctaatccatttactttcttttttcgtcgtttttctcctttttccatttgtttttcctgctttttgcaaaaggaagatgttttccctgtgagatgcaggggatgacaattttgggagatggctggaacatccaatatcctcagggccggccatcagtaagtgcaggctggaagtctcagaaagagctgaagctgcttaatcaccgtggagttttaccttctccagttctgctctgatggaatcagggccaagcaggttatcaatgataatctacctaacatagagtcaaccgattccagtttcaataacgtctgttaaaaattcacaccaccacctggattagtgttttgtcaaatcaatacacagtattgtccagctaagtagacccaaagacggaccgttgcccatggagaaaaacattaacctgagttctaggttcttacagtgttaaaggtgtaaaactgattattaaaaatgaggctatttttctttttgctgttgagttgtagaagtttcttttccatttggacattaaaactttttgagatatatggcatattatccaattctgtaagttgtagttacttggttgctttgcagaatctttttcataatctattcccacttgttcaattctgctttttttttgtaggtgatttgaatgtaaaatccagaaaaagattgctaattttttgagggttgagagttttacaattacaggtattaaagttagacccttgaggcatttggagtgaatttttgtgtttattctaacctaaaattcttaattcttttcatgggaaaatccagttttcataccaccctctttggaagacactacaatttagccatgttatattgatggttctcatgctaaaaatcagctcgtcatcaatatgtgggtttatatctaagctctgtataggtatttatgccaaaactttctatgtttctaacaaatgttaaggcctggaagtgaaatgcctaaagcttgcattcttgccttgttacagatattggaccaaaatattctaaccttttactattgagtgtaataatagctgtggcctttcttaacggcttttattatgttcaagttgttttcttgtcttcctactttgttcatagtttttataatgaaactgatttttttcaaagtctttttctgtgtctgatgaaatgttactgaggtattttttctttagttttttaatgtggtgtaccaaattggttgatttgagaatgttgaatcaagtatgcatctcaggaagaaatttgagttggtcatggtgtatgtcttctaaaacactttggagcttagtttactattgttggggattaattcatgtctactaatgatattggtctgtagttttcttttattgtggtgcctttgtctattactggtaatactatcatggtagcctcatagaaagagtttagaagatatatggcagactacctttaaaatagattttatcagtggagaaatggtgatagttttttcttcacttttctgttgggaagaattttatgttgtttaaaagatattcagaatgacttaacctggtttatgagctttcattctattcctttcttccattctttttgaagaactgcttaccttttccttttaatttttaagtttgtttttagacatatgcaatacattttgaggtgaaacctggtggaattttttctaataaattagaaaaaaataaatcatttaattgactattttattcaggttgatttgtttaatatttgctaaaggccagttctttaagctatgacacataataaatcccaaatggcagtacctcattgtttacttagcttttgtacttatatttctcagaggaagaaccactactgtaaattgtaaatagccaatacataattgtattgtatgcaaatctgtgactgtttacagtgtcatctctgagaaacataaagtttatttactatatatatataaagagtttggaaggtggactcctcaccaatttttgaaagagttacagaagggctggcattacttctttaaatgttaaggttcattttatgatgtgacatataacccatcatggagaatgttcaatgtgttcttgagaaggatgtgtattacgtgactcttggttggaaggttctgtaaatatcattcagataaatttgttcaatagtgttgttcaagttcagaggcacattaggaattttctttccggatttgctatacattatggtcatgaggtattaaggtcttgtgttatttttgtattgttttctatttctttatatctcttacagtttgcttaatgcagttatatttgtatttgtacacatgtgtaaaaacaaaaatcataattgctaaatgagttttatggcacagtcacattataagtaatatttttccaaatgctaccattgccactaaactcctcctggagtctgacgtctgctttgggcactgccttcttctcaggcatcccacactggagcttgctatagaggaggagggagggcccctctcctggtgaaaacaagcccagacctgaccctgcagctctgggagaagagccacagccctgggattcccaggggtttccatttggtaatcaggactgaacacagagaactcactatggggtgtgaattaagctgaatttttcttgttggtattttaaaaggtaactcatagggaactagagtgagtgagagtgagtggatatgagtgagagaaacagtggatatgtttgccagtttctgaccaggatttgtttgtattttcaggtgttcagtgtgaggtggagctgatagagcccacagaggacctgagacaacctgggaagttcctgagactctcctgtgtagcctctagattcgccttcagtagcttctgaatgagcccagttcaccagtctgcaggcaaggggctggagtgagtaatagatataaaagatgatggaagtcagatacaccatgcagactctgtgaagggcagattctccatctccaaagacaatgctaagaactctctgtatctgcaaatgaacagtcagagaactgaggacatggctgtgtatggctgtacataaggttccaagtgaggaaacatcggtgtgagtccagacacaaaatttcctgcaaaaagaagaaaggagtctgggccaaaggggacactcagcactcacaaaacaggtgcagccccaaggcaggtgcagatggagggagggtaagggctgctttccttcaggatctgtggtttcctctgcttctaatatttcccctctgagcctctgtacatttatattttgtgcccaccatgaggtcgctggattagaaaactaatttgaaagaggaaatattctcatatgtcctaaaaacagatgtaagtattggaggcataaaaatgcataggagccgggtgtgtctgtagacactgccacccccaatgccagacccacaactagtgctggagaagggtgggagtttgatggagcttccctgatgaccccgtggtccaagctaagtccagcaaggccattggtgcctcgctgagcacagttgtccatcagggatctcccatgtgtcccagcagcagccatgcctcaatctctccactgtgcacagccattgtctgggaggagctcccaggatgggtgtctttggcacacacagttgatgggtgttagagtgcagtgcagcagctggctgcctggtctattgggctcctggatattggagggatttgaggtgcattctcagggccagcacgctttgtcaatttttatatgaaaaccatgtgatttaattcattttctcagatgacatagataattaataacacaatctgcaaacaattataattttcaactttaccccaagttcattgtttctgaattctgtgcaggatccagacatggtactgcccttctcatgagaaactgttcgatctaaactgaaaccagttgtttctcgtatactttggttctccccacatgcagagatcttgattagagcaagtttggtactttccacgcactcaccctcacctccccagataaagagcagaagttctccttagactgagtctgagggaggagctgttcctgtaccactcagggcctgcggagacccccaggtgcagcttcactgagtcaggtgtttcactccctgtgattgctgctcaggtctaattgtggctcggaattaggacagtcttcacgttatcacacgtcaatcatattctaaaaatcatcgttatcacacaccatggtaacaattcaaggttcatttttctaacggcagtttctcttttttatttggttgcaagtttgaggaaaggaacatgtgataatactttttaacctaacctcgaaatctactgaattgttctaggagactcacaaattggacaaagtgagctctttattctcataaaaatgtgtggttttgggaatttcactgtgttgcccagaacctgttaacatcaacaactatgtttctcagcacacttctggcttgagactccttgcagaccctctcctcacctgcactgtctctggattccccatcataaccagtgtttcctgctagaattgtatctgcttgcccctagaagatggacaggagtggatcaggtgcatgggttgtgaagggagcacaaattacaacccactgctcaagagtccatatccagatccaagaaacagttcttacagctgagctctgtgcccagtgaacacacaactacgcatttttaagcaaaagacgcaatgaagggccttcattgtgagcctagacacaaccctccctgcaggggtgaataggagcagcagggggcattcggggcagtatgggggcttaggatgattgttaggggtcaggatgagcaggatcaagttcgcatcagggcaagtgcaacagggcagaaaaggggctgtagatgtgggttgttctcaccataatatttcaccaccagacaccctccaatacatctcttataatgtgtcggagtgttgatatgattagaaaatggcatttatgtaaatactaatatgtacccatatggaggtgcatccagttgtcttctccatctgaggaggaccttgtccatcaagcactaagtccctgtatttacttgagtacctcacacattatggtcaaaacaggtagggtctccttttggcatggtctctcctcctgccttctctcttctgtcacacaaaaacacgtgaactgacacacacacagagcttcccaactttaattatgtgatgtattgaagcaaattgattagtgtgcagcttttctgctttgcctgctattcatgttatgtaaaaataagaaccatgttttctcagcttgtcacttctctaagctaagtagcatctttgtttattatacccagagaccaaaagcgatccaactgttattcagcagcttaactggtaaacaaattgtggaaaaatcacttactggaatcatacccactgctacaatcaagtaatgctggatacacccaacaccatgcttaaaatagcaagtacttgaataagtaaaataagtcagacaaataaaagtgcatacatacgattccacttctataatttctataaagtaaaaatgaacttaaagttacataaaaagatctgtagttgactggggacatggtacaagaagagaaggtatagaaaggagaaactacaggagaacaaaaggaaatttctaggataattgatttttttctctgttagtaaaagtgaggattatgtcaatatttgtaaaattgtacactttatgtaaagattcttatttgctaatttcacctcattaaaatattgcaattttttaaatgtctagtttggtagaaaaggtagtagagagagatgaataaaatacataaaaatcagagagtcctgaatacacacatgaatggaccctgggtctcactgtacttttagggagacactagaatacaaaaacataatgacaggatttcagtacatgaaaggagcttctcagaccccaggaggcctgtccaactgcgtctgggagttaactcagggagcaggcatgtcctttggaaggagccgtgacaccaagctcccagcatccattgtagccgacaccatgccaatgccaagagatctcaactaaaattttctgtggatgttgagtctgattatgccacacactcacaccaagtgagtatggaaaggatagttacctgcatccttaaggtgtctgctgagagcagggcaggtctctcattaaggtccaaagtggcttgatagggcagggaaggagactggctcagggttgttatcatggtttggtggggagcggggcagagcatcctacttgcaggaagggttttgtggggtttcaaggccaaattggcatcaaatgagggagctcctgtgatttctaactagatttaccttgtatgcttaaaaaaagagatgatggaggaatgagcctgaagttatcagcagtcaggcctaaacacagagtctgatgacttactctaaatagcaagtatacaaatgatgagtaagaaaagagacaagactccaatatgggtggacaacagccaggtctgcagaaaatgagaagactgtttataagcaaagaataatgagtaggatatggaggaggattctggtccaatgtcttgtgtggaagcttctcatgatttgagatcatcagcttattctgaaggtcttaggtcacctgtcttcttcaaaatatcagaagtgcctgatgatatgtgaggatgcgcagtttaacttcctctatttgagtagctttacaattgtgtaaaattcttaattaattaatttttttttgagacggagtctcactctcttgtgcaggttggactgcagtggtgtgatcataacatagctcacggtgattttaaattcctggctcatagaatcctcccacctcaacctcctgactagcaagtagctaggtttccagggcccttcatctacacttggccggttctttacattctttttttttttttttttaggtggagtttccctcttcttgcccagaccggagtgcaatggcgccatctcagctcactgcaatctccccctcccaggttcaggtgattctcctacctcagcctccagagtagctgggatcacaggcatgtgacaccatgccccgctaattttgtatttttagtagagatgacgtttctccatgttggtcaggctggtctcaaactccctacctcaggtgatccttccacctcagcctcccaaagtgctggaattacaggcgtgaggcaccacacctggcctcttcgtttttattcatatattccttcagcagccactatgtcttcccactgatttcttcagtttctgccttttccttttgaataaggctgttactcctgagggaagatgggaggtgggcctggacagggacttggtgcattcctctctcccctcccagttcttattggtttctccagtgtctgtagaacagtggttttgatggctttacctctgcagataatttctcttgcaatgtagtggtgatggggaggtgtgtctggatgcatttcagctgtagttgctgttttgctttcccagacagcaccatcccaaggggtagaggctggagcattttgtgatgtatccccagtactgaagaaaaaggcttcaatagcaggaggaattcctcaactgcatacactctgagaatttaaacaataacttctctatcacactcaaattgaaaccacccaatgaatatgtctactttaatcgtgtgctaacttaaatgacatttggcagcctctgtcccagaaaagattatcatctgctcctgtttatttccctgcaagtctttatgtctgttcagatttcagatatattgtttgtcctataacatcaaaaatttgatgtatatatgctaatttgcagatcagtaagtttagtatttgttataagaatagtaacatatttttatggggtgcttacatctccaagctgagaagcacctctgtgtaatactaagcaactagaaatggtacaaataccaagaagatacatagataaacagtaatggcatgctaatttatggtaataacatccatcattagaatcaatacattgttgatgctcaacatgtgtgcatcataagtagttatgtgcgagaagccacacaaataaaacacatactatgtaattcctgtataataaattctcgaaactcaaaactaaggtattaaatgtgaaggactgactcagaatatggtggaggaagaaaataattgggaaggaggaattgtagaggaacacaaggaaacttttaagtgtaatttgtttattcattatttggatggcttttggggatgcacaggtgagcacgagtggaataacattttgttttgtttgtttgtttgtttttttctgaagagatgtggtcctactctgcgacccaggctggagtgtagtggtgggatcatagttcaatgtagcctccaacttctggtctccaacaatactcctgcatctgccatctaagtagctggaactaccgttgtttgccagcaggcttggcttgagtacttattaaaccgcacactttttgcaatatttaatgtatagtaataatgtctcaataagactattacaaatcaatgaatgaataatttgttctgtacagatttatggaaaaatagacactaacatgatgaatgactgacatttatgaaaatacagctgcatgaaatgtgcttctctttacattcattaggtaaacacataggtgcatacacatcacaccgcgctttcattacaggaagaaacatctgaaaatgtcactggggtgaaccatattgtgctgggcttggttcaggaagcagtcaggcccagtgttgtgaccttcaaccacagaatcctaaaaaataataaaagaggctcccccaaagtccccatcagttcctggactcgccatgtgtctgggccgtatcagtgcatccggagctccctggtggctttagggattccttgcttgccatgctgaggtctcgctgtagattatgttgggttttctgaggccgttttgctatttaagacccactccctggcacagagcgattccctctaaacctgatagaggttctgaactacaaataacgttaagtgaatcctggtgtgtctgaactcacatgattgttacattaagctgctgttgcaatctgtttcctcacctgggaaaagaggagccaggacatagtgagttgaggccccaggaagataactgaattctcagagggcacaaccagcatcctccttccagggagagcctaaaagactggggcctccctcatcccttttcacctctccatacagaggcaccacccacatgcaaatctcacttaggcacccaagggaaaccatcacacatttccttaaattcagggtcctgctcacatgggaaatactttctgagagtcctggacctcctgtgcaagaacatgaaacacctgtggttcttcctcctgctggtggcagctcccagatgtgagtgtctcaaggctgcagacatggagatatgggaggtgcctctgagcccagggctcactgtgggtctctctgttcacagtggtcctgtcccaggtgcagctgcaggagtcgggcccaggactggtgaagccttcggacaccctgtccctcacctgcgctgtctctggttactccatcagcagtagtaactggtggggctggatccggcagcccccagggaagggactggagtggattgggtacatctattatagtgggagcacctactacaacccgtccctcaagagtcgagtcaccatgtcagtagacacgtccaagaaccagttctccctgaagctgagctctgtgaccgccgtggacacggccgtgtattactgtgcgagaaacacagtgaggggaggtgagtgtgagcccagacacaaacctccctgcagggaggcggaggagccggcgcaggtgctgctcaggacgagcagggggcgcgcggggcccacagagcaggaggccgggtcaggagcaggtgcagggagggcggggcttcctcatcagctcagtggtctccctcctccccagcacctcagctgtccccaggactcctctttctttattatctgtggttctacttcctcacatccttgctgcaggttttaacagtcactggcacccttttttcaacaaattcccacaaggcccattttaccttcttgacaagcaaaatattctaaggcttctcactatcccttgattggcgtcatctactgcatcgtgtctttctcttaaattcatgtgatgaaaccccaatcccagtggctctgtattggacagagggattttaagagggcaaataagttaactgtggccataaatgtgggaccctaatccagtaggactcttgtccttatgagaagtggaagacatcagaggcctctctctccacatgcacacagaggagagtccatgtggggatgcgctgcatgagaaggtggccctttgcaagcctggaagaggcctctcaaaaaacttaccctttctgcacccagatcttggacgtcaagactccagaacaataagaaaattaatatttgttatttgaaatagcctagtctgtggtatcttctcatggaaagccaagtagattcagagattcaattgtgttagctccgtctcctgcatggagtagcagcccaccgaggctggacacatctctcaaattattttcataaagaaaaatagatccaagatgaaaaccccaccacatttctgctgagccattcacttagcagcagtctctgagatcagccctgggggtatgttctaggtcgtgtatctcactttccactatgagaatccatgtagataatgagaaccagccagatggagtcctgatccctgcccaccttctgcttccccccaagtgacacacggtcacagaaaaccactccagcatcaccctgtgtcttgtactctctaaaatcccactaaagctgaccctaaactaggagctatttggggctggactcattctgttcttagtcttccataaggtccaggtgccgagtagagcctcagtaaagagtgagcttcaattcccctaacccacatcattcccttacatccttgtcatgcacctgtcctctgcaggcacccagggcaggttacacaggaattgcctgaagctggtctcaggtgccctgctgagaccactggttatgcacacgtatgatttcaggtcatgcaggctcttctgcaggacagacctgtgtcctgtagagcacagacacttggtgacccaggccctcctctaataactcatacatctcatgtcagtgtatatccaggtgccccctcagtgcagcacactagggtgattaccctcacaggtggctttttcaggcggtgaacagaaaatggggtgggcacgctggtcattcccatcatcggtgatatccaagtgaattttaaataaatgaaacaaaactaacaacaaaggggaaggatatgtacctgtatctgggaggtagactgggtcccagaactgtactgggagtgggtgtgaaaggcccttttgtgtgggaagccctccagcatgagtgaaagctgaaggaatgatcactgtaggtggagcctgatggagaagctggcagggtacatttcctgaagctgttcccgggtgcgtgatggttcaatggcccatgtacatgaagaggagggctggactcatgtaggatcaaggaaactaccccatggcaatggaagaaaagaaaatggagatggacacccctggaggcagcttattagctttggtggaggaacgatgggaatttattccaatgaccccagcatcttcagctaaatatgagttgcattaacagacagaattatgaagggaagggagaaggagtttatagagggaaaaagcagaacagaaaaaaagaactacacaagtctatcaaatggcagatgacagagtgtagctgatgcagctacaccacacttcccggaacctaccagagaccttgacacccctgtaaggcaggtctagtggtgatgcacttgtccactttttgctttttggagaaacgtttgaaacatcctacattactgaagaaaagctttaattagtgtaatatttttacttgacagttttattggttttgttttattttcagcaacttgaatagaatcatgcacatcatgatatttgggtgaacaacaggccacatacacgataatgatctcattaaattataatactgtattttcactgcatttcttccatacttagatatgttcatatatatacatacctaccatggtgattcaactgcccacagtattcactacacttacatgatgtacagatttgttatctaggagcactatgctatcccacacagcctgggtgtagcagggtatttcacgtatgttcacgtaaacacactctatgatcctcgcatgatgacaaattgcctaaggacacattgctcagatgtatccctactgttaagctacacatcattgtatctcatctctctccatttttggtctctgataaaattctcgtgttgtttttgcattcttctctgagctcattgaacacatttataaggtttcctttgaattttctgccaggtaatcaatatacctccttttaatttgtgtcagtttctagtgctttgctttgttacagaatttggactgctttttttctctttcattattattatcactttgtacattctctgttgctttctgctcattagaaggaaaagccatggtaaccactcttcacagaatatgctcagggcaaatgccatcacctgttagcccagtccatgatagtggtgtctcttaaaatttcatactggtccaaactttttgttgttgttgttagtggcactcagacctatagaggattttaagttttcccctactctaaattaggtggcatcaaaattcatcctgcaggcagtctctgataaagtggagaaattggacaaagttttagcatgtatatggttcataaaaataatatgagtttaaggttttctcagccagttgctacatattgatattttataatcatttctttgaatgtctctggagtttatcttttgaaaatttagatcagaatatataccaggtttgaggcttcttgtctggcttaacgatctcctataggtcagcgtgtgaaaaggcacagagtctatctgaagaggagaactcagggaagccccaaaacaacagaggagacaaaactgaggactttgaggaatctaaagcttctgggacctgcagcctccagacatgctcagcaccctcttgttatccacggactaatttctttctcttttctgagtggtattttctagggttcccgtcctccactttgacactttggtatgtccatgtgtgtccattgtgtttcagccagggacacagaaccaggaaaacatcatggcttttctagagggagctgacctgggtaatcaacagttggagtagaaagtgcctttgtccatgtgtcacaggcctaagggccatgggcaggaggtcaggaagagaggatgaccagacggctggggaaaccaggatgaacaaagccactctccttcctggtgagaaggggcatgtggaagcctggtgtccctgtagggctgaaccacactcacctgcccactgctacctgccagcgaggtgacccacagagcagcagcagctcctgagtcactcacagaggctgcctcctcctccaaaccctccagtgtatgtgcttccataagtgtgagccccagcagatcccaaagttttcaatgggttcatctagctagtgtctgtcctcagccccatccccaggctcctgccctggttggtgtccacagtgtcccagcagcggtgacagtgacagccagggcctgcactttccagagcagcaagtttggaagaatcaagtcccagaaccagcctggatttggggcaaacacacaaatttcactctgaggggaagtgctggaaagtagccttgagtcttcctcagctcacctgtggctgatcctctgcatcccatcagcgatacatgagccctccccaaccccagcgtggagctgtttcaatcgcagcaggatgggaatgtgtcttctttctggggactttttaagcacagctcttatgttcctgagatttgaggtttataaaggtgtgtcagtcacccacagagtggacctgcacaagtaagacaaggacaggatccccaggagaggcacctcatatgagacgggacaggcaggtcccatcacagacactggtcctcagaaaccctgaccagctactcaccttcccaggtcacctgtgtgtgatcagttcctgtgtttgctcctgaaaagatccccatcaagggtccccaggtcctgcccccttccttgatgtgcctctgggagtggggctggctgggctgtgggtctgctgtgactttccccacaggtcagcggctcagtgcaggctgcgccaactcggtggggctgggctgtggccgaccctcccagggggagcctggatgcttctcgggggcatctgcaggatcccaggttctgggagaacagggaagccacagtgtgtgcagggccccatctccaggtgtaaagtgtttgctgtcactctgttgacaagggcatatccccaggcgcaggggcactgtgggtgcacaaccaatgtggtagacacagagagtgaggcacatatccctcccattactgtggggaatataggcactgtgtgtgtgtgtgtgtgtgtgtgtgtgtgtgtgtattaggagttttgcagtgggctctgagccccgtgattttgtaggtttagaaattatctgatgagatgttcatccacaggaaccgacaagagattaggtgttctcccaaagcccctgggagctcctggactcattgtgagtgtggactgatccattgcttccagagctccacagaaggggctccctggtggtttcatagaatccttgcttggggtctttctgcagagttcactggctttcctacggccagtttagtattgtaagagatggtgtcagcagcacatggtatcacatgtcactaaatgagcattctgagccaggacacagcatcttcatactggggggagggaaatgctttgggagcccagacaggagcctctctgcagtgcaagggctgggctgcagggggcgctcaaggcccacccatcacaggctccacccccagagcaggtgcaccggaggctggggagggattcctctcaagatctgtgtcattcttctaaaaaaaatctaaaatgagtatttgacaaagactgctgaacattctataaatatcctattcaattgtgagcatttatcaaatttgatgttgtaatgagaaccacttttatactagatatttctaaccctgctagatatcttaatagtatgcagctggaggttaagcaagcttttcttttatataaataagtgcaactttggagaaacacactcatcccccgaataagacattcatgtattaaagcctagaaatactttaaattacctctgagccattcaagtgtgtgttcacagtgaagtcctgttctagggaaaattgttctccagggggagaagctttgtcaacatagagcttagggatgtatcaggaggcacatgacctctaaggggattatagcttgaacccttagcatcctcctgttggtaatacatgtgtcactctccaatctttctcatgcagtatcaggtatgaaataggatcgctcatgaatatgcaaataactgaggtaaatatagatatctttgtgccttgagagcatcatccaacaaccacaactctcctcagaagaagcccctagaccacagcacctcaacatgtactggacctggaggatcctcttcttggtggcagcagcaacaggtaagggacctcccagtcaccgggctgagagagaaaccaggccagtcaagtgagacttcacgcactcctgtctcctctccacaggtgtccactcacaggtgcagctggtgcagtctgggcctgaggtgaagaagcctggagcctcattgaaggtttcctgcaaggcttctggatacaccttcacaagctatgctatcagctgggtatgacaggcccatggacaagggcttgaggaaatgggatggatcaacaccaacactgggaacctaacgtatgcccagggcttcacaggacggtttgtcttctccatggacacctccgtcagcatggcatatcttcatatcagcagcctaaaggctgaggacacgtgcaagaggcacagtgtggaaacccacatcctgagagaaccagaaatcctgagggaggaggcagctgtgctgagctgaggcagtgacagggacaacgtggctgcaccctttgttgacatagggttatacacatacatatatatgcacccaacactggagcacccaggtatatcaagcaaatacaattagagataaacagagagatagacccaataccataatagctggagactttaacaccccactttcagcattggacagatcttccagacagaaaattaacaatgaaatcttagactaaatctgcatgacagaccaagtggacataatggatattgatggaacacttcatccaatggctgcagagtacacaatcttttcctaagcatatggatcattctcagggatagaccacatagtagaccagaaaatttgtcatttttaattaaaaagatatcatgtaccttctctgatagtaatgaaagaaaactaaaataataagaggaattttgaaaacacatggaaattaaacagtatcctccttaattaaacaatgtgcttccaaactgaactatatgctctaaaatgggttaataaagaaacaaacaagaaaattttacaatttattgaaagaaatgataatgaaaacacagcgtatgaacacctatgaaatacagtgaacatagtactaagaggaaagttcacagctataagcacctatgttaaaaaagtagacaattataacataaacatcttaggaatatctctcaaaaaaaactagaaaagcaagagcaaatcaaaatccaaacatagtaaaataaaaaagttaagatcagaacgttaataaataaaattgaaataaataaaacaataccaaagatcgatcaaatgaaaagttgttttttaaaaagataaaagacatctataaacctttaaccagaccaagaaaaaaaacaaagaagaccaaagtaaataaaatcagaaagaaaactggaaatattacaaccaatagtgcagaaaatcaaaggatcattagaggctactaggagcaactaaatgccaataaatcgaaatatctggaagaaaaggataaatttagagacacatacaacctaccaagattgagccaggaagaaattgaacaggatcagtaacaagtagtgagagtgaagccataataaaaggtctcccagcaaagaaaaaacccgggacttgatgacttcatcactcaattatgacaaacatttaaagaagagataatacctaatctcactcaaaatattccaaaaatagataaaaagtagataaggaagggaagaattcttccaaacttactgtacaaggccaatgttacccttatatgaaaaccagataaagccataccaaaaaaaaaagaaaactacagttcaatatcactaatgaatatggatgcaaaactcctcaaggaattcttagcaaaccaaattcaataacatatcaaaagagcattcatcatgaccaagtgtgggttatcccagagatgcaaggatggttcaacctatgcaaatcaatcaatgtgacacatcgtatcaacagaatgaagggcagaagacgtaagatcaggccttaccttgttctcctcactcaaagtctaccattagttctttggtcctcttgaccagtcctgctgtacttggtctcccgtgattctgttcccaggtcctgaaacactgggcttctgcacacctggagtctctctctttgaacatggagaccctgtatcctcagagagggatgatgcctcattgtggctcccatgccccatgcaaacaattcttccaacacagtcatgatttttcctgttggaaattgaaaggggatgtgggaattgatgtgtgtgtgtgtgtgtgtgtcctcaggcctgttgggcctgttgagaacacagcagggctctatgtacaacaggaaagcaatgttttctctataccatctattttcttataaagtgttcataggtaatcaaaaggaaatgaatcacagtttataagatgttgtggactggactgatgttgtcactcaaggctactatgggggctccaggaaaagaaacctagaaaaggataagactgtgagcaaagaagcaaaacctgggaagcagcagggagagggtgagcaggggtgactcaactggggagggataacaccacttaccacagagggtgaaaactccgtgctcagcaaagaggagaacttactcagcatttcccctaatcctccctccagaagcgcgactgccaggaaagttcacaatgtatcatctccagctgggaacccaaaagaaacaggagattttagggcataggtcctgggcacaaggtgtttccctggttcctaccccttccctctctgtccagcaaaactgcttgtttctatcacttgccttcctgtccttggggtaagaatggatgctttgacactcagcagagggatgctctttcagaggaggaatgagtttgtgttatctgatgtctgagcaggacactcacctctgggaagaggctccaagacagaaggtcgccgtggttcctgccccttatatgtgaggggctcttgacacatgcacacttttcctcaaactctgtttataccccagcaacaatgctgggtgttgtcagcctctctcctccccagatactgctctatcatcagcttgagcacagtttccccatgaaaggcattattctctctctcaagaagatcaactttttacatgtcttcgatggatgacagtttctctgtgtgagaatctagaaataagaaatggggtaatggggacaagtgagctctctgtgtgactcactaggaagtccactgttattccaggtgtcctgtcccaggtgcagctgcaggagtcaggtccaggacccatgaggccctcagacactgccctctgcctgtgctgtgtctggattcttttttttaccatggatattatttgagatgaatccaccatcccgtgggcaacaggctggaatggctggggcacagttactagactggatcatcaaggaatacacatcatgcaccctccacccaggtccatgtccccatcaacagtgactcaaccaagagccagttctctgtgaagctcagctccatgaccacctaggacacggctgagtattactgtgaaagactcagtgaggaggtgtccttatgagccctgacacaaacctgtcagggcacttaggacctccaggaagactcaagaccaccaaggggactcacgaccacttggggaagggcaggttgcagtaagcacagggccagccccagagcaggtgcaggtggagatgagaggctggtttactgtcagggtctggggctgcttctccatttagatgtttccttcagagaccctcccttatttcatgatgctctgcttagctgtaagtctctgaaatatcacagttttgttgtaccaggaggaaaccttctctcaggtgctaaatgtagaacaatctctctgccagtggttgccagggtcacagccctgtggaagctgaagggtacccagtgagtcttctccagtcacattcaggacaggaaccttagtggggttccctgaggagaacagtctttaggaattctaacctcagccaagagaggctgggccagggtcagtgtcaggtagaacctcacaggatttacgtctgaccctcctcctgacactaaagcatgcaaatcagtatcagcactgatctggggcccctttggctcctagcccattctatttcttgttagttgtcttggttgttgattttcctttgggtgttcctgatccctgtaaagtggagacgtggttcctgctgtaaaaattccagggcctcaagccctttccctgcagctcaggtggggctcagactgtggctcctgcaaccacgtgggagaggctgatgggactatcttctctcccgttgctcagaaccctccagtgtgttgtgtggagactcacctgggaatgcaagtggccaatagttgtgaaaggtatgcgcttgtttggtcaaagtggaatgtggatgtggaatttatcctgtgttgtgcaaactaacacaggttcaccttcctcacctgtagtgttagaaagagtgtgaaagttgtaagaatcaaaacagagccacttgtgttaacaccctgacaaatggacctaggaatgaacatgaaggagggttcttaggcccatattcctgataacaaaaactatcataaatagactctgcttagccaccatcttggatagaagcccaccacaaccttattaaaaattacacttgcaagaacatcagctcagaaactggctgttcaaccttacactgatgccaccattgctattgattctacaactatatgataattatctcaaaacaacttttgtgacccacctcattttcacttcataaacctgtggattgacatgttggagttactgctgcatttgtagataatgataaataataaggccttttaacaatgtttgaagctgctattctctgatatctcttctaaaataaagaatttccaagtggatgacaatgaaaaaattgttagaaatatttggtggtaaggcatctttaacatcctgttgaatgtttctgcatagcacatcaatcccttaaaatactttgctatatctgcatttaatgaatgagtctaatattgaggtgcaattgaaaatacctgggcctttgatgaatcagctcatagggtgataatgtctgggtccttgagaaagcagaccctgtgttgtaagttttagtagaagtaccttttgcaaagaaagttcatgtgtttctgaacattatgctacttttaacttaagaatgcaatatatgatttatttttacttcaaactgggtatatacccagtaatgggatcgctgggtcaaatggtatttctagttgtagctccttgaggaatcaccacaatgtcttccacaatggttgaactaattttcactcccaccaacagtataaaaatgttcctatttctccacatcctctctagcagctgttgtttcctgacttggtaatgatcaccattctaactggaatgagatggtatctcatcgtggttttgatttgcatttctctaatgactagtgatgctgaacattttttcatttgtctgttggctgcataaatatcttgttttgagaagtgtctgttcatatcctttgcccactttctgatggggctgtttgttttttccttgtaaatttgtttaagttctttgtagattctggatattagccctttgtcagatgggtagaatgcaaaaattttctccgattctgtaggttgactgttcactctgctgatagtttcttttgctgtgcagaagctccttagtttacttagatcccatttgtctattttagattttgttgtgattcatacttggttaatttttaattgcattgttttcttctgattagttgtaagtatacctgcatattgatcaaaaaagccgtttaacaaatcaaaaggaaacatttaacaaatacgtgacttggaagtattttctccaagtctgttgttgtcttttactcccttgtcagtgtgtattgcagaaaaatatgtatgtgtgtgtgtgtgtgtttacaaattaaagaaacaggtataatttcatttatccatagatcacgtctttggcattacatctgaaatctcatcataaaatatactaatagtgatttttttttccatgtctctaatctcaggccacaatctactcatgagtgtttaaacatcacctacttgattagaggactatcaccctaagatatttggaatatttctggaaggagatgtgttctttttcccattatttcctctatttagtcatttattaatatccgtattggtttatgaatgtctatttcatactctgaagtaaatccatgctatattattcattttattgttcaaatcaccacagctttattatgtgcttggaactcatttagtttggatgctgcatccttacagcacacctcatcattttgtttttgaacactttcctgtttcctggtattacaatacattctaagcccattttctatattaactttttcatacatagaatcagacatttttctaaagattgcttctttctgatgttaaaatatagtattaaaataaaatttgtgatactgggtatatgtgttgttaatgtggtataagtacttttaggacctctcaaccaactggcctagtaaatgtgcatgtttatatgaactcatgtttaaggacacattgaaactatttatgtatcttatattctgtaactttattacattaaaaatgagaatacactggtctcctcacccaactatgttaccaccatatcgacctttctaggcttccttgactgtccataatcacccactgcaaagtgaggaaccccatcccatcatatgccattgtattactagctgcacatttcaggacacatgcattgcagcatcagaaatgtaaagctgtacccttcttggagccatttttatctactagaatagagtgcttatgtgcagtttctttacactttaaacttatagaatttcctcattttcaaagttccttagatcagcaacttcgttttccactttcttcatgaagtcatttcaattacactgtataatttctttatttgaattctgtaaaagccgaaaactacagtcaagtaaacatagagaggatattccaggaatttacagagtgggtatcaaataagttaaaaaggcaatgtttaagaagagtaaaactatttttagtgatatgcgatggttgagacatgacacaattaatttgtctaagctcataattttgtgatgaaaaatataaacctaaatatatacaatttaaaatgatgtttagcagtacattatccctaggatcaaatgcagactgtataaaattatctaataacttatttggtgaggatgccatgagacacatgcaacggaggatgaactaattttccttatttgcatataagatgttgacattcactaaagatctttaatttaaaaaaaaatcaattttctatgtgacccaggttttttcttccagacaagcaaataacccacaggattattttctttccttgattgagaaagattttccccaaacttcagctcagttcaggcatatactgtccctaaatgggcatttaccctcagatgagtccacacacctgtcaacacgtggagtcttctgtcagacaaacacacctttactgatgtggattcttccctcagacaaaaacacatgtccccacatggacactttcctcagactaccatgtatgtccttacatttacgctttcctcagaaaacagacttttcctcatgtggactcttgtctcagacaagcaaatatgtctccatgtgaactcttcactcagataagtacacatatgtccacatttactgtttccctacacaggcacatatattcaatgttgaattgttttgtggcaaaatgatctcaagataatggtaattataaaccccctccctaataaagtgtagatctgtattttttttgttgtaacctaactttgccttattgtcacaaacagtaatttgcagctctaaatgcaccagttagagacaggtgtccattttctctggaaatgtatttttattttcttactggacatatttgttgataatgttgctactatgaagatacctgaacagtatccacattaaagaataaaaaagagtaatgggcagaataaccctgtgcatccagacccagaaatccgttgaccctgccctcccgaaatgaagacacagaggatggatgagcagtgctgagcagtgtacccatgaccacaaacatgaagacatggaaatgtgtccccactcctcctcatgaaaggcagctcatgccctcttccttcaggccctggtatggagccaccccatgtctctgcccttccttagtgtccacaccatggggtctgcactgatctggattcccttctcatccccctcaatattagtgtgccttgtgaatcaggtccagctgtggctgttctcagtctgtttcctctgtattcacagaagtcctgtgtgatgtttactgatggagtcagaaggagaaaaatttaacagcccagcagttcactgagactgtcctgcaaagcctctggtttcgggtttactgggtgcagcatgagcttggtccagcacgcttcacaacaggaattggtgtgggtagcaacagtgagagatcatatgggagttctaagggttactctccatgagtacagataaatcaacattcccaagtgacaccctttcaagtgcagtctaccttacaaggaccaacctgaaagccaagggcaaggccgtatattacagtgagggacacaggggagggaagatctgtctgagcccagacacaaaaatctctgcagagagacaggagggaactgcgtggtagatgctgctcagaaccaccatggggtggccaggaaacaaggggtgcttaggacctctagggagcgctcaggacgccaggggggtgctcagaaccactaggggacgctcaggacactaggtggcgctcaagacaacactgctgcactcatgtcaccacggggtactcagaaccaccagggggcgctcagaaccaccagagggcgctcagaaccaccaggtggcgctcagcaccaccagggggcgctcaggacaccagggggcgctcagaaacactcggggacactcaggacaagagggggtactcagaaccaacagggggcgctcaggaccaccaatggttgctcagaaccacaagggggcgctcaggacataggtggtgctaaagacaacaattctgggctcaggtcaccagggggcgctcagaaccaccaggggacgctcaggacatgcaggttctcttaggaggcagctgcacatcaggagcttcagaggctgtgatttcctttcagaccctggaaattcctgacctggtcaagcaaaagtcttccccaggatgtctgatttttccttttaattccatgatttcttttacctacaaaacactaacttagaacagggatgtaatgcaacttttattgctgcgtattttctgagtaatactagcaatgatctctcgggacaattattaaaataggttatttatatattttaattattaaaaataatactattattaaaatagtaaaattttttaaatcacacttgtaatcccagcacttggggagactgaggcagacagattacttgagctcaggagttttagaacagcctggcaacatggtgagatgctttctatacataaaagaagaaatagctgagattggtgcaaccagctacttaaaaggctgaggagggaggattccttaagcctgggaggttgagcctgcagtgagctatgattgtgcctccacacaccagccttggtgacagagtgagaccctgtcttagaaaaaaaaatgcatatcctcaatacagactatttccatgaatagagttttgtgtttttgtgctgtaatagtcaaacaattgtatatgttttctaacgttaactcagcatatgcatggtgttgttgtttctttttctttcatctgctgtttgtggagaataaacagcactttaaaggctctgtttctccactttgtttggcttccagtgtcctgtttttcagactgtttctccaccttcccttcttctttgaaagccatttatcttcctcagtctccatgcagagaaagaaagtccctttactttctgtcttccaagtctggtgaatcagttcccttcttttcataatcactgaagccaaccaagtttagaagtataacagttctccttagaatacgctcatctacctgcactctctgccctcctcatccttttctaggtccctccagacatcaccctcatcccataccctcccttccttaagtaccacagagtgggctcttcacctcctgctgccctctatgtgctcagccctggggctcactagtcctttgattatgaagtccaaatccctatgtgcttgcacactctcacgccaccctctaggaagctgccattgtgagagagtcctgaaaagcagggctgggtttagttccataatgccatattatgggtcaattagttatcctagtgaacatcctatttaattaatagatagagttaattaaatagagttattcctatttaattctattaaactattaataaattagttattcaatttattaataccaggccaatatttaaaataaataccattgcacgtttaagtgacatatttgacaataattgcatttacatacagttttaccaaaacatgtatcgaagtgtatttgtttttttaaatattggaataggcagacatacacataggaaaacattattttgtactacaatctcaaactgcaaacacaatttaaatgccattaaataattagaataatatgaaacaaatgggcatggtgttttggtgtttaaatatacattcatttcacctgatcatacttatgtgtctttgctgggctgctgtgcatgtatgtgtatttgtatgaccatgaagctttcagatacatcattaaattacataaagtgttaccatgcacttccctcttttaggggacaaagtaaatctttcagggcaatcgcagggaaaatgtgtggttggatcttccacacagagtccctaccatgacattgccaagtagagctatggaagggggctaccaacctccagaccccagaatggtagatccacaggcagcttgcagctcgagtctggaaaagccacaggcacccagctccaacccatgagagcagccttatgggctgcattagggaagtcacaaaggtagggctgcccaaggccttgggcacccacccttgcaccaggtcacaagacatggagtcaatgattattttagagccttaagattgaaggactgtccgactaggttttggccttccataaaaatctttacccaatttttgggccattttctctttttagcataggactcctcacccaatttctgacccatcattgtactttggatgtaaataacttatttttgatttttcagtctcataggtgaaaggaacttttccttgagtctgaactttggattttgaattaatgccaaaacaagttcagattgtcagggaccactggggagggattattgtatattgcaatgtaagaaagacataaggggcagaatgatgtggtctggatgtgtgttttctccaaatcttatgttgaactgtgaaccccagtgttggaggtgaagtctgctgggaggcatggcattaggggcatatccctcatgagttacttcgtgtcatccccttggtgatgaatgagttatcagttcacatgacagctgattgaaagagcctggtaccactcccttctcttatcttcccccctattgtcatgtgacactcttgctccccttcatcttctgccttgactgtaagctttctgaggcactcagcagaaacagatgtcagcaccacacttgctgtacagcctgcacaactgtgagccatataaaacctatgtcctttataaattatccagcctcaggtatttctttacaattcaataatggacaaacaaaaaaattatttaattgtgcagcaaattaggggtgtggaatcattaaaatggacttaacgcctgtaaaggtaaaaacacaaaagtctctctctctctctctctctctctctgtgcccttctctgtgtgtacatacacacacacacacacacacacacacacacacacacacacacacacgctccacgtgaagatgtcatgtgaccaaatagcaatatggtggctgctatgagccaacagtagaagcctcaaaataaaacctatcttgccagcatgtttatctttgaatttccagaattgaggaactgagataaaattaaggttgtgtaagttaccaagtatgattgtttttaatgtttgaactgactaaagagaatttgggatgaagaagtggggttctgatgttacaattatttcaacactgtggaaagtgccttggaattgggttatgtgtaaaaggctggatagttttgacatgcataaagaaatttatatattaagtgtcattctgatagattaaaatgagtagagtgctattggaaactggataaatggtgatctttgttataaagtgacaaaaaaaacttgtctagactatgttgtgatatttagtaaaagagaactttgagcagcaaaattgaatatttagctgagaacatttctaagtaaaatgttgaaagtgtagtttggtttctcctgggcatttataataagaaatagatgaattgaaaatgaaattataagggagaaaatatccaaaacttaaaggcttggaaaattctcaatctatctgtgttgcaaaaatcagaaagtgcgttctgaagagaacagtgagtatgaggctgtaatatcacttgataaagaatttatggtattaaaagagaataaatgcaggttttaaagaacaaggatggagatgagacaaaatggacgaatactgtcagattcttcagatttaagaggatggagctacttggttgcaaatgtgcaccattcttccagaacaaagaaaaataaaccttgaatttatttagaagtaatcatgaccactaccttggtttcaacagaccagaccatccatgcttaaaaccttgaggaaaagacctcctaccactgcctggaacttaggaactcccagtgagccttgtgtgtaggcctgcatggggtctttgggatgggaccttaacccagcagttacccattggtgcctctacttaaagcattggaattaattctgctgctccaatgagctgggaaagaagaagcttggcccagagaagattccacttgagccttaaggtctatggtaatttgttttgttatgtgttgtacttgctggggacacatcacccctcctttcttttctatttttctctttgggggagaaaatgtctattttatgcctaactcaccactgtattttgaaatcaaataacttgtccagagctatggactgaatgtgtatgcaactccaaaattaatattgtggaaccctaatccccagtgtggtgtaattggggtgtgggccatttaggaggtgatcaggtgaaaaggttgaagccgtcataaatgagattagtgctctaataaaaagtcacgggagagcttttctctcttgcttccctgtcatgagatgatacgataaaattacggccatctgcaattcaggaaggaaacctttacatacacatgattggctgtcttgggcttcccagcattcggcactgcacagaataaatatgtcttgttaaagtcatgcactttatgacactttgttaaagcagccccaataaaataagatatctggttttactggctcagagttggagagaaatttgtttcagaaataattctacctcaaatcttactcatgtatggtttagttaatatttaaattatgttttaaacttgtttagagttgatgatgaaatgagttaagagtttggggactgttataatcaaatgaatgaactgcgaatgtgtaaatgccatgcatttgggggatggtcttttctattctgggtctttcatgcctacgtgtgaattgaaggattgcttttcttatttctgtgaagaaggccattattattttgatagataatttatctaatctgtaaataactttgggtagtatgaaaatttcaatactattaattcttccaatccataaatgtggagtatctgggatatatgtcctatttatgtgtgtccatttcattttctattaccaataatttatagttatcctctagaaatctttctcttatttggtaacatttattcctaggtatattttgcagctattgtaaaaggaaaggcttcatggatttcattctcagatgttttgctgtcaacatatagaaatgccaccaattattgtatgtagatgatgaatcttacaactttacttaatttgcttatgaattctaatagtttgtgagaaggctttagttttctttttttaatataagatctttttgtctgctcacaggaaatctgacttccacaattccaaatttgaggtcatttccttttactgttaactaaatactctggctagcatttcagtactattctgaataaaagtgataaaaatggttattttggtcttcttccacttcttagatgaaaatttcccggtttttccatgcttcgtgtgatgaaagctgtgtttttctcatatatgcgctttatttttggagatatccttcttgtatacctaatttttgataatttctatcagaaatgaatgttgaattttattctatgattttctaaaatatcttgactacacaataacacagtaatatgcaggtcaatacatatcaactgaatttcacttaatatcatcccaacttctaatatttattttttagtattagaacatgcctgtttccatattatatttgctcacaggtattggtacatattttagctaatttgtcattattttactctaagaaataactcaaaaaatcatttttattatgaattgaaaggtaacatcggcaaaattagcccaatcttaatctttcccagactttgaaacattattgaagacaatgaaggggaaagtcagctttagttgagcttctaagaggtaagtgaggtaaaaacccagggcttattggctacgactttgaatgttactgtcttcttttccataagccacatccagaccattttctaaatctaagaaaactaattttatctcactgcttcttagtcttgtttcctgcagctgacaaccaaaactgtcagcgatagagcccagtgtaaatcaccagcctttaattattgcagaactatgattttacaacaacattgtgagttacataatgatcctactttatggccgcggtgcaaatgcttaacttccactaaatcacagagctcagaatggctagcatggaggtgtatatgtatatgtgcattgttctagaaatttccaattactgtatattattgtttgcagtaattaggtcaatctgaactgacaaaagtctccatggccttataagcacagagaccacctccacggcaggtggaaatcaaggctgggaacaggctaccagctgctcccctgggattcctccaattaccctgtttaaagcctctgctcactcatgcgctggaagagggatgtcagagatgcagcctactcttcctaaagggctgacagggcataaagacaagactgattatccatggaacattcctataggaatgcacctatgtgcaggcacactaataagctgtgtgtcttgcagtgtgtaaatggctgagatgccatttacacttctttacacaatacatttttaaatgtttgggtgatgtattctctatcattcaaaaaaatcatcactttccccctaaacaaagaggatttttatcagaacacttatgggaagccccttgctctcccagattcccaccctcatttctcctgaaggaagaaagaaaaccatctctattgatttccactctcatcctctaggactaaaaccagaaagctgcatgctccctgggtgagccttagagaagaccctgtctgtaggagcaggaatctcagagccttggctgagaggcatggtcctgaaatgagatggagtcccccatggagatcccacgtggacgcccacacctgagggctcactgctcctcaccacagatgcactcccctactgagtcctgagacctgagtgcaccccatagagtaggactcagatgagggaatgcaaatctccaccagctccaccctcctctgggttcaaaagctgagcacggggcctcgctcagtgactcctgtgccccaccatggacacactttgctacacactcctgctgctgaccaccccttcctgtgagtgctgtggtcagggacttcctcagaagtgaaacatcagttgtctcctttgtgggcttcatcttcttatgtcttctccacaggggtcttgtcccaggtcaccttgaaggagtctggtcctgtgctggtgaaacccacagagaccctcacgctgacctgcaccgtctctgggttctcactcagcaatgctagaatgggtgtgagctggatccgtcagcccccagggaaggccctggagtggcttgcacacattttttcgaatgacgaaaaatcctacagcacatctctgaagagcaggctcaccatctccaaggacacctccaaaagccaggtggtccttaccatgaccaacatggaccctgtggacacagccacatattactgtgcacggataccacagagacacagcccaggatgcctcctgtacaagaacctagctgcatctcagtggtgctccctccctacctctgcagaacaggaaagtgtgactgagatgccatttcctgccagggcttgtgtttcctataccaaccagactcagagccctgtctgttttcctattctgtactattaaatggcatgttccctgttagtgattcacgcaagcagaggctgtatcctgtttgacaaagattgagcatgaaagattcccattacctgggccacatgcatcactgatatgtggccacttatttcttgagctcatatccttccaaggggctgaatacaaatatctataacataggccatcttaaactgcaggaagtaatgttggagaagaatgtggagataaaagagcaggatgattaattaaaatccagataccatctttttttgcagagaaaaatttacactaataaagtaattttatgaaacaacaagaaagatggaatgtgtcctcatcatggagtgtctcacttgcagtgcacaaataaatttctaaaaattttatagggaagatgtgatagatgaggctgatttccacacagggagtgattaaatacccaggtaagtataaaatccaacacttggaaaggaaaatgcctcagcttgacatcagaaacccagctcagtaagtctgaggagcaatgcggaaaagaaatgaaaaattcgacaacacttttcttatgaaatccctagctcatgtttgaacacgaaaacagaattgtccacaattttaggacagccatcgcatgacaacaaaccactacaatgataggagcatcactgagtcaacggagttcaagcagtgagcagatcagtactgaggccccaggagaaccaaggctctttggtacattttacagaacccagaaccgagccacataatctatggccaagtgatctttgacaaagttaacaaaaattaaccaacgtatacaccagggaaaggacaccccattcaataaagggtgctggggatattggatagctatatgcacgcgaatgaaactggacccccaccctcaacatgtaaataattaacacaaaatagattaaaggtttaaatgtaagtcttcaaactgtaaatgtattcaaataaaacaccaggacaactcttctggacaaaaagcaaacaatagacaaatgggacttaatgaatctaacaagtttcttcacagcaacagagtgaacagacaaagtgcagaatgatagaaaatatttgcacactgtgcatctgacagagtactaatatacagaattaacaagaaactcaaaccacaacaacaaaagaaaacaagaaccaaataaccccattaaaatgagcaaagaacatgagtagacatttttgcaaataacacataaaaatggacaatagatatataaaaatgctcagcattactaataatcagggaaatgcaaattaaaactagtgagatataccattcacaatggctgttattaaaaagtccaaaataacagatgttggagaggatgaaatgtaaagggaactcttagacactgttgatgagaatgtggacgagtacgacctctatagagaacagtatggattcagtatgatattgactgtgcatttgtcataaacagctcttattattttgagatacattccatcaatacatagtttaatgagagtttttagtattaaggggtgttgaattttattgaaggcctttgctgcatctattgagataatcatgtgttttttttccattggttctgtttatgtgatggattatgtttattgatttgcatatgttgaaccagccttgcatcccaggtatgaagccaacttgatcatggtggatttgaaaaccggcacaagacaaggatgtcctgtctcatcactcccattcaacatagtattggaagttctggccaaggaaatcaggcaagagaaataaataaagggtattcaaatagaaaaagaggaagtcaaactgtctctgtttgcagatgacatgattatatatttagaaaaccccatcatctcagccccaaatctccttaagctgataagcaacttcagcaaagtctaaggatacaaaatcaatgtggaaaaatcacaaacattcctatataccaataatagaaaaacagagagccaaatcatgactgaactctcattcacaattgctacaaagagaataaaatacctaggaatacaacttacaaaggatgtgaaggacctcttcaagagaactgcaaaccactgcccaaggaaataagagagggctcaaacaaatggaaaaacattccatgttcatggataggaagaatcaatatcgtgaaaatggccatactgcccaaagtaatttatagattcaatgctatccacatcaagctaccattgactttcttcacagaattagaaaaaaactactttaaatttcatatggaaccaaaaaagagcccatatagcctagacaatcctaaggaaaaagaacaaagctggaggcatcacgctacctgacttcaaactatactacaaggctacagtaaccaaaacagcatggtactggtaccaaaacagagatacagaccaatggaacacaacagaggtcccagaaataatgccacacatctacacccatctgacctttgaaaaacctgacagaaacaagcaatgtggaaaatgatcccctatttaataaatggtgttgagaaaactagctagccatattcagaaaactgaaactggatcccttccttacaccttatacaaaaattaactcatgatggattaaagacttaaacatgagacctaaaaccataaaaacccaagaagaaaacctaggcaataccattcagtacataggcatgggcaaggccttaatgactaaaacaccgaaagcaatggcaacaaaagtcaaaattgacaaatgggatctaagtaaactaaagacttctgcacagcaaaagaactatcatcagagtgaatgggcagcctacagaatgggagaaattgtttgcaatctatccatctgaccaagggccaatatctagaatcttccagggacttaaacaagcttacaataaaaaaaaaacaaccccatcaaaaattggcggaaggttatgaacatacacttctcaaaagaagatatttattcagccaacaaacataaaataaagttcaacagcattggtcgttcgagaaatgcaaatcaaaaccacaaagagataccacctcacaccagttagaatggcgatgattaaaaagtcaggaaacaaaagctgctggagaggatgtaaagaaataggaacgtttttacactgtggtcggtagtgtaaattacttcaaccattgtggaagacagtgtggtgattcttcaaggatatagaactagaaatgccatttgtcccagcaatcccattatttggtatatacccaaaggattataaatcattctgctataaagacacatgcacacatatttttattgcagcactgttgacaataacaaagacttggaaccaacccaaatgcccatcaaagatagactggataaagaaaatgtggcacatatacaccatggaatactatgcagccataaaaaggatgagttcatgtgctttgcatggacatgggtgaagctggaaaccatcattctcagcaaactatcacaagaacataaaaccaaacaccgcatgttctcactcataagtgggagttgaacaatgagaacacaaggacacagggaggggaacaaacatcacacaacagagcctgtcggggagtggggggctggaggggatagcattaggagaaatacctattgtagatgatgggttggtgggtgcagcaaaccactatggcctatgtatacctatgtgacaaacctgcacattctgcacatgtatcccagaacttaaagtatagttaacaaaaaagagagagagagagaaaggaaacagtatggagactttccaaaaaatgagaaacagtactggcctttattctaccaatcccactactgggtagctacccaaagagaaagaaatcatatttcaaaaagatacccacacttctatgtgtaccacaaatctattcccaatagcacatatgacaacctgagtgtccaccaacagatgattttataaaagaatatagcatatatgcacaatttaatactagtcagccacaataaggaatgaaactgtgtcttttgcagcaagatgcctagaactggcggacattataattagtgaactaactcacaaacagaaagccacatatcacacattattacttataagtgggaggaaaacagtgtgtacacaagatatggagagagggattatggacattggagacttagcagaatgggagggtaggagttggcagcatgatgaaaaatcacctaatgggtacaatgtacgttacttgggtgttggttacactaaagccaataccactgtgtaatatttccatgtaacacagttgcacccatagcccttaattttatacaaataaagataaaaccaattacaatttaaaatataaaattattaatagttgaccaaagatcttgaaaattaaaatttaaatcatgatcaataaatgaaattattatcagttgaactccatttaacttaaaatcctgtggtcctcaagtgatttcaagaaaatgaatgtcaagttttagatgaggagatttgcaaatcatatcaccacctatgtaattatagtaagaaccctcaaaactcaacagtgaataaaagaagaggcaacccattgataaaataggcaaaggtttgtgcaggcatttcattaaagaagatgtacagattacacataggcatataaacaggatctcaacaggatttttcatcacagaaattcaaatcaagaccacaataagatacccaaacaccctttttagaatggctgaaattaagaagaaagatggatcataccgatgctggtgagcataccaggtttctagagtctaaaacattgctaatgggaatgcacaatgaaacagctacacaggaaaataattcttagtttcttgtaaaattatatatgcccttaacacattacctaaaaatccccctcctgtaatacagtaatacatggctgtgtattactgtgaaagaggcatagtgtgaaaacccacatcttgaaaccctgagggagaaggcagctatactgtggctgaggagattacagggattatttgattaaagacttttttagaaagtgaggttaaatcagccgggcgtggtggttcacacctgcaatcccatcactttgggaggccgaggtgggtggatcacgaagtcaggaatttgagaccagtctgcccaacatggttaaactccatctctactaaaagtccaaaaaattagccgggtgtggcggtgtacacctgtaatcccagctactctgggcgctgagacaggagaatctcatgaatcggggaggctgaggttgcagtgagccgaaatcgacccactgcaccccagcttgggtgacagtgcaagactccgtctcaaaaaaacaacaacaacaacaaaaagaaagcgaggttaagtcattgaaaaataggaaaatataaatgtgtatgcactctaattatttgggaaattttccatacaacttgtattctgtaaacaaaattcagggagtggaaaacaaatcaaattaataaaactgatataagaattcctctgaagatattagtgtgagcactaacacacacttttgaatgggtgttgtaaatattttggaacacacctcttaggtcacattttaattctacatttatgtaaattatataaaatatcgaaattttttaatgtctccattttgtgcagttataattttggtttcatgccagcaatgcatgatagattccgttcttccacatcctcgttgccatttggcactataagcattgtgtattttaaccattctaatctattggtggtgatagctcattgttgtttaaatgcacatgtctctaaaattttatatttaattattttatataattgtgatgaagtgtttgttatggtatttggctcatttttgatagcattgtttatttttgatcagttgtaagtttctttacatacccattatataagtcacttaaaaaagtacttagctggtcatgaaccccaggatgagatgcagactgtatagaaatctctagcaatgttactcagtgtgggcagggatggcatgagatgcggggaataaagaataaagtaactttctccatttggatataagatgtgtccattcactagagagttttctttcagaaggttcccatgtgagccagtttccttcctgacaaggaaatcacccagaggattctcataatctcttaagtgagaaaagttttcctcaaactccagctcagtctagctcacactgtctctaaatgggcaattactttcagacatgtacacacatctgtcccaacgtggactcctccctcagacaagcacacacattgcaatgtggactctcccctcagaaaaccacacatgccccacaatgactccttcttcacataagcatatatgcctgatgctgaactgctgtgtagcaaaattagctcagaatacaagcacttatggactctagccataacaatgtgtagatctgcattttattttaaattctaaatgaacattttgccttcttgttaagaacagtggtttacagctctacatgtagagactacaggcagatatatgtttcctctgggaaaagtttattttcatgtatttactgggttattttgttgataaacattcatctataaagacacctgaaaagtgccctcattagagaaaaagaaagtgtagtttgcagattaactctgagcatccaatcccaggaatcctttgatctgccctccctgaaatccacaggcagaggggggatgatcgctgataagtagcaaacacatgtccacaggaagggagacatggaaatgtggtcactcccacactcaagaggagcagctcatcccctgtccgtagtggtcctggtgaggagccaccccacacctgtgccttcctcagtatccacaccatggggtctgtgctgatctgggcttcccttctcatcactctcaatattagtgtccttgcggatcaggctcagctgtggctgctccagatgaggctgttactcagtctgttccctctgtgtttgcagaagtcctgtgtgaagttcaccgggggagacagaggaaataacggtgcagccgggggctatctgagtctctcctccaaagactctggattcaccttcactgattgcagcataagcttggtccagcaagctccaggaccagggttgatgtgggcagcaacagggagaaattgaagaggaagctctcagtggtgccctccatgaatacaaagaatcttcacagtccccaggacacccttacgtgcatggtctcactgatatctttacttcttttatcacttttgttatgtaaatcacaatgaatagtgtattcctcatctattatacatttgttaagtcttttttggtgtctttaaaaaaactgataactttatagtatgtaatatccttaagtcctgaaagtgttttttgatgtctaccttgtcttaaatttatacagctactatagcttttcttggttcatgttttctcatatttatcttttctatttgtgaatatgtagagaaactttcttgtacatagctaatagttgtgtattgcttttttattttggcaggccttaaatattctaattttttatgatactttaagttttagggtacatgtgcacaacatgcaggtttaaacaaacaacctcatcaaaaagtgggcaaaggatatgaacagacacttctcaaaagaagacatttatgcagccaaaaaacacatgaagaaatgctcatcatcattggccatcagagaaatgcaaatcaaaaccacaatgagatatcatctcacaacagttagaatgacgatcattaaaaagtcaggaaacaacaggtgctggagaggatgtggagaaataagaacacttttacactgttggtgggactgtaaactagttcaaccattgcggaagtcagtgtggcgattcctcaggtatctagaactagaaataccatttgacccagccatcccattactgggtatatacccaaaggattataaatcatgctgctataaagacacatgcacacgtatgtttatagcagcactattcacaatagcaaagacttggaaccaacctaaatgtccagcaacgatagactggattaagaaaatttggcacatatacaccatggaatactatgcagctataaaaaatgatgagttcctgtcctttgtagggacatggatgaaactatctattgcttttttaaatcaactataataaattctattttttttttttgagaaggagtctcgctctgtcgcccaggctggagtgcagtggtgcgatcagggctcactgcaagctctgcctcctgggtttatgccattctgctgcctcagcctcccgagtagctgggactgcaggcacccaccaccacgcctggctagttttttgtatttttagtagagatggggtttcaccgcgcttagtgaggatgctctcaatctcctgaccttgtgatccacctgcctcagcctcccaaagtgctgggattacaggcatgagcaataaattctatttttaaaccaacaatatttttttccgttaatttttgtttaaattaacatttagtaatgatgcttatttctctattaacatggtatttaattaccttcctataaatattgtatagttaccataagatttacaataaaaattgtgtgtaattagattctaatgtaaatcctgtgatggccttgatatgaagaacacagatagtgtaactgtgtgctttgaattcctccttctcgccactctttcttgtttattctgtttgcacttacatatgctgtaaaatagaatatgtaatttattattactttatacagtcatatcttatagcaattacaaatgttaaagagtacaattcatctagattttcccatttttacaatctttatttcttcgtagagatttctatttgagtgcatatcacatggctactcgcagagaatctttgtaaaatgtgccctgaaacatgaatgtgctgacaacacatattctccagatctttttttctgacagaattttatttgccattcacctttaatgaaattttaatgcatgtagaatttcagtttgcatttcacctgtaatttattttcttgtaattattattagtttttcctggagatgatcacacattacattctgctgggcctttattaaccatgtttctgcgaacctagtcaggcttgggtttcaagtgtatggttgccgtggctatcagagttgaaatcagcttctcctgttcacaaaaacttcaggttcctctggtgatacctgcgtttgtgtccctgtttggctttggatcttcacatttcattctccccaaagaaaggctgtctctttcagctgtggcaggtgcatcctgctgacacatttacttggtgactttttgtgggatgaaggggcttggacacaggggcacgttttccaaccttctggctgagcctccttcttagctatgggtggtgagactggctctgatgcatgatcttccaagtgttcctgttccttcccttcctcagtgtcacagtgtctcttcccagtcatgctgttttttcatcagtgtcctcagcttctgacccactgtccttaccccacagattctggatttcattcctcaggaaacagacgggaggtgattctgggtagagtttccctgatgtcctctgtttccttgtgttctagttgattctaccagtgcccacaggacacaagatttaataaatgtctcctgcatataatgaagggggattcagcattgaacggagctactgttcttcctccccagtcaacaccacaggacagcaggtgggtgagttgtctggggatttccccaattctgtaggaaaagcctgcaagtgccaggagtttcacactctcacaccattagcacacacgtcttcaagcaactcattaaacatttccaggttagctttttcctatcttcaataccatgccatgagtggcacctgccccaggtactctaataaacgcaccctagttctctctgcgggcccctattttctcatatttcagggatttttttctctgtgacatcaactcagatatggtgaggggtttattttttgtaattcttcatgttttttgttaacgaggtcagaataatatcattttctcaatttttacattctaacgcttagtatctgatttctaaataaaattcagaaactaagacaacaaatgaagtatccattatttggtgcattgttaaacaatttgagaaatattcatgtactgaaatagaatgaaccactgaaatcaaggcatgcctcattcacataagaacatgagggcattatcaaataattttgctgagtggaggaagctaaagaattcaccatcaatttcatgtgatttcatttgtataaatcacagaagatgcaatattctaaattaacatagagaagatctgaatttctctgaaaatagggtgggcagagtaacaacgtggtgaaataaaattatagacaagttagataaaaaaattagaggttaacttaattgctaaaacatgattgaagtgctgattcaatgactgcacacatatatcaacattttccaaatgcttcactatcaatttgatttcattattgattgtttttttaataaagcagtaataaaaatgaatatattggctgagaaagagcaagaaatggataaataccgacacttgaataatcaaggactcctgaaaatacacacatgtgaacactgattgtagatttcaggtaaacactagaaaaggcaaaattacacaaagttgttatgacaggagggacatcctgaaaacctctctaggcatgtcccacaccaccctggagctgtctcaggggagcagtctcctccagtgtttagaggcacaggcacgcataatagggctaactctggccagatgtgtgatattggacacattgcacaactgctctgttctgtatgtaatttatcttctctacaaatgtaacattgacagttgcattaaatatattctgcaaatatgtaaaagttaaataagctgatgtctgctaaatgattaccaaggcacaatcacataatctgaagttatattttccagagtgataggattacctccagagttttccaggacactctcatctgctccgggcactgccttctcctcagccgtcccacccctgagcttgctatatagtaggagacatggaaatagggcccactctctgctgataaaaaccagcccaaccccgaccctgcagctctgggagaggagcccagcccccgaattcccaggtgttttcatctggtgatcagcaccgaacacagaggactcaccatggagtttgtgctgagctgggttttccttgttgctattttaaaacgtgatctatagagaactagagatattgagtatgaatggatatgagtgagaaacagtggatacgtgtggcagtttctgaccggggtgtctctgtgtttgcaggtatccagtgtgagatgcagctggtggagtctgggggaggcttggcaaagcctgcgtggtccccgagactctcctgtgcagcctctcaattcaccttcagtagctactacatgaactgtgtccgccaggctccagggaatgggctggagttggtttgacaagttaatcctaatgggggtagcacatacctcatagactccggtaaggaccgattcaatacctccagagataacgccaagaacacacttcatctgcaaatgaacagcctgaaaaccgaggacacggccctctattagtgtaccagagacacagtgaggggaggtcagtgtgagcccagacacaaacctccctgcagggccatgcgggtggtttcctttctcagctgcaggaggcgggcttattgttgcaggactctggagacttattaggttgtgatattttactatggttatttatcatgaacttttttattgggaattgtgttttattaatttttattttatatgtaaggttatttttttaaaatacataccttcaagaaataattcttcctaataatttgcacttgttctttttagagttttgttaacatctgttgatatcagctactacatagctatagggacattaatttacatctatagacatatgtgtaaatacacaaacttatacatatatgtggtcttttatatttaatgttataataaaattattataacaattataaaatacatcctaaagaatgaaacatatatagtaatccatattcctttcaatcattgcctatagtttacataaattgatgtctatttgtaaccttaaacatagtgtattggtcattttcaaacatccaagaacaaatttcaaatgtccttgtcacacacacaaaaataaaaatttgaggatttgaggtgatatatatgtcaatcagctcgattcaattattccatattgcattcataaatcataacatagctttattcactataaatacatacaaccaaaatttctcaattttcaatgaaattttaattatacatattttatctgtcctaggtcatgaatgtttttctccctgtccggatgtgattagattgtcctgagaaacaaattcagcttcctgcctcctgaaggcttcaggaagcagctcctagatggggtgaagcaggcaacccgtgtgtgtccacaggacccggagcctctctctccttggattaggccccctcctcaggattacagggctcttcagttttctcaacatgctgttataccagagaagcacaaaacacttaatttcattatatttttcttcaatttttcaaaacaacacaaaggtaataattttaacaataaacatattacaacctactatacatgagacccttcctgtgcttcgaggtttcttctcaggactttgtatgtattacatgttttcagtttttttctgagatggaatgttgacgtctccttattacagattattcttttaatttgtctcttagaataattttttccagagctcctgcccgcccgcgcctggcggaatggagcggcgccagggctgagccaggcgcgcaggggccgccgcacgtgccgcgcggggagcggatgcccagcgggcggagagccagcgccagaggccgggtcggagcggccgctggagcagcgtcagaatgggagaacagcccatcttcaccccccgagcgcgggtcttccagattgaccccaacaccaagaagaactggatgcctgcgagcaacaggcggtcaccatttcctgtttctatgatgtcacaaggaacagctatgggatcatcagtgtggacagcgccaaggtgaccataaacaacacaattacacagaatatgaccttcaccaacacgtcacagacgtctgggcagtgggccgacagcagagccaacacggtgtttggtttggggttttcctctgagcagcagctgacaaagtttgcagagaaattccaggaggtggaagaagcggccaagacagccaaagacaagacccaggagaacatggagccctcgagtaatcatcctgagaatcagggcgtggagccccatcttctactccggcatccagtgtcaacgggacggacgatgaaaggcctctcaggccgctgcagccgacacgcacctgcagtctgggaaccacaagctgaaggcggcctcgacgcagagctgcccacgggaagaggtgggagatggagctgcagacccggcgggagaccgacttccggctgcccacggcgctgcaggagtcgacggccagtgcggagcagaggaagaggccgtgagtcagagtgcgactgtgtctctgagaagatggaggcggcagagagaggatcaaaacctggaagataaagtgcgttccctaaagataggccctgaggagagcaaatcccgacagcgccacctggaggcgcttcctggtggcgctggaccggaagatccaggcctgcataacttccgcccaggcctcccaggctgggcaccaacaactagggctggcagaggcccgggatccccaacgtgagtcctaagtatgtgtgcgagaccagatggcgctaggacgttccctgtgtgcgttgcttctgtaaatgcaggcgccgtgtgtcgtgtttccaaaccagttgtgccatccactcactcctttccagaatagaaatctctcgcttctctggccttgtgaggttgtggacaactggaagattctgactgaggaaaccagaaccaggtctaccttcaacatttacgcagtcaggccagggatgtttatatcgttcataagggttgttggaaccatatgaactgaaaaaaagcattttctcatccaaatattgatattctttacaccaggccatcgggctccttttatccgatagcattcagagtatttgaaggtcctccaggtgccagccttgggggcacagggagaacaacattcctctccgaaaacatggggaagctttaaaataactgtttagtggagacttgcccagagatggaaaacaggtttctggtgagtacattttctggtttgggaatcacctgcatccccgatcctgccccgtgccccccagtttgtatggttgtgacaatgttccatttctttgttttaatttctgagcagttgactgtggtgcgggaacagcacacagtgagggtgcctagcacaatgcctggcgcaaagtaggtgctttataaatatttgttcaattaaaaaaaaagagggaggctgaggcaggagaatcacttggaagctgggaggcggaggttgtggtgagccgagatggcgccacttcactccagcctggcaacagagcaagactccatttcaaaagaataaaataaaataaataaaataaataaataaaataaaaaatattttttccaagccccactcaaaaccatggtattgttagaggtgtaatagttggaccaacattgaaaatacattccatttagttcatgggcgtgcaaatatccttttttctttaaaaattgttctcagttgtaatattacaaaaaatattggtaatttataccaatgacacaggttaaaatgttgtataaataatttaatgacgtttgattggaaaaaatacatgtgccacatgtcgacaattttttccttctctatgaaatatatactcattaataagtttcagatgttacagttatctttttgatttctgggatttaattttagtaggtatacttgaatgcattttattaattcctataatgatgttgatatttcatgtaggattttaatactaattttactatttactgaattttaaactattctacatgttttatttatataagaaaaaaattacatatgagaaaaaatgcgtagacctgaaatgtatcactagagagtttctgtcaaatgtgaatacctttgttcccaacacctaaggtagcctgaagagcaagtccttccccacaacatgcgtctttttctgtgcttgcggtcagctcctgcatggggaaatgttttgatttctgacactatagatccattttttttctgttttgaactttatataaatgcaatcaaacattttagaccttaatttggtaatgggctacattgctattttttgaggttatttcctgctatttaaggtattaaattagatcaacatattatcatttattcaagtaatggactgactctgatatgaaacctcaaagttttcacatatatatggagagagagagagagagagagagatgagggagagaggttttatatctgagtcagtctgttaaataagtaaatgacagtattttgatttattttcctgtaaatcgactttaaatttgtttccagtttatgaatattataaacaaagctgttacaaatgtcttagtgtaagttttcctatgttgtcttccttttattgagaaaatatgaagtatgtatttattataagcttaaattttttcagttttattgaggtataattgaaatattttaataatgtatagctttaaggtgccccacttgacgttttgatgttgtattagtccattctcacggtgctataaaaaatgcctgagactgagggatttgagaaaaaaagtgtgtttaattggctcacggttctgcaggctgtacaggaagtgtagtggcttctccttctggggagagtcaggaaagttaggatcatggcagaagacaaaggggagcaggtgcgtcacatggccagaccaggagccacaggaagcagggaaggtctacacactgttaggcaactagatcttatgagaactcacacactgtcatgagaacagcaccaggagtttgttctaaaccattcatgaaagacccaccccatgtcccagtcatctcccaccaggtcccaccttcacaattgaggattataatacaacatgagatttggggcaggacacagatccaaaccacatcagatacacattgtgaaatgctcatcatggccaaggtaatttgtatatccattttctcatggagctaccattttatttttttaaaatgtactacatgtgtgtgtatgtgtgtgtgtctcatgagaacacctacgatctacccgttcagcaaaaatcacatttacaatacagcattaaatacaagaacattgcagtacattagatctgcagaactcattcaccctgcacaactggacctctacccttcgaccgacatcatctgatttccctctcctcacaggcctgggacccactattctactctctgctttcaagagcttgaatattttagatcccacatgtaaatgagatcattaagtctttctgcatctggcttattccactaagcatcatgtcctctagccccatccctgttgttgcaaatgtcagaatttccttcttttcaaagcctaataaaattcagttttctgtgtacacattttctttacacattcatcaatctgtggtcattaaattattttacaaatctacactattataaataatcttgcagtgaacatgtgtttgacataataattttatttcttttgaatatatgacaagaagtgggatcaccagagcatatgatagctttatttttcaatataatgaataaccaaacctaccacaccatgcttttgaagtcttagtcatattttatttgcctaggccaatgtcccgaaaaatttctcctacattttcttcagtttgtacatttaaatattgaatccatattcaattaatttttgtctatggtgaaaaactagaagtctagttttattcttctatgtgtggctgtctaagtttttcagcaccacttactgaatagagggttgtttctccattgcatatttttgtcagttttgtcaaagaacaggtggttgtagaaacttgtctttatttcttggctgtctattcttttacattattattattgttattgtttttagtagcagtaccatgctgtctttcttactgtatctgtgtagtataatttgaaatcagggaatgtggtgctttcagctttggtctttttccttgggatttcttttgctattcaggctgttttttgattccatatatatttaaggattttttttaaaacatgtaatcaattatattggttacttgataaaaattgcattgaatatgtatcttgctttggacagtgtattagtctactgtgcattgctataaattaatgcctgaggccaagtgatttacaaagaaaagaggcttatttggcttacagttttggaggctgtgtgagaagcatggcaccagcatctgcttcttgtgagggcctcaggaagcttacggtcatggtggaagacaaaggggaagcagacggtgtcctgtggtgagagggggcacagaagaggggaggagggtcgctagactgtttttaacaatcagatttcaaattagctaataaagaaataattcactaattaccatgggggtgataccaagccatacctgaaggatcttttccccacaatccaaaaactcctactaggacccacctcaaatattttggatcacatttcaccatgagatttggaagggacaatcacctaaactgtagcatttcactcttgtgtcccctggtctcaaatccttgtaagattgcaaaatcatctttttttaaaatagttcccaaaagtgttaacttgatcaacctccaactgaaaattacaaagtctcgccagggtcttaaggcaatttccctccagctgcgtgctggcaaaatgttttaaagagttatgtacttccaaggtgcaatattgccattgggtaaatattgtcaatacaaaaggaataaattggccaaaggccccacacacacctaaagcctagcaggacagatattaaatcttaaagctacaaaataatctatcttgactttatgttcttagtcagggtacaccaggacaaagtgggtcccaaaatcctcaggcatctcatccttatggctgggcacattccatggggctaataacacaggccagagtcaagtgccagaagtagttccaggttgggagtacaagctgcctttggatctaccattctgggatcttgagggttgtggctgcatttctgtagctccactatgaagtgccctagtggggactctgaatggggttccaaccccatctttccccatctttggtactgccttcgtagaggttgtttgtggtggatccagtcctgtagcaagcttcctcctgggcacatagggttctctacacatcttctgaaatctaggtagaaactgcccagcctccttcactcttgcattctgcatatctgccagaatccagttatcccagcaccatttactgaacacagaggtttttttccacattgtttgtttttgtcagccttatgaagtatcagacggtttaagtgtgcagctttatttctgtttcctattttgttccatttcttctgcatatctgctcttgtaccagtaccaagctgtttttgttaccatgtcattatggtgtagcttaaagttgggtatcatgatgcctctggcgttgttctttttgcttagcattgctttggctattcagggtcttttttggttccatacaaattttagaatagattattttttctaattctgtgatcaatgatgttgatagttttatgtaaatagtactgaatctgtaaattgctttagacagtatgataatttttacaatattccttcttctaatccataagcatgaaatgttttcccatttatttgtgtcatgtatgatttatttatttatttatgctgtgttttgtagttctccttgtagagatctttcaccttgtttgttacctgtatttccaggcatttcatttgtgtgtgtgtgaatattgtaagtgggataagactgtgttcttgatttcactctcagcttggacatagttgggtatagaaatgttagtgattcttgtacattaagtttgtatcctgagactctaccaaagttgtttatctattttagaattattttggcagagtctttagaattttctatgtgtagaattatatcatcagtttggacagatatatctacttcttttcccatttagatgttgtattagtctatttgcacactataaagaaacacctgagactgcataatttataaagatttttaattgtctcatggttctgcaggctgtacaggaagcatggctggggaggcctcaggaacccaacagtcatgacagaaagggaagcatcatgtcttacatggctggagcacgaaaagagaggaggtaggtgccaagtacttggaaaccacatctcctgagggctctgtcatgggaacagcacaaaagagggtgaagcatccccatgatctaatcatccctcaccagtccccacctccaacactgggaataacaatttgacatgaaatttgggtggggatgcaaatacaaaccatatcagctccgttttattttttctattgcctggttgctctgactacgatttccagtagtatgctcaataggagtggtgagagagggcatccttgtcttatttcagttctcaaggggtttgagcttttgctcactcagtataatgttgagtgtggttttgtcatagatggctgttattatattgagtttttttttttttttttgagacggagtctcgctctgtcgcctaggctggagtccaatggcacgatctcggctcactgcgacctctgcctttcggggtcaagcgattctcctgcctcagcctcccatgtagctaggattatggttacgggcatgcgccatcacgcccagctaattttttgtatttttagtagagacagggtttcactgcgttagccaggatggtctccatctcctgacctcgtgatccgcccgcctcagcctcccaaagtgctgggattagaggcgtgagcccccgcaccaggctattttgaggtattttttgatgcctagtcttttgagagtttttatgagtgaatgttggatctcatcaaaagctttctcagcatgtattgagaaaatcatatgttttttgcttttattttgcttacatggtgaatcacagttactgaattgtggatgttgaatgaaacttgccttccaggggtaaagcctacttgatcatgacgtatcacattttaaagtgcttctggattctatttgttagtattttgttgagaaattttaggtctatgttcaccaagaatattcatctgatgttttcttttttaattatgtatcttcctgattttgtatcccaaggacacacaatgaaggaaggacagtctcccaacaaatgatgtaaaaactggacatccatatgcaaaataaataaaattagaccttctctaacaccatatacaaaaatcaacaaaaataaacataacatgaaaccataaactcatagacaacatggaaaaataattcatgtcattgattcagaaatgatttatttgaagttaatcccaaaagcaagcccagcaaaaaactacatgcaattatatatctgacaagaagttctatcaaaatgtataaataatccatacaactcaatagcaaatatcaaatgacctcataaaaagagcaaaaacctgaatagattttttcagaagacacatgcatgaaaaacagagcataaaaatgtcctcaagatgactaattgtcagaggaattcgaatcaaaagcacaatgacatatcacctcacaccacttaaaatggctattatcagcaagacaaaagataagaaatgttggcaagaatgatccacagccataaagagagctttgattggccaagagactgatttcagtaactttctcctgtgaagagaccactgaccatggacttgtcctggccaatttccagaggctgtgcactgtgtgtctttctgcccctgcacaaagcccttttgatatgcaggacccaactgtaattcatttagttcttaagtcctcaccccaaagcaaagctgaaatgcatgtatcatgtgtgtttgcttattagacatgagagcctccactccatgtgaatatccatagctccttctatagcctgctgagtgtgtacactcgaccaatccatttgcacaaatttgtttctcatctttccctctcttaaagtgcctgctcacagtctctgtgggaggctttccttcccagcctgttaagatggccatcctgcagcttcaaccctttctgagaaataaagtctcctttctaaatttataaactgggtgattcttccgttgaaagcacaagctgttgggaagagttatatggcaattccataaatgcctggaagacaagtgtggatagggtagggtaagaagtcctgggggctgcacaccccactctgatggaatttccctccagaaacttctgggttctcaagatgagaatccaaacagattccctcatggctctgtcatcaggagaactatactctgataagtatgcccagaacttcctccagacagaccctatagggaaaaaatacttttcaagatctttattctgtgaggggaagggattcttttccatcccagacagcttcatcttagccttcctgagtcatgaaaaggagtataattaataaaacatctggggtcagattcaagaaaataatctgtggatgctgcagccaggagggggagtggaggacggaggaaaatcagctgtaccactgaatactccttgtaaatggtacagcctagagaaagaatagcaagaaatcattggaattcaatttccagaacatatactgctcccctacccaccacatcacctcaccaccaatatgattatctggattaaagagaaaagtgtggaaaggcacagactccatctaaggactagaatttagggaaaccaaaggcagtgggagagaaaaagtcaaggacagtaaagtgacttaaaacctcttagaccaacagcttcaggaacaaggtcacatcctctccctcactgaaattagatttacctctcatggggcatctgcagggtgcgcaggtgagaactggcaaagagaacatgaaggcactttccaaatctccattagtacctagctcgctttagctgtttggaaaaagcaaaaccacaacaaacataaccaggactaggatcagtgttggaagcacttttcactggcaagacactaagaaggagggcaaattcgaggccagttactatgcaaatatgccactgtgagtgtgtgtggtggtgagctttgagacatagggtctgtgggtaaagttataatcgataaaatcttcaaccacagaatcctaaaaaaaagagccttccccaaagtcccatcagttcctggactcgccatgtgtctggaccgtatcagtggatccggagctccagggaaggggctccctgatggcttttatgattccttgcttgccgtgctgaggtctccctgtagattatgttgggttttctaaggcctattttctattgtaagaggtggtgggggaaacaatttctgtcactgaaagagcattctgagccagggcacagccccttcctactgagcttgagattctgggaggaaaaagttctctgacaggaggaaaaagttcccagacaggaacttccctgcagggcaggagctgagcggcagggggcgctcagggagcacccagcacaggacccagccctggggcaggtgcacaggaggctggggcagggttttctctcaggaattgaatgttccttatttcaaagcaataatgacctaacatttaaataagaatttagcaagtactgatgtgcctgtaagtattttattgtatacgcagcctatacctaacccaataatttaatgcaaaccggatttaaaaggagaaatgtctaggtctttcaaatgtatttctagttaggaattgaggggtggttttattaattcaatgggtgttactgtccggagacacactcatcccagaagttagatgtgcagagggcaaggctcaggaaaagttcaggtagacagtgagccatatgaacagggaatcacattgaggaccatgtcctgtgagattctgggtttctgtgagaggagttctgtcttcatggacttctgggcatgtcagaggacaaatattaaacaaagttcagggcagggagctcagcatcccactgtggcgtggtccacatgtcacctatcttcttcctcagggtggcgtggcctgagctatgaaaaacctgcctcatgaatatgcaaatgcactgctgtctaccgaggtaaatacagatctttccttgcccagagaccatcacacaacagccacatccctcccctacagaagcccccagagcgcagcacctcaccatggactgcacctggaggatcctcttcttggtggcagcagctacaggcaagagaatcctgagttccagggctgatgaggggactgggtccagttaagtggtgtctcatccactcctctgtcctctccacaggcacccacgcccaggtccagctggtacagtctggggctgaggtgaagaagcctggggcctcagtgaaggtctcctgcaaggtttccggatacaccctcactgaattatccatgcactgggtgcgacaggctcctggaaaagggcttgagtggatgggaggttttgatcctgaagatggtgaaacaatctacgcacagaagttccagggcagagtcaccatgaccgaggacacatctacagacacagcctacatggagctgagcagcctgagatctgaggacacggccgtgtattactgtgcaacagacacagtgtgaaaacccacatcctgagagcgtcagaaaccctgaggaatgaggcagctgtgctgaggctgaggagatgacaggatttatgaagtttaaatctgtttagaaaatgggttgagtaattgagtaaaacagcaatggaaagatgtgtacactgtcattatgtaggaaatagtattttcaactgtcaccctataagtaacactcacagagtgggaaaggcagccatcaatcaagctgatgcaaacattcccatgggggctttgtggggacatacattttataattggatcctataaatcattagaaacaggattgcttgatctcatggtaagactaaatataatttccaagaagtggccgaaatttcttccaaaatgtctttgcccttccttttacattgaatttattttaaaggagttttaggatcacaacaagtttgagtagaagaaacagagttcccatgcactcctgccccccgacgctcagccttctctgctatcaacaccctgcaccagtgtcataaatcggttacagaggatgaatctccacagacacattggttgtttccttttctggtggtccctggtataacaagcctcaactatcttgaagcaccccaggttcaagtggattcttcaagtgggttactgggaatgatgccaggtagaaggaaagtgggtgggaccattcctctttgcactctttcctcaaggatccataaaatgtacatttacatggagctcctctttctcctggttttatatgcctcttccccaatggtaaggtttcccagtgtttacagcgggggtccccagtccccgtgctgtggatccgttaaggtgtgcagtgcgttaggaactgggccacacagctggagatgagtgggggcgagccagcatcgctgcctgagctctgtctcctgtcggatcagctgtgcattagattctcctacgagccgaattcactttttttatatatatactttaattctagggtacatgtgcataacgtacaggtttgttacataggtatacatgtgctatgttggtttgctgcattcatcgaattctattgtgacctgcacatacaaggggcctagactgagcgctccctatgagaatctaatgcctgacgattgcagggggaacaagttcatcccaaaaccacccaccgccatcatccatggaaaaattctcttctaccaaactgttccctggtgccaaaatggttggggacactggtgtagaggcaggtctgtaccttggaaagccagcagcttctggtgaatcccataattaatgtcctttaatgagaagtggagactttggtcatgagggccttcgtgaataatgccctacagttggattcaaaacattgtaagctcttggggggtgtttctggataaagccctttgtgcagaaaatgcagacacatccatgggatccatgcaggaaaaaagcttcctttacaaagtggtttggcacctggaaggagctctcagggttgggcactgtaccctttgctggctgcactttagccagaggcttaagcctgattggtcttgcagtgggagagccttcctggggtcaaaggttacaaaaatgcctgtcatcttccagctgagcaagcccatctgcgtgcttgtcagtgtcaaccccatgaagggtgcactctggaagatgacaagatgcacacaaacctcctcccactgattatccactaccacacactcagctgcaacccgtgctccagaaacggacaggggcctgcaaggataaacagaatggaagtattttattacctgggaaagcactgccaaatgccacgtttcaggaaggttaactcataagtgttcaggaagtgactgaagggcagtggtgggtgaggtgacgggactgcctcagggctgcacatgaggagggctccctcccacacagccttttcctccaggagctgcaccaggaactcacagaggatcaggaaggattctgagaacattcttctgtggcgctgactagaggggcaaaataaattataaaaaataaatcaattctaaatataatatgatgtttgttattagaaactatttctggatcctgtgggaaccctgacataagccaccattctctgtgaacaaacatttaacctctccttccatggggaggtcgacgagcttggattggttctttcatggatagtatcccccaaactcctctccactccctgcgtatccccgggtctctcagtgacaagttctcctcagtggaatttggttgatgtagtgagatcttcaaatttcctgtcgtctgtgttctcatgttctccccttatctgagattaagaaacgcacctgcatgtagtaaattatagcctactgtctctcatggacaaaataatggccacgccaaccaaccttgtggctgacagcaaccactggcggccaccatcccctccacagcctgtgttggaacatcacctgagagattgtgttagcaactttccttcagaatcatcttaaaaactttgtgtcccatttcacatggagacgtcatttttccatttcatcttcatagagaaatagaaggagaagaataccaaatacacttcctatctccagattattcaaatataattgtccctttatcaccttctgatttctggtcttcacagaatactctacaaatttttctcactggcgttataccaaaagttgtgaagcaccagatactgggattaatttaaccaacattattattctaataattcttagaatttagaattacaattatcatcttttcgtatacggataaactaacctatgcctttgaaaataagcccttacatgagagtgaaaagctatagatttggaggatttccttgcaaatccaatatttggaaaacggattttatcacaaatatacaaattaacttacaattgaacaacaaaaccacagaatttaattttaaaatgggcagagacctgaatagaaaccatatccaaaaaacaaacataaaaagtgatcaacttgattttcattaggtgtacttatgtttaatatttaaaaagttctactaaactatgagaatgggtaaaaattacaaggtagacaatatcagatggtgatgaggaagttgaaaaacaggaactttcaccccttgctggtgggaatgccgaaatggcacatagaaaactacagttaataatttattgtatatttcagaatagctacaagataagatttggaatgttcataacactaagaaataatcagtgatatagatgaaggatatcctagttatccagatttgatcactgcacataaaatgcttttatcaaaatatcagttgtaccacctaaatattttgaaatattgtgtatctatataaatcaaacattaaaaaacaccaatgcagtggaatccagctaattgcagattcccattagatgggatgtgctgcatgatctgtaaactaatcagaatctgtgggtttgtaaaggactttagaaatcaactaggctgcttgtttctaaagataagtctccctagtttaaatattttcttaatgggtggcgattttgaacatagaagaaatagtaatatttgtgtcttgtaagttttcttcttctcgtgtcacgagaaaaggtttgcagggaggaatctgggaccatctttcaagtctcaacttcactgtgattacctcagtaagtattttctgatacccctgactaagataagtctcgtatctgtcctagaaactaaaagtagaattctaagcatctacctgaccagatggaccttcctcttcaccaaggagttccagagacacttttaaacctagctccggccgtgttagaaatagaggatcagaaatgcctcattataccctcctccctttggaattcaagcacaactaaccagcatttttatgaaaacagagcttaaggctcagaaaacagattatttgtagcagtaagataccaaattctaaccttattcgagaatatcatcacaggacagagagcaggcattgaaaggaatcaaaggcttttaccctaaaatatattcctttgacatattttaaaatagccaggcacagttatcttttgtgagagagatttacattctgtagagaatctccttccctttccaggtctttttcttataccgaggagattagctgagggtctagcttcttttaaaggtcttaggagaaaacatttcccagctattgcctctaaaggtggtcacataagagacttcatctacatagtaagaatcttgttctccaaaacctgttatcttaacctagaaacatttttctaccggtttcaggtctttagaaaaaagcttaaatctttcaatcaattgtcaatcagaaaatattcgaactcactgtaagttgtaatccccgccacacactgcctcacttctagctgttttgtctttatggaccaaatcaacatatatctcacatgtattgtttggtgactgtctctctagtacactaaatttaagctgccatcaagccactttgggcacatgttctcaagatcttctggggctgttcacagttcatggtcctcacattcgcctcagaataaatctctctaaatattttgcaaggttgctttttcatcagtagttctaacagaacctactctgtggtttttgttaaaagcattatattaatatagtattagtaatattagtattagttataacacatgttggaaaattcttatgaagttatgcatagactaacaatgggatcaagtgtaaatgtttcaaagtatttaagcaagttatttcaaaatttatcttctgcagatacttctatcagattcattatatcagctaattacttgctttatgatttttgcattttattgtagatgatcacaccctatattttcttggcctttattgtagaaaattgtgtgaaactagtcagggctacatttgcaagtaattgtcgcagtggctgcctgaattgcagtgggtttcctctgcagccaccagtcactcagattactccaatgacaccttaattttgtttcctgcttggctttgggccttagtcttgtgctctccagacagactctgtctttcatctcccctaggtcaggccagagccacatggacctgatgattgtcaatatggtgggaagggtcgcactgaacgggcactctctgtccttctgagggagccatactgcaggcagacatggcagtcctggctcagggtgtgtccttccaagtatccctgcccttccttcaggtgtgatgctgatccatgcatcttcctcccattcctgggtagagggtctccttgttctttccccaatcttctcccagcagccactatgtcttcccactgatgtcttcagcttcctcttttctgcccttcccagcagatgagtctgttattcctgagggaagagagaggaggtgggagatgaggctttattcctgaaagaatggacagagctttggagcttttctttcttctaccccagtttctacgagttcctccagtgcctgtaacacagagctgtcagtggctttgcccctgcatgttaattctttggtcatgtagtggtggtgagggagctgggtctggatgcatttcagccacagctgctgttccacttccccacacagaaccgtctcaggaggaagaggttggagatttttctgatgtgtcctcaatcctgggagaaaagttttcaatagcaataggaatctctcagttgtatgtccgctgagaatttaaacaataacttctttataatactaaattttaaacaatccaatgaatatatctaatttaattttttattagcttatgtgacatttgctggcctctcccccagataaggtcatattctcttcctgtttgttcctgcaagtcactgaatttcacaagatgtaaggtctcttgattatactataacatcaataatctggtgtactaaagaaaatgtgctaatttgcagcttactaaaattagttgttttagtaaaaataatatatttgttatagcatgcctacatctccaggctgagtagaagctttgtttgtaatactcagaaactgcaaataacacacatattaaggagctttctaaataaatactatgggtgaattctttaactggaatactgttcctcattagaatcaacacattctttatacacaaccaaattactgactcacaagtaattatactgagcaagaagccacacaaatgaaattgaaaatataagatttcactttaacaaaatcttgaaaaatagatctgaattaacaaagatgagaggttgactcagtatggtgagagggaaataatggggaggcaggaatgagaggaacacagggaggcttttaactgtaatcatcgttatctcgattgttattttggatacacaggtgagcacacgtgaaattacgttttttttccttcggagacatggttttgctttgtcgtccaggctggagctccgtggtgagatcatagctctctgcagcctcagaccctgggtctccagcaatcctcctccctctgccctatgtagctgggactacaggtgtgcaccaccatgctcggcttcagtgcgtattaaaccgcacacttcaattatgcagtatttattatatagcaataatgcctcaataagggtattacaaataagtggatagataatttgttaaagattgatggaaagatagataccaacatgagaaatgtatgacactcaagaaaataaaactgtaggaaacttgcttttctttatatttgttaggtaatcaccacagtgtgtacacatcacaccatgttcccattacagagaaaaggttctgcgaacctcacgagctgtgacccctgtgtgctgggcttggttcagggagaagtcaggtccagtggtgagaagcacaggcccagatgcccaggctcactctgaccaaaagtgagcactggggacattgtaaaacccacctgtgcttttgctgataatttttcatctttaacatggaaataatattgatactatataccatggtttctctgcgtatgtaaaaataaaagatgattggtgctaactttaaaaatatgcagtttatgtagatctatggtacctcaataaaactgttttaaaataaaaattacaaaattataagatttttaggttttaaggtttaagtttatcacaaaacaaactgacaataggaaagcacaatttcccaatgctttcaatatcacagatctccccgaggacattctgacatgctctgagccccactatctccaaaggcctctcaccccagagcttactatatagtaggagatatgcaaatagagccctccgtctgctgatgaaaaccagcccagccctgaccctgcagctctgagagaggagcccagccctgggattttcaggtgttttcatttggtgatcaggactgaacagagagaactcaccatggagtttgggctgagctggctttttcttgtggctattttaaaaggtaattcatggagaaatagaaaaattgagtgtgaatggataagagtgagagaaacagtggatacgtgtggcagtttctgaccagggtttctttttgtttgcaggtgtccagtgtgaggtgcagctgttggagtctgggggaggcttggtacagcctggggggtccctgagactctcctgtgcagcctctggattcacctttagcagctatgccatgagctgggtccgccaggctccagggaaggggctggagtgggtctcagctattagtggtagtggtggtagcacatactacgcagactccgtgaagggccggttcaccatctccagagacaattccaagaacacgctgtatctgcaaatgaacagcctgagagccgaggacacggccgtatattactgtgcgaaagacacagtgaggggaagtcattgtgagcccagacacaaacctccctgcaggaacgatgggggggaaatcagcggcagggggcgctcaggacccgctgatcagagtcatccgcagaggcaggtgcagatggaggctgtttcctgtcagggtgtgggacttcatcttcttctgacagtttctctagtgaacctctctaacctcagaattctgtgcttactaatgtcatctctacgtattttttaaaagatcattttaatatgagcacctattctcacacgcaccaaatgcagattgacgcttacagagatgaaaagttctcaaccatggtcaccaggatgagagtcctgaggaaattcaggggtgcctggtgactcttccgcaatcagtcctgggacagaaacctcagggacagcctttatgagttttgatcacatctaacagagaggatgggccagggccagagtcatgtagaacctcacaggttccacgtctgacccttctcctgacactaaagccaatcagcatcagcactgacctggtgctccttttgctcccaatccatgttctttctttggagagtttcttctcccttttttatttgcttttcctctttcctgaaaaagaaacagatggtccccttggtccacattccagggctcaaggcattttcttggagctcaggtggggctcaggctgtggctcctgcagccacgtgggagaggctgatgggacttccttctctccccattttctcaggaccctctactgtgttgtgtgtaggctcatctgggaatgcagttgaccattaatactgaaggggacaaactcatttgatcaaaatgggatgtggatgtggagttaaccctgttccgtgcacagtgtcagagtcgtctgcttcagaagtagtgttagaaagagctggtgaaatttatcagaatcaagatggagccacttgtgttaaagccctaatgaatgaagctggggaaggccatgaaggagggttctaacacacatattcctgataataagaactaccataaatagactctgcacaaccataaccttgcacagaagccaccacaacattaaaagaattacttctcccattgtatctgcccagcaactccctgttcaactttacaccgatgtgcccctgttattgatccttctagcccaggacaattgtcttaaacagctgatgtgaccctcctcatttttcctttattctttatcttcctataccaacctgaatgcacccatacatttcaattgcaatacacttcctagaatacatattattatattttagagtctctctctctctgttattcagggttgacaagctacagatggacatgccactttctttttttatgactttttttaaaaattttattattcttgtactttaagttttagggtacctgtgaacaatgcaggtgtgttacatatgtatacatgtgccatgttgttgtgctccacccattaactcgtcatttagcattaggtatacctcctaatgctctccctccccactacccccaccccacaacagtccctggagtgtgatgttcctcttcctgtgtccatgtgttctcattgttcaattcccacctatgagtgaggaaaaaaatgatgagttcatgtcctttgtagggacacggaagaaactggaaaccatccttctatcattctcagcaaactatcgcaaggacaaaagacatgccacttttctgtgagatgtggaggatgacagtttttggagatgtctgggaatacccagtgtccagaagatcatccatcaataagtgcaggctggaggtcccagagagaggcaaagctgctgaaacaccatggaatttcattttctccagttctgctctgatggaatcaggcccacctgttttgcttgtcttaagtaaattcacagcaccacatatattagtgttgcagtgaataactacaaagtctatcctaaccaagtgtaccatcaaatttaccattacccagagggaagaatctttaacatgagatctatgttcataattttttaaggtgaaaaagtgatcactatccaatcaggcaaatatgattttgctaatgagtggtagatgttgcatgtatttttggatgtcatccctttttcagatgcatggcttgcaattatattttcccattctgtaggttggaattatttccacactttgtagaatctttttgttgtgatgtagttccacctgtttaattctgcttttgttgtctgtgcctttaatgtgaaatataggaaatcattgttaatatattattttctgggtcggggaaattttacaattgcaggccatatgtttaaatatctggcccattcagagtgatttttgtgtttattctaacccaaaattcttaactctttgcatgtgtacatccagtttttctaacacattcatagggagagacttggtttatctgttttatattgtgggttcttatgctgaaaatcagtttgccattgatacatcagtttatttctgagctctttctacatatttatgccaactccatcctgtttttattattctacttttgttattacttttgaaatctggaagtaagatgtaagtttatttttgcctttttacagatgctatagcaaaatattttaacctttcactcttccatataaaagtatggctttaaataatgacttttattatatacaggttatattcttgtattcctaacttttagaggttttattatgagatcttgaattttttaaatgttattttctatgtctggtgagaagttaactgatgcttttcctttattctcttaatttaccacatcagatttattgatttgaagatattgattcatcagcgcatctcaaaaataatttggagcttgtcatggtgtacaatccttttaaagtcttatagaacttagttgactatgaattgggagtagcttgtttatatatactaagaacatttgtcagaagtttggttttcttcttttgccttgtctattactggtaatacagtgattggagcctcttagaaagagattagaaggtggggacctcacggattttttaaaaagttagagaacggttgtcatcacttttttaaacgctgagagtcatttgttatctaatatataacccatcatgaggaatatctctagtgtgcttgggaagcatgcatattacgctgctgttggttggaatgttccgtagatgtctgttagggcagtttgttcgagagtgcttgagtccacgggcttcctaagaatttttctgtggatgctctatacattattgaaggcgaggttttgaagtctcctaatttttttatagttttctatttctccttttatacatcttaaagtttcataaatgtagttatatttctagtttttcaaatatgtaaaagagaaataaaaatatttgcttagtaattttaatgagaaaatcacataacaagaaattatattttccaaatgctgccatcaacactaaactcctccaggagtctcacatctgccctgggctctgctctctcctcaggcatcccacctcagcatttgctgcagaggaggggacgtgaaaatagggccctccctttcctgatggaaaccatcgcagccctgagcctacagctctgggagaagagccccagtccagcattaccaggagttttgatttgacaatcagctctgaacacacatggctcaccatagagttagggctgagctgggttttcttgttgctattttaaaaggcaaataatggagaactagagatattaagcatgagtggatgtgagtgaaaatacagtgattatgtgtggcaggttcggaccaaaatgtccctatgtttgtaggtgtccagtgtgaggtgcaggtggtggagtgtaggggagagacaagagtcagaaaagtgtgcaggaggccgggtgaggctgtagacactgtcagcccactatgccaatcccaccacgagtgctggagaaggtgggagtctgatgaagcttactaacaaaccctgtggtccaagctattccatcaaggccattggttcttcccagagcatagctgtccatcgggaatctcccatgtgcccagcagcagccacgcgttagcaacttcactgtgcacagtcattgtttgggaggagctccaggatgtgtctctttgtcaaaaactgggtgatggtgtcagagagctgtgccgggtccctggtccacgtgctccctgacattggaggtataggaggtgcgttctcagggtggaaacaccttttatggaaatgtacataataaatcacgattttccttggttctcttagacgacatggagaagcaagcatgcaccctgcaaacaattgtaatttcctgctttaccccaagttcatgatttcttgtaaactttgatttctgtccaagtacagagatactgattagagtgagtttggttctttccacacactaaccctcacctcccccagatagagcacattgtcctcactctgagtctgagggaggagctgttcctgtacaactcagggcctgcagagacccccgtgtgcagctttgcagagtcagatctttcctcatgtgaggcgacctccactgcccgtgattgctgctcaggtctaattgtggattcgggattatgacaccctttgggctatcacaggtcaatcttattctgaaaatcaccgtaattatagacagaggtaataatccagtacccattcttctgtccgcagtttgtctttcttatttggttgaaagtttgaagaaaaaatgtgaccatatattcatctaattctaacctctgaatctgctatttgctctcggggacctacaaattgcaaaacagtgagttcttcattttcatcaaaatgtgcaaatttgtgaatttcaacatgttgttcagaacctgtgcatgccgacaactgtgattctcggtgcactcctggcctggtgaagccctcacagatcctccccctggcctgtggcatctctgcttctccattacaaccagtgcttcctgctggagctggatccgtcaccccccggggaagggactggagcgaatcaggtgcacaggtcatgagggagtgcacaatccaacccactcctcaagagtccagtcaccatctccagatccacatccaaaaaacagtttctcctacagctgagctaccttaacaaggagtacacaaccatgatttttatacaaaagacacagcgaggggaagccattgtgcgctcagaacactctacaaattttcctccctagtgttttaccaaaactggtatatatttcagatactgaaatatttacaacctacgttattatgctaagaattctaagttagaagttagaatgataattgtctcttttttttcctttttttttttttttttgatactgagtctcactgttgttgcctgggctggagttcaatggtgcaatctcggctcactgcaacctctgcatcccaggttgcagcaattctcctgcctcaaccccccaagtagttgagattacaggcgcctgccacgatgcccggctaatttctgtatttttaatagagacggggtttcaccatgttggcctggctggtctcaaactcctgacctcaggtgatccaaccgcctcagcctcccaaagtgctggaattacaggcaggagccactgcacctggccaattatcctcttttcatagatggataaactaacctaggcctttgaaaataaacccttatctgagagtgaaaagataagccatagatttggagagtttgcttgcaaatcaaatatttggaaaaggacttttattacaaatatacaaattaccttacaattgaacaacaaaaccacacaatttaattttaaaatgggcaaagacctgaatagaaagtgcatctaacaataagtataaaaagtgaccaactggattttcattaggtaaatgtatgtttaatattgaaaaaatcctagtaacctaatagaatgggtaaaatacacaatatagacaataccaaatgttgacgaggaagttgaaaaacaggaattttcacccattgctcctgagaatgctgaattggcacatagacaactacagttaataatttattgtgtatttcaaattagctagaagataacatttagaatgttcttaccacaaagaagtagtcaatgattgagatgaaggttgaaggttgtcccagttatccagatatgcacataattttctttttttcaaaatatcacatgtaccacataaaggttttgaactattatgcatctatttaaattacacattaaaaaacaccagtggaagggaatccagctaattgcagattgccattggatgggacgttctgtataatctgtaaactaatcagaatctgtgtttttctaaaggacattaggaatcgttatactagtttctaaagataagccttgcaagtttaattattttcctaatgggtggcgattttgaacattgaagaaatgttagtatttgtttctggttaagttttcttcttctagtctcaggagaaaaggtttgcagggaggaatctgagactatctttcaagtctcaacttcaatgtgattacctcagtaaatattttctgatacccctgagtagggtaagtctcatatatgtccaataaactaaaagtagaattttaagcgcccaagctgactgaatggaaccttcctcttcacaaggagttccagagacttgaaaacctagttcaggccacattagaaacagatcagaaatgcctcattataccctcctcactttgtaattcaagcacaactgaccagcattttcatgaaaacagaggactcaaggctcagaaaacggattccgtgtagcaataagataccaaattctaacctgactcgagaatagcgtcatgtgacacagagcaggccttgaaaggaatcgaaggcttttaccctaaaatatatttctttgacatatttttaaatcgccctgcacagttatcctttgtgagagagatttacattctgtagagaatctccttccctttccaggtctttcgttatactgaggagattagctggaagtctagcatctcttaaaggtcttagtagaaaaacatttgccatctatttcctctaagcgtggccacataagagacttcatctgcataatatgaattttgttctccaaaacctgttatcttaacccagacactttttactactgatttctggtctttagataaaaacttaagtctttcaatgaattgccaattgaaaaatcatttaattcacctgtaagcggtaattatctccccacactgcctcacttctagctgttttgtctttatgaaacaaatcaacagatatctcacatgtatcaattgatgttattaaatttaacctgcaatcaaaccactttgggcacatgttatcaggatcctctggggctgcgtcacagggcatctaccccacatttggctcagaataaatctctctaagtattttccaaagttggctttttatcgatagaatctactctgtggtctctgttacattcaaaagcatgatagtaataaagtattagttattaaaaataagcacatgttggcagtttcttacgaagttacgcatagactaactatgggatcaagtgtaaattttcaaagtatttatgcagttatttcaaaatgtatgttccacagatacttctatcagatcctttatattagataattatttgttttatgactttttttgtagatgatcatgccgtatcttttctaggcctttattgtagaaaattgtgtgaaaccagtcagggctacatttgaaattcattgtcacagtggctgcctgaattgcagtgggtttcctctgcagccaccagacacccagattcctccagtgacaccttaattttgtttcctgcttggcattgggccttaaattgtgtgttccagagagactctgtctttcatctcccccaggtcatcccagagccacatggacctgatgattgtcaatgtggtgggaagggttgcactgaacgggcactctctgtccttctgagggagccacactccaggcagacatggcagtcctggctcaggacgtgtccttccaagtatccctgcccctcctgcaggtgtgatgctgatccatgcatcttcctcccattcctgggtagagggtctccttgttctttccccaatcttctcccagcagccactatgtcttcccactgatgtcttcagcttcctcttttctgcccttcccagcagatgagtctgttattcctgagggaagagagaggaggtgggagatgaggctgttattcctgaaagaatggacagagctttggagcttttctttcttctaccccagtttctacgagttcctccagtgcctgtaacacagagctgtcagtggctttgcccctgcatgttaattctttggtcatgtagtggtggtgagggagctgggtctggatgcatttcagccacagctgctgttccgtttcccacacagaaccatctcgggaggaagagggtggagatttttgtgatgtgtcctcaatcttgggaggaaaggtttcaatagcaataggagtctctcagttttaagtcctgtggaaatttaaataataacttcttcattatacttaattttaagcaatcgggtaaatatatctaatttaatcttgcattaacttatatgacatttgctggcctctgcctcagataaaattatattcttttcctgtttatccttacaagtcactgatttgattttcacaagaggtaagttctctcatttgccctatacatcaataaactcatgtattaaataaaatgtgctaatttgtagctcagtaaggctagttgttgtaaaaataatacttttttattggatgactacatctccaggcggagtagaagatacatttgtaatactcagaaactggaaataacacaaatgttaaggagatttataaataaatgatagggttgtactcattaactggaatactgttcctcgttagaatcaacacctttatacacaatcaaattactgactcacaagtaattattctgagcaagaagccacacaaatgaaatggaaactaaaagatttcactttaacaaaatattgaaaaatagatctgaattaacaaagatgagaggttgactgagtatagtgagagagaaatgacgggaggcaggaatgagaggaacacagggaagcagggaagcttttaactgtaatcatcattatcttgattgttattttggatacacaggtgagcacatgtgaaattacattttttttctttggagacatggtcttgctttgtcatccaggctggagctcagtggtgagatcacagctctctgcagcctcagaccctgggtctccaatcctcctccctctgccctatgtagctgggactacagttggcaccaccatgctcggcttcagtgtgtattcaactgcacactttaattatgcaatatttattatatagcaataatgcctcaataagggtattgcaaataagtgaatatataatttgttagataaagactgatggaaagatagacacgaacatgagagatgtatgacacttaagaaaataaaactgtgggaaacatgctgttctttacaattgttaggtaatcacaaaagagcatacacatcacaccatgttcccattacagagaaatgcttctgtaaacctcactaggtgcaacccctgtgtgctgggcttggttcagggagaagtcaggtccagtggtgagaagcacaggcccagatgcccaggtcactctgaccaaatgtgagctctggggacactgtacaacccatctgtgcttctgctggtaatttctcatttgtaacatggaaataacattgatactacataccatggtttctctgcatgtgtaaaaataaaagattattggtgtgaacttcaaaaatatgcagtttatgtagatctattgtacctcaataaaacttttaaaataaaaattacaaaattataagatttataggttttaagggtttaccacagaacaaacttacaacaagtaaccacaattcccaaatgctatcaatatcacaaatctcccccaggacgctctcacatgctgtgagccccactctctcctcaggcctctcaccccagagcttactatatagtaggagacatgcaaatagagccctccctctgctgatgaaaaccagcccagccctgaccctgcagctctgggagaggagccccagccctgggattttcagatgttttcatttggtgatcaggactgaacacagaggactcaccatggagtcatggctgagctgggtttttcttgccgctattttaaaaggtaattcattgagaactattgaaattgagtgtgagcggataagagtgagagaaacagtggatacgtgtggcagtttctgaccagggtttctttttgtttgcaggtgtccagtgtgaggtgcagctggtggagtctgggggaggcttggtacagcctggggggtccctgagactctcctgtgcagcctctggattcaccttcagttactactacatgagcggggtccgccaggctcccgggaaggggctggaatgggtaggtttcattagaaacaaagctaatggtgggacaacagaatagaccacgtctgtgaaaggcagattcacaatctcaagagatgattccaaaagcatcacctatctgcaaatgaagagcctgaaaaccgaggacacggccgtgtattactgttccagagacacagtgaggggaggtcagtgtgagcccggacacaaacctccctgcaggggcgcgcggggccaccaggggggcgctagggacccactgagggcgggacaggagcaggtgccgggagaaggttttcctttctcctcagctggaaaagtcaggtttgtgtttgccggactctggagctttctaggctgtgacgttttattacttgtgtttattatgaatttattatcgttagtatttaaattttagtaatttaaaaattatatatatatgtttacactttaatgaaataagcattcctatttgcaccgattcttccagagttttattaacatttgttgacgtcagcagctacgaagctatagggacataaatttataaccatagaaagatgtataggccaggcgcggtggctcacgcatgtaatcccagcacgttggaagccataggtgggctgatcacttgaggccaggagttcgagaccagcctgggcaaaatagtgaaactccatctctactaaaaatgcaaaaatcagcttgtgcgtattggcatgtgcctttaatcccagctactcggtaggctgaagcaggagaatcacttgaacacggaaggcagagattgcagtgagctaaatggcgccactgcactccagcctgggtgacagagcaagattcgatctcaaaaaaaacaacaaaaaacaaaaacaaaacaaagaaagaaaaaatatataaatacaaagacatatgcatatatgtgtaggaattcataacaaacattacaataaagtaattctaaaaatatgtcctaaagaatcaaacttaatgatgagctaaatgtaaattatttgagtatttcacaattgattttggttatttttaattgtttccatcaattgatttatatttgttcatttaactactgttaaataatggttatttcaaatgttgtcacaataaataataagaatgtgaattgataaatgataattatcttaatcatttcttaattatcttagttatcccatatggtattcacaaatcataacattgcttcttaccttgtaaatataaacaaccataatgtgggaatttaaaataaaattttttattttaattttttaaaatttatcccagatcattatctttttcttcagctccagctctcatgtgatggtctcaagggcccatctgcacccctgtctcctgaaggcttctgggagtggctgtgggacagggaggaagcaggagcccatgtgagtccacacgacctggagcctccctctccttggattaggccatctcctcgggatcacagggctcttcattatcctcaccccgctggtggcccaaacaagcaacatcacacttcaattcatcacgcttgggtttaattttcttaatcatcgggaaggtgataatgttaacaggaaatgtttcactaacaaataggataagcccttttccatgggacagggtttcttacaaggacttgacatgtattatgtattttccatttctttatagatgagatactaatatctccatattggagacaattcctttaagtcatttcttaaaattaatttttcctaggactccaaacaaatccatgatatagttgaaaatttcaggtgtaagagctgggccaacattgagactatattaacatttataacatgtgcttgcaaatattgttatttttctgtcggctgtccccagttatggtttgatacaaaatgttagtaatttatcctaataaaacagtttacaatattatatcaatagtttattaactttgtataactaataatataaaatgttcaacatattttagccatattttacttatttgtgaaatgtgtgcttattagtttttcgttttaagatgtcacctttatcttttttatttctgggattttattctagtagatataactaaatgtctttaaataattattgtaataatcacatttatattttctatttgaattatcatatgcatgttattaagattttaatttcaataaaaatattttcctccaattgtctattttctgtttttatgagataacatatacaaaaatgcatagctcttcaatgtacagtttgagggtttctggcaaatgtgcacgtttgtctccagcacctaagttagggtgaggagcaggtccatctccacaagtgtcctctcagtgtttccagtcagctctcacataaggatttttttttaatttcaacttttaatttagatacagaggggacgtgtgtggacttgtcacacgggattattgagtgatgctgaggtttggaatccagattccatcaccccctccctccactctccagcagtccacggtgtcttttgttcttctatttatgtccatgtgtgctcaatgctgagctcccacataggagaatatgtggtattcggttttctgttcctgcatttatttgtttatgataaagaccaacagctccattaattttggggcaagggacatgatttcattctttttcatggctgtgtagtattatatagtgtagatgtaccatattttgtatattcagtctaccagtgatgtgcatctgggttaaactacgtctttgccactgtgactagcacagccatgaatacgcatgtgtaggtgtctctttggtagaattatttatttactttttagtgtataccctgtagtggaattgctgggtaaaatgatatctctgttttaagttctttgagaaatctccagtctgctttccaaagtggcaagactaatttatattctcatcaacagtgtataagtgttctcttttctccaaagtcccacaagcatcctttgtttttcgacttttttgtgataccattctgagtggtgtgttgctgctcacctacaatcatctcatatttgataaggctgatgaaaagaagcaatgaggaaaggactccctgttcaataaatgatactgggacaacgggctagccatatgatgaagattgaagctgaccctgtactttcaacatatataaaattaactcaaaattgattaaagccttaaatgtaggacctcaaaccataaaactccttgaagacacccttgaaaacactcttatcgacactagttttgacaaaaaatttttggctaagtatccaaggccagttgcaacaaaaagaaaaatagacaagtggaacctaattagttaaggagtttctgcacagtaagacaaacaaacaaacaaacaacaaacaaaactatcagcagtgtaagcagacaatctacagaatgtgagaagatattcacaagcattgcatcccacaaagccctagtatccagagtctgtagataaacaaatcaaaaagaaccaaaaaaaaaaaaaccctttaaaaattggctgatatggtttgctgtgtccccacccaaatttcaacttgaattgtatctcccagaattcccatgtgttgtgagagggacccagggggaggtaattgaatcatgggggctggtatttcccgtgctattctcttgatagtgaataagtctcatgagatctcatgggcttatcagggatttccgcttttgcttcttcctcattttctcttgccacccaccaggtaaggagtgcctttttcctcccgccgtgtttctgaggcctcccaagccatgtggaatgtaagtccaatcaaacttctttttcctcccagttttggatatgtctctatcagcagtttcaaaatggactagtacataggcaaacgacacagacacttctcaaaagaatacatgcaagtgcccagcaaatatattgtaaaaatgtttaacatcactaatcatcagagaaatgcaagtagaaaaatgttctgatttctgtcactataggaggtccctttttcttgttaagaacttcatatacatggaataaaatattatagatcatttttgtaaggggccacttttactatttgtgaggttcattcatgtaatagcatttatcaaggttttgtcatcatatgtataaatatgtatgtactcatacacatatagatatttcatatctaaatcaattacattaataaatgacagattattaaataaataaatctgtttattaagtaaataagtgacaatatgtatatctattttcctgttgatgggatttaaatttgtttccaaaataaacatcataaacccaaactattataagtatctttgtacaagttcttctgtttatattcacacattttattgataaaatatgtagatatataggtatgcattataacttttcagctttatggagctatcactgacaaataaaattgtatatatttagggtacaccacttgatgtattgatgtacctggggagatgctcatcatgatcaaggtaatcggcatgcctgtcctctcagagagttatcattttatgtctttaatttcctgtgtgtgtgtgataaaaacacctaatatctactcttctggcaaaagatacctttataatacaatatttattagtatagtcacattgctttacgtttcatctccagaactatttcaacctgtgttttagtccattctcaccctaatgtaaggaactacctgagactgggaaatttacgaagaaaagtggtttagttgactcgcggttctgcaggcttaacaggaagcattattgggaggcatcaggaaacttacagacatcatggaaagtgaaggggaagcaaggaccttcttcacatgctggcaggggagagagagagaaagagcaaggcgagatgagccacacttttaaaccatgagaccttgtgagatcttgcaagaatcacaaaggggaaggtcgcccccattattcaatctctccccatcagacccctcctacaacacttggggattaaaatttaacatgagatttgggtgaaaatgcagagacaaaccatatcattccacccctggtccatgacagatctcatgtccttctcacattgcaaaatatatttatcccttctcaacggtctcccaatcttaactcatttcagcataatcataaaaatctatagtctaaagtctcctctgacaaggtcagtttcttccccctataaatctgtaaaattaaaaaaaacttagttatttccaagatacaacgggggtgcatgtactaggtaaatgctcccaatccaaataggagaaattggccacagaaaatggattacaggtcccatgcaagtccaaacaccagcagggcagtcattaaatgttaaagctccaaagtaatttttcttttaccccatgtctcacatgcaggacacactgatacaagagatggtctcccaaggccttgggaagctccacccttgtggctctgtagggtccagcgcccatggctgctttcataagctggcattgagttcctgtggcttttctaggcacaccgtgcaagctgttggtggttctaccattctggggtctagaggatggtggccctcttctcatagatccactagacagtgcctcaatggggactctgtgtgggggatccaacatcacattttccttctacactggcctagtagaggtactccattagggctcagccccttcatcagacttctgcctgaatatccaggcattttcatatatcatctgaaatctaggaggaggttcccaaacctcagttcttgccttatgtgcaccaacagactcaacaccatgtggaagcaaccaaagcttagggcttgcaccctctgaagcaatggtctgagctggaacttggtcccttctagctatggctggcacgagacagacaggggtgtaaggtgccatgtctcaaggctgtacagagcagtgaggtactgggcctggaccatgaaatcatctttctctcctgggcttctgggcctgtgatgggaggggctgccacaaagatctctgaaatgccctgggaacattttccccattgggctcctcattacttattcaaatttctgcagccagcttgaatttctccccaggacatgggttcttcttgtctaccagatggtcaggctgcaatttttttccaaccttttatgctctgcttcccttttaaatatgagtttcaatttcagaccatcttttcatgaatgcataggacttatgttttcaggaacagccagggaaaatcttgaatgctttgctggttagaaatttattctgccagataccctaaatcatctctccctagttcaacatagcacagatctctagggcaggggcaaaatgccgctagtctttttgctaaagcataacaagtgtgagcttcactccaattcacaagaagttcttcatcttcatctgagaccacctcagcctggactttattgtccatatcactatcagcactttggtcaaaaccagtcagtaagcctctaggaaatttcaaacttttccacgacttcctgtcttcttgtgagccttctaggctttcccaacatctgtccattacaaagtcacttccccattttcaggtatcgtaatagcagtaccgcactcctggtgcaaattttctgtattaatccattttcccactgctataaagaattacttgagactgggtaatttatgaagaaaagagggttagttggcttacagttctgcaggctaaacaggaagtgttactgggaggcatcaggacacacaatgatggcagaaggtgaaggggaagcaagaacattcttcacatggtggcaggagaaaaacagcaagtgagcggggaggtgccacacttttaaaccatcagatctcttgagaattttatcatgagaacagcaaagaggaagatcacctcatgattcaatcactttatattagaccctttcttcaacatgtagggattacaatttgacatgagatttgagtgggaacgcagggccaaaacacatcaacctgcataaccgaaatttttaccctttgacctacatcgcccaatattttcctcctctcaggccctgggagctactattctactctgcttccaagagctgaaatattttacattctacatataaatgagatcatgcagcatttgtctttctgtgtctggcttattctaattagcataatgttctctatgatgctgaaaatgtaagaatttccttcttttaaaggttgaataatattcaattttatgtatgtatatgccacattttatctgttcattcataaatggatattgacttattttccatatctaggctattatgaataacctcacaatgaacatatttgatacactcacttcattttctctagatgtacacttagaagtgggtataccctatgttcaattcattcagtaatcttaatgttgtttttataatggctgtactaatttacattttgttccaaaccatacatggatacctttgtaccaaattttcaggtctacgtttaagtgttaaatccatttcttgttgatttctgtgtattttgtgagggaaggtcctttttttttttttccttagagttagaatctcgctctgtcacccaggctggagtgcaatggcatgatctcggggcactgcaacctctgcctcccgggtttaagcgattcttctgcctcaggctcccgagtagctgggattacaggtgtgcatcagcacgcctggctaatttttgtatttttagtagagacagggtttcaccatattagccagctggtctcaaactcttgaccccgtgatccacctgcctcaggctcccaaagtgttgggattacagatgtgagccatcacgcccaaccagtccatttaatttcttctacatatggatacccagttttcacaccacttgctgaagagactgtcctttgtctattgtgtgttcttggcaacttgtcaaagatcagtttattgagaagaagtgggttgattatcaggtgcctataatgttccattagagtatatgtctgtttaaatgccagcattatactgttttgatttatatagatttgattttgaaattatagaatatgatatattcagctttgttatactttccccaaaattactttggctattggaaagcttttgtatttgtatataaattggagcattttaaaaatatttttgtaaaaacatgccacggagattatttactttattgacaaataatagatatacctaatttatgggagcatgcaatatatttatacatttacaaatatgtgaagatcagatcaggattggtatatctatcacgttaaacaggtatattttctttatgctaggcacattggaatgactctcttctagttattttaacgtgtacattagattatttttaactatagtcaccttactgatctatcagacatttaggttgtatttctcctatataactatgtatctgaattcagtaatcaacctctctttatccccttctctcttgtatccacccaggcttctggtaaccaacaatctactcttcgtcttcaggaaatccaattttttagttttgacataaaagtaagaagatgccatatttgtctttctttgcttggcttatttaacttaacataacggcttccagttccattcatattgttgcaaatgacaagatatcgtattttatggctgaataatattctattgcatacatagattacattttctctatccatttgttcacctgcagacactgaggtgctttcatatctgggctattgtgagtagagctgcaaagaacatggagtgcacatgcctttatgaggcggtgattttatcttcttcagaacatacccagaagaggatttgccacgtcatcaggtatttctatttttaatttattttggagtcttcatattactttgtacaatagtggaaatgcaataggaatatccattataaaaagcagtttcagttttgaggtatgatccaaaaacaaataatgtttgaccatgattctcactgggagtctctaatgagcctggtggaaatgcaggaagttttctaaccttgttaagaaaattatgactttgcacatttttctttttaaggctggtaattggcgtgattccagatgcatactgttggcgggtttcagaatgatacagaaaatcattatgagaaggcaagaaaaagaatgatagagagagagagggagagagggagagagtcaggccaacaatgagaaaaaataaatttcacaagaggagaaagtgctggatatcagtgctgggttttggtcatagacacatctgtactgagtaagaaactatgaagtcaagggaggagtctagaatttgttcaagtgaagcatcagcatattctctgaggcacgtattgtcaccccatcataagggtgatgaatttttgaatgccatgaaatgtgagttcacggtaagtaatcatgtttccatgaaatttagttaaaatgccaagggtgtgttcagatcacccatgcacaaatacacaaaatttgcctttgcatttatagctatctagagaaaaagtgcattgagatgtcagcaggttacagagatctgtttaagtttgggatcccatgggagagtgcctcttagtgaaggttggtctattaattcagtaagtaaaaattctttctatgggagtagcttctaattgtgtggaaatttcaattccttattgagtttttaaaaaatatctcagggactgactccatggagttttactgctgtattgataaaaattatcatcaaagaccaagggtagataaaacccaaagatggggagaaaccagagcagaaaagctgaaaattctaaaaatcagagcacctcttctcctccaaaggaacacagctcctcgccagcaacagaacaaagctggacagagaatgactttgacaaattgagagaagaaggcttcagacaattggtaataacaaactactctgagctaaaggaggatgttcaaacccattgcaaagaagctaacaaccttgaaaaaagattagacaaatagctaactaaaagaaacagcatagagaagaccttaaataacctgatggagcttaaaaccatggcacgagaaatacatgatgcatgaacaagcttcagtagatgattagatcaactggaagaaaggttaccagtgattgaagatcaaatgaatgaaatgaagtgagaagagaagtttagagaaaaaagagtaaaaacaaatgaacaaagcctccaagaaatatgggagtatgtgaaaagaccaaatctatgtctgatttgtgtacttgaaagtgacggggagaatagaaccaagttggaaaacactcttcaggatattatccaggataacttccccaacctagcaagggaggccaacattcaaattcaagaaatacagagaacaccacaaagatactcctcgagaagagcaactccaagacacataattgtcagattcaccaaagttgaaatgaaggaaaaaatgttaagtgcaggcagagagaaatgtcgggttacccacaaagggaagcccatcagactaaaagtggatctctcagcagaaactctacaaaccagaagagagtgggggtcaatattcaacattcttaaagaaaagagttttcaaaccagaatttcatatccagccaaactaagcttcataagtgaaggagaaataaaatcctttacagacaaacaaatgctgatagattttgtcaccaccaggcctgccttacaagagctcctgaaggaagcactaaacatggaaaggaacagccagtaccagccactgcaaaaacatgccaaattgtaaagaccatcgatgctaggaagaaactgcatcaactaacgagcaaaataaccaactaacatcataatgacaggatcaaattcacagataacaatattaaccttaaatgtaaatgggctaaatgctccaattaaaagacacagactggcaaattggataaagagtcaagacccatcagtgtgctgtattcaggagacccatctgacatgcagagacacacataggctcaaaataaagggatggaggaagatctaccaagcaaatggaaagcaaacaaacaaaaaaagcaggggttgcaattccagtctctgataaaacagactttaaaccaacaaatatcagaagagacaaagaaggccattacataatggtaaagggatcaattcaacaagaagagctattttaaatacatatgcacccaatacaggagcacccagattcataaagcaagtccttagagacctacaaagagacttagactcccacacaataataatgggagactttaacaccgcactgtcaacattagacagatcaacaagacagaaagttaaaaaggatatccaggaattgaacgcagctctgcaccaagaggacctaatagacatctacagaactctccaccccaaatcaacagaatatacattcttccaaacaccgcattgcacttattccaaaattgaccacatagttggaagtaaaacacccctcagcaaatgtaaaagaacacaaattataacaaactgtctctcagaccacagtgcaatcaaactagaactcaggattaagaaactcactcaaaactgctcaactacatggaaactgaacaatctgctcctgaatgactactgggtacataatgaaatgaaggcagaaataaagatgttctttgaaaccaatgagaacaaagacacaacataccagaatgtctgggacatatttaaagcaatgtttaaagggaaatgtatagcactaaatgcccacaagagaaagcaggaaatatctaaaattgaaactaacatcacaattaaaagagctagagaagcaagtgcaaacacattcaaaagctagcagaacacaaggaattactaagatcagagcagaactgaaggagatagagacacaaaaaacccttcaaaaaaatcaatgaatccaggagctggtctttggaaaagatcaacaaaattgatagaccactagcaagactaataaagaagaaagagagaagaatcaaatagatgcaataaaaaatgataaaggggatatcaccaccgatcccacagaaatacaaactaccatcacagaatactataaacacctctacgcaaataaactagaaaatctagatgaaatggataaattcctggacacatacaccctcctaagaccaaatcaggaagaagttgaatccctgaatagaccaatgacaggctctgaaattgagacaataattaatagcctaccaaacaaaaaaagtccaggaccagacggattcacagccaaactctaccaaaggtacaaggaggagctggtaccattccttttgaaagcattccaatcaacagaaaaagagggaatcctccctaactcatttcatgaggccagcctcatcctgataccaaagcctggcagagacacaacaacaaaaaaagagaattttagaccaatatccctgatgaacatcgatgcaacaatcctcaataaaatactggcaaaccaaatccagcagcacatcaaaaagcttatccaccacaatcaagtttgtttcatccctaggatgcaaggctgattcaacatatgcaaatcaataatcgtaatccatcatataaacagaaccaaagatcacaatcacatgattatctcaatagatgcagaaaaggccttcgacaaaattcaacagcccttcatgctaaacactctcaataaactgggtattgatgggacttatctcaaaataattagagctttttatgacaaacccacagccaatatcatactgaatgggcaaaaaccggaagcattccctttgaaaactgtcacaagacagggatgccctctctcaccactcctattcaacatagtgttggaagtatggccagggaaatcaggcaggagaaagaaataaagggtgttcaattaggaaaagaggaagtcaaattgtccgtgtttgcagatgacaaggttgtatatttagaaaaccccatagtgtcagcccaaaatctccttaagctgataagcaagtttagcgagtctcaggatacaaaatcagtatgcaaacatcacagacattcctatacaccaataacagacagagggtcaaatcatgagtgaactcccattcacaattgcttcaaaggggataaaatacctaggaatccaacttacaagggacgtgaaggacctcttcaaggagaactacaaaccactgctcaatgaaataaaagaggatacaaacaaatggaagaacattccatgctcatggataggaaaaatcaatatcatgaaaatggccatactgcccaaggtaatttatagattcaatgccatccccatcaagctaccaatgacttttcttcacagaattgtaaaaaactactttaaagttcatatggaaccaaaaaagagaccacattgccaagacaatgctaagccaaaagaacaaagctggaggcatcacgctacctcacttcaaactatactacaaggctacagtaatcaaaacagcatggtactggtaccactacagagatatagatcaatggagcagaacagagccctcagaaataataccacacatctacaaccatctgatctttgacaaacctgacaaaacaagaaatggggaaaggattccctatttaataaatggtactgggaaaactggctagccatatgtagaaagcttaaactggatcccttccttacaccttatacaaaaattaattcaagatggattaaagacttaaatgttagatctaaaaccataaaaaccctagaagaaaacctaggcaataccattcaggacataggcttgggcaaggacttcatgactaaaacaccaaaagcaatggcaacaaaagccaaaatggagaaatgggatctaattaaactaaagagcttctgcacagcaaaagaaactaccatcagagtgaacaggcagcctacagaatgggagaaaatttttacaatctacccatctgacaaagggttaatatccagaatctacaaaaaacttaaacaaatttacaagaaaaaatcaaacaaccccatcaaaaagtgggtgaaagatatgaacagacacttctcaaaagaagacatttatgcagccaacagacacatgtaaaaatgctcatcatcactgaccatcagagaaatgcaaatcaaaaccacaatgagatgccatctcacaccagttagaatggtgatcattaaaaagtcaggaaacaacaggtgctggagaggatgtggagaaataggaacacttttacactgttggtgggactgtaaactagttcaaccattgtggaagacagtatggcgattcctcaaggatctagaacaagaaataacatttgacccagccatctcactattgggtatatacccataggattataaatcatgctgctgtaaagacacatgcacatatatgtttattgtagcactattcacaatagcaaagacttggaaccaacccaaatgtccatcaatgatagactggattaagaaaatgtggcacatatacaccatggaatactatgcagccataaaaaatgatgagttcatgtcctttgtagggacatggatgaagctggaaaccatcattctgagcaaactatcacaaggacagaaaaccaaacactgcatgttctcactcataagtgggaattgaacaatgaaaacacttggacacaggatggggaacatcacacactgggtcctgtcatggggtgggggtagtggggagggataccattaggatatatgcctaatgtaaatgaggagttaatgggtgcagcacaccaacatggcacatgtatacatatgtaaaaatcctgcacgttgtgcacatgtaccctagaacttaaaagtataataaaaagattatttaatatgattccttccagtgtttcaagaaaactttttctccaaaattttttccagcgtataaatttttctggctgaatattataagaggctgttgctaaaaagacatactagaatggcagctttaatctgttcatgataggagtgagcataatacatgatctctttgagtgttctgcctcatccaaatgcagtgtggcaaaggctaatattggaggtaaaacctctaaatgaattttttccagctaccaagtcataggacaatagcagatacgtccttgaggtagaggaccataatgccacagtgttagtagcagtacatttgtccaagggagttccagggtttattaaaattatgataattttaatgtaagaataccattcttttaaacttatgtggaagattgtaggaggttttcacaatgttgtcctttactatcagccatgcctcacataatcactttataatactttcatgggtgttcttcactcagttcatgcaaaccctggcagtttataggctaaaaacacaaaatacagaagcttttaatcaactgaaagagctgtagccttttctcaaggaattatttcaagacacggagaacacagatggatgataaataaagtacattcacatccccttaagggtagaaattgaggaaaatttacccaaaggtgtccaaagggccctgtgacttggtttctgtctaagtcccagtgttagggttcttccaggattttgtggctagctcgtcactcctcatcaagaattaacctctgctgtttcctcaaagtgtttatttaatctgataaccagtttgtctataaattatagagttgaaatgcaacaaatttcatttgaaataatctggcacaaattatctaagcaaagtcgataatgatgttttttcattcatttgtatttaagatcatcagctaagcgttgatatttttgataacacccatgtctctctcagcagttttgtcttctgaggatatgatctggcgtggcagttctcttagcttcagtgttacctctttttgccttgacttccacctttatatttgcccggaatctgggatataggagtgcctctaagagtcccctaacttgcccattttggtgagtgttctggaacctatgagatgctcttttgtttacaaagcaccccaaagccatgtactgtgccaaaaggtgtttatttcctagtttgacaaattagaaagttctaataaatacaatcacttctgccatctgggctgattttatatcagatagaggactgtgttctaaaggaaatcttacattagtaagagcaattttagtcattaacctagagttgtactattgaggtgcaagtcataagaaataatattaggtcgaggttctcagtgggagtgtctaaatgtcttgtgtgtacagggtctcctctattaacatgaagcatttttgagcacagtcagtttccagctatgcttctccctgtctcactatcaccacaaactaactatgaccccacctggaacctaggttaatttccaaataagtcattctttaatctttgtgcctctagattattatgtgagtcaatttcagtagaaacttaaaaagaacatttgaacggactaaacaacacagaaaaacactaataaaatgcaaagcctagatgtgagaggctccaggcctggataatggaacacttcatgtatgcaggtaatttcttttcccaattcaacactgatacacccagcatatcagcttcatgccccattttactcctattatgtagagatatggcaatgacattctcaaggtccacacacatatatgaaaattggtaggactaggggaggagatgagtctgcacttctcctctgaaggaccaggaaagcctggacagaccatctccccggcctccatgactgcacctcctgcccacatggacactcacccctgataggataagaggattccattgatgaggctgagtattttatgatataagttactagagagtgacattgaggtttcaaaaactaatatttataacctaaatttaatttcccccaaattgttacctctttcttcagtgaaaaattgcttgccgtgattgagatttaggtagattccaaatgttcacaactaagcttccaagagcgtattgggagcaaaaactgaatgagggtagagaaacccatcatcatgtattcaacactaaattcaagtggactcagcactgcctttgatcactgctgcttctctgcagagttcaggtttctacttctcacgattccaacatagactctctctctcccaaatgtttggcctccacttgctgtaaggtcgcactctgttcttagtttgttctctgaaccattttatgagggtggtgatgagccatttaatggaaattttatatcatttcagctgaatcccatgggggatcatgaattattcttctggttatagtaatggatttttcttggtgtgttcattaccagtaatattcaaagtcatttcatttaaatctttgatgcttcattttttgttgctatgacattctttcttctattgaatcttcccactaggcattataacatggatctagtatccaggctcagttgtcatcaataataaccacatatgtcaaaacctatgtcttctttccacaggagacatatttttctcttttcaggggatgaacacacactgctgagtgaccccactcacaagtacatatacacaattatgagatttttatttatttgactaataagatgtatcattctcccttaaaattcttcaacccccagaagcccgtgacaaactcttctgcatctgttcataccataaactcagaaaacaaaccacatggtgagtaaaagctcacacggttctggatatggggtccatctcttcccctgcaatgtcctgcagcacctcagaccacctgtcctggttctatcaaggaagtttacctccagcacagtaaagaaaacaattgaaggaggagagaacctgcagatgatagacaatattcaaaactattcatatgacaagggattactatcaagcacataaactcaactgaactgcaaataacaatatgattaataatgggcgaataacatggataaacgtctctcagaggaagacatgcaaaggatagatagatagatcgatagggatatatacatacatatattgctagaaataactaatatcaggaaaatgcaaattcacaatgagctatctttccttaatctttgctggaaagtctgttagcagaaagacaacataaggaaaacaaaagctggccaggcttcatggaaatgaacacttttatagaccacttgtggaaatgtaaattagtacagccatcatgggaaaaaaaagacaactaccatataaatcagcaatgcaactgctgagtgtgtgtgtgtgtatatatatatatatataaaattaaaagaaaaaactaatattgaagagatacctgtcgacccatatttattgcagccctaaacacaattacgatatgaaattaatgtatgtgtccatcaaaacgtgaatgggtaaataaaacggggtatatttacacaatggaatattattcagccttaaaaatgaaattccgctgtttgaaacaacatggatgtaactgggaaccgttgtgttgagtgaaacaagccagacacagaaaaaaaaatacctcattttctcaatgttatgtagaagtttaagaaagttcatcttctagaaggaaatagtagagtagtggttatgaaatatcagaaatgggtggaggccgagagataagaagtggtttgttaacaaatgcacaattacaggtagacaggtgggatacgctctagtgccctacagtgcagaagggtgactacagttaacaatatattgtacactttatgtttacaagtagccagaagagagaattttgtatgctaccaagcaaagaaatgttaatgtctgagctgatgaattagctcgttgttctgatttggtcaaaccacattgcacagatgtattgaaatatcacactgtaccccataaatataaacaatcattatctgccaacttaaaaaatcctttaattaaaaaagattttatttgcatacattacaaatgattcaacacagagccaggaaaatataacatttttatttgaaatagttaaattcctaacaaaatagttacattctttggcaccaaactgtgtatttgatcatggtaagtatagacagacttatgcaaagaataatatattttaaacttagacttctacttaatactataaataaaaataattttagaacagctaagtaaaaggaataaagttgaggaaatgtgtgtgtggtgtgtgatgtgtgagctttttcttgtaaccacactgtccatggtggatgtgtggtgtgtgtgtcttgtgtcttgtttgtgtttcctctgctaggggttctctgtgattctaggatctgtagctccagtgtgtttcaaaaaattgggaacattcttagccattactttttcaaatacttctctttatctgcaatttctccttttcagaattaaaatatacatatactacactttttgatattaatgtttagtttcttcagtctctgttcctttgcaatttacattgtgaattttctagagacaatttaagtgcatggtttcatttaaaagctgagccagctctactgaggggtatgcccaaagtttgctcaatgtttatactgcattgcttttggtttcttatgcacttccatttgattctttcttaatatttatatctctcagttccctatctagtcctgcattatgtccacagtttcttgaagagattctcacatatgaattacaggtactatacatatcttgtttaatcagatatttctaatatctgtatcatttacaaatctcattctgaacatttgtttattgtgactttagtatttctcattaatataggtaataattgttgttgataaccagacatgttgggtcagacaggggatattatcttattatttcattttatccattttctgcctgtatgtgaccacactttatctgtgccaggcctttaatgtggaaatgtctgaatcttctcagagctacatgtgacatttacttgtggagtggacgtcagagttgaagtctgctcttctgtgcccgacagagacttcagatcctccagtgataccttgtttttctttcctgcttggctgtgtctctacacctgttccctcctccagagaatctccttcagttccttcaggggggttaagatgttatattcaactgacaattgtaaaattgtcatagaataaagggatatttagaataaagggatattttctgacctttcatgggtccatattgtgatcctgagtctgggtgtgacctttccattgtttctgaacttcctccagatgagatgttggtctgtgtgttcttgctgttttccctgggtgagagtcctcttgttttccccagttgttccctcccacagctccaatgttctcttttggtgttatcatcttccagatttgctgacctgacccatagattaaggctctgattcagtatgaaagggggaggtacttctcaatggaacttaagtaaagacctctttttccatctcattttctaagggattgtcccagtgcccctaagatcctggttttggtggcttgcccctgcagagtaatttcttagttcctgcaatggggataaaggaggtgagtctgaatgcatttcaaagtgtgggttctttttctctcacagacagacacattggcacggaaagatttttgtgactctccacattattgggaaaactgattcaagaggataggaaagctcttcagtatgtggtccctgagaaattcatacaacaccttttaccacacttgacttcaagcaatccaatatatatatgtgtgtttttctcttgtagtagcctacattttacatgccagactctgcccagttcagctcatatcctggccttgttactgcctacaagaacttgcctctccctgcatttcagatttgatgtttttcttaaaacttcaagtatttaaagtatttttaaaactttgcaaaatcccattttgctctgtttacctgatattgttgatgttgttattgtaaaaagtaagtagaatatattcctcatctatgtacgtttcaaaactgagttgcagctttttttggtaagacccagagtcataaaagactgcaaatactgttaagctgcttaacagaaaaacaaatgctggtaaatgtgttcactggaatactacccgtcatttataataaataaatgcctgacacacagaacaacataaaatatctaagtatttataccgagtaaaatatgccaaacaaataagaatatatactatgtcatttcattttttataaatgctgatgaataaaaaatgcatctgaagtaaaataatgaggatccagtagttgctgggggaaatggtagaagggaaggggagaggaggaggaatacagcagaataagaggaagtgttgagaagaattcacttgtccactttcttgataatgacgacagttacatcacgtttattaattgcacattttaaatatgtgaagtttattatctttcaattaagccacataaaatgtattacaagcaaatggaaatttagacaagcacggagtaatagaaagatccaaacatatgttaaatgtcagaagtatctgaaaattagtgtgtctggaccctagttctctccatattttcaggtgagtgctggtggcaacatcacacatgctcttactacagaaagtgggttctgaaaaccacaccaggcacgtccagctttgtcctggagttggtttagggggatgtcacagccagtgacggaggagcacagggccagataccagcgttcacttatcccagacatgaactcctggatgcatacagagccccctccacttgtgggtttacttccacttctgtaaaaggagaaaatattgactcctacagaacataatttacacaaatatttacagatgaaatagggtgatcagggcaaagtgtttatcacagcacaatttcataagacagcatattttccaaataccatcgtcagcaaacatctgcagggcaccgtcttattatctgggtacagcctattcctccagcgtcccaccctagagcttgttatatagtaggagatatgcaaatagggacctccctctactgatgaaaaccaaccgaaccctgaccctgcagctctgagagaggagccttagccctggattccaaggcctatccacttggtgatcagcactgagcaccgaggattcaccatggaactggggctccgctgggttttccttgttgctattttagaaggtgaatcatggaaaagtagagagatttagtgtgtgtggatatgagtgagagaaacggtggatgtgtgtgacagtttctgaccaatgtctctctgtttgcaggtgtccagtgtgaggtgcagctggtggagtctgggggaggcctggtcaagcctggggggtccctgagactctcctgtgcagcctctggattcaccttcagtagctatagcatgaactgggtccgccaggctccagggaaggggctggagtgggtctcatccattagtagtagtagtagttacatatactacgcagactcagtgaagggccgattcaccatctccagagacaacgccaagaactcactgtatctgcaaatgaacagcctgagagccgaggacacggctgtgtattactgtgcgagagacacagtgaggggaagtcagtgtgagcccagacacaaacctccctgcagggtccccaggaccaccaggggcgcccgggacactgtgcacgggtctgtctccagggcaggtgcagttcctgctgagggctggcttcctgtcatggcctgcggcgccctcattgtcaaatttccccagggaacttctccagatttacaattctgtactgacatttcatgtctctaaatgtaaaacttttttgtcctttttgtttctttgtttttgtaacaggaggacacaccctcacctccacagaaaccacagtgtcactttgggggcagatgatccttctgtggtcagcaggatgaaagttccgaggaatctcaggggaacccgaagagtgtttgccagttagactcagggcagcgacctccacgggaatctctgattagaacaggctttgagttctgataggagccaagagagacgctcacacagggtcagggtccttaaagcctgatggttttcacagctatcccccctggtcttgtaaaactgtgtacatatgactcagactgattcacttgaccccctttctgctaatccattttccttctctgcatacttgattctcacaattccctttcttctcttccccgaaaactgaggatgtgttttctgtagtctaaattccagggctcaggtctgcaggacctgggtaggctacggggactttctcactcaccattgtctggactctcctgttgtcgtctgtgaacagagatgtttggaagatgaagtggacattagtcatgaagggaataatactagttttctccaatgggatactgatgtagagctggatcttgtgcttctcacactgtcacagagtttggactctcacccgtgactttgaggagagctgaggatggacactccattgtgctgtgagctctgggtaacaatagtagggccctggctaggcagcctaaggtcaatactgctggccttcaggaaagacaggctggaattcctgggaagacctgcatctgccgtccaccatggagtcccatcgtcttctattatgccctgattgaatcagccccacctaggttatctagaacactcttcgtgacttacgaaaaaataatgggaggctctactaacacctgtgttatgccatgggagcaacacctaagctagtgtgtgattgagtagatgagactgtggtctagtcaaggtgacacataaaattaattgttgccattataatattttattatatatttggcaatatagtcgtgctcatattataaatacttttgctacgttgttgttatgtcagaagcttttgaataagaacagcttcatcttgaataggggctaggaaaaataagactgagacctgctgggctacgttcccagtaagctaaggcgttcttagtcacaggatgagataggaggtctgcacaggatccaggtcataaagaccttgctgatgaaggttacagtaaagaagctggccacagcccaccaaaaccaagacagtcacgaaagtgatctctattcatcctcactactcattatatgcttattgtattgccttaacatgctaaaagacactccccctagtgcatgaccgtttacacatgtcatggtaacatcaggaagtttccctgcatggtctacaaaggaggggaggaaacctcagcttcaggaattgcccaggggactcatgaataatccatccgttgtgagaaatacattcatccctttgagagaaaatgcacagggggtggaatgaggctgggaagctgatggcacatggtggaagcctgtccctgagtgaaggagagggggaagctggattgggtggaaggtctctatatttgtgtgctgtgcaaggaagtgcaaaatataattgagttttgtgcaagtcagtgctgcctctcaggtgatccccatgactcccagaaatggctctgcttaggaatccctggggagtcagtcatttcattagagtagaccacaggacatgggcttcagcacacgccatgccacagatgtcagaaagcagctgctgggaacctgacccacctgcattttgctgcctgtaggaaaaggcagggaggtgcatcctcagggacaacacactgttttggatttctataaagaacgctgcttttactgtgttttattggaaaatacatgaacaaatgtgagcctgcaaacaattgtaattttcagttattttaattgcattcatttgtaattctgcatgatatgctgacacagagtcgcatttttcatagatattgttcaatgaatcaagaacatgcattttccactttcactggtttttctccgtgtgcagagaccttgagtagagcctgtctggcccttatccacactatctcttgtgtccccgggaaaaagcagagatttgcctgactgcagaatctggggtaggagtctgctcagctcacagcctgcagagaagcccagtgaagttttatggagtcagagagctttcccatgtggggaacctctagcttacccatggccagagattactggtcagctgtaattgagagtttaacaattagagcactcagaagcctatctcatcgcagcttcattatgtaacttaccaccattagactgcggtaataactcaatcttgatttttctgaccccattttctcatcttattcatttgtaaattgggttatagaaaatgttatgttttagactctgattcaaatctcagaagtttatgaactcatcaggaataatacaaaatgtgtctagttttggggaaatgtaaatgaatgtccatgcagtgtgtgtgtttgttgtgtggggatatgtcagtcacaccccaatgaacatgatttctgaattacatcatcaaactacaattagatttgctgaaaattgcctgcagtaatgtctgtgatgatgaacctgtcaccttgttgtgaggatgctcagtgcacaggcgaggttgcacaggagacatccaaggagcagcccccaggcttggcagaattcctggccaggagccagacataggactgggtgtctcaaaagcagattccccaaccccatccctttatttggactgcatgggcatcatgaggaccagcaggagatgctcagaactcactcaaggcagagcaccatttaggagcaggtgcagcgaggaaacagccagagaacctctgactagaagcttgggttgttttcttttgcttaagagcatccaagcctaagtatatcaaccactatatgtatatatataagtagactatccactatatatagagagagatagatataatctgtatatatatacagattatatctatctatatacattatatatacagattatatatatatataatctgtatatataagaaagttatgagttacagattatatatatacatttatatatatacatttatatatatttatatacatttatatatatacattttatatatattatatatatacagagcaaaacgaggttaatatgactctgccattaactccttgaacctgggtcattttttctgagaatgccgtcatctacagcatgatggttctcatgtcaaaatcaacacgcatagttagtcaccatgaagactgttttatctcatggtagaaatgtttatttaattaaaaaattacatttcatacgaaagggtctgtattatttctttctcacactgctgtaaagacatcacctgagaccgggtaattcgtaaaggaaagaggtttaatggactcacagttctgcatggctggggagcctcaggaaacttacaattatggtggaaggtgaaggggaagcaagtcccttcttcacaaggcagcaggatggagagagagagagagagagagaaggagaagcaggataaagagccggaaacttatcagacaaaccaatctcctgagaactctatcaggagaacagcgtggaggaaaccactcccacaatctaatcacctctcaccagacccctcgcctgacacttggggtttacaattcagtattagctttgggtgaaaacacagagccaaaccatgtcagaatttctaggtgagaattggtcaattcataagttattagtgaagtatcagaaaaataaatagcaccagtgttgttgttatccagttaatttataaaccatgtcaatatccattttatgagaggtgtaggaaaagtgtgagatggatagatagatagatagatagatagatagatagatctaccaaatacaatatatataactatattatatatattactatgtatataatatgtagtaagtgatatatggtatatatatatgacattaattctaccaaatacttcacatatgtatgtgcatatatatataatattaggtatgatatatatatgaaatatcaggacatatatatatatatatattttataatgtctcctgggatttagtgttgaattttttaatatctacatgtattccaggataaatgttggtggacttcataaaatatattctaatttttatgtgcaagatgatcactttcaaataaggtttagctacagaaaccagatgtatctttctaccagaaattactggaaagcacagtgaaatttcttaatcaggattttaagatgcttgacaccactcaacaaagacagtgattactaagagagagaggaaataagcataaggagccctccggtgaatgcaggctcagatacttcctcaaaggtgttgccaggctacagtgctggagtggaaaccatgtggatttagcattaataaaatggagctggaaacccatgtaggccaagaagtgtggataccacaggatagcaagtggattgcagaaaactgtcagagagtgaaccccatagatggcaggaggaacacccagacttgacagagtgcagatcagtgtgtagaaagcagggaaggttgtacgtgagaacacaccctgctgcaggaagctctccctaaaatccagagccatggtaaatatatgaatatacacttacaaactttaaaacatacggaaaggcaccataataaagtcaaataaaggaaaggtgggttggctacattaaaatataaaaagagtatttctgagcaaataataatacttatgaggggaacaattttattctaccatggcaaatgatttcagagaacaacattcgaaatgcttatggccataatgaggaagcttcaaacaagtatacgaatagaattattaccagagtggtagtaccagagccctcagctttctgatgaaaactgattcttattatgaaagctaattattattataagcttattattattaacactaattattattaattataatattatataattattataatattattatgaaagcttattattattatgaaactgatattactagagccctaagctaagtgttattaccagagtcctcagctttccgatgaaacaacaacgtctgataaaaattgtaataacccaaacatataaaatcaattcaaattattctaaggatgcacagtaaataaaaatcattgattgataaagtgtgctgctatagactgaatgtttatttccgccctcagacatttgttggaattctaaccccaatgtgatggtgttacgaggttgggccgttggtaagtgaatgggtcacctttggaagatgactaggccccatccaccctcatgaatggaatcagtgcccttgttagagactccagaaagctccctctcctcttccaccaggtgaaggaaaagtagaaagatggtcaactatgaaggaggaagcaggttctcaccagataccagtttcaaagcatgttggccttgcacttgctgaccttcagaattgtgacaaatacatttatgcttgatctgaaccacccagactattctcttacagcagctaaaacatcaagtctcagctagggcagtgagggcccacaatacttgagagacgagcatcaccctctcctttccagttcaggatgacagaagcttgatctcgggctgaactgacaagcagagagtccttcctctcccccagatcgcagttgaggccgtggtgtcagatctctgtggttgagagtgaattccagtctgtgatttcatggatgcctttcttcatctagttccacttatgagacagagattccatgctatgagttataggccaagaatagaggaaccccaattattcccacccagctcacctgtagggcagaggatctggagagctttctgggtgaggcacaaagagactgtatgagtccacccctcccatgcagtttcctgtacttaaagcagaggtgtccctctgacacagatgaaccctttcttccgcaccaaggcagaggcggttatatttttacagtggcagacagagggcataaaaacagaaatgcagagctctctctaatggatgtgactttatttgcagtaaaaggagaataatttcaaccctaggttttttctaaaatattataaatatttatggtaagttattaatagaaagctggtggcttcatgagagcaacacattaaacaggaatccactcatttcagcggacagaaggagaaaaaccataatttaggaataatgagctgggcactgtggcactgcctgtggttccatccacttgggagtctgatgtgagaataacacttgagcccaggatttcaaggccaacctgaaaacgtagctagaccccatttagtaaaataaataacattttggggtcaggacaaagttcaaaaactgcccctgaaatgaagcccaaatttaattgtgtaacactgtggattaatggatgacacaacagtgtcaccatgcctgctgtgagtgcagtgtaacacttggatgacatatgaagagatacagacacccaaacagagacatcagacagtgaagctgtcaaaggctgcactgccgagcgtcaggctttttatggaaaccgtgtgtacatctggaactgcacctgggaatgacgacatcaaccctttaatagtgtcggggaaagagacgtcactgaaatagacaaactaagggactcaagaaataaatagagcgattggttttaccaatacaccagagcgttttgggtgatcactattcagagtttctgaattgtgttacctaactgtcattcagaaaataattatgagatacacaaagaaaaaaataacgtcacgaatgtacaggaaaatttccagaaaacacaaactgtctttgagttggtacagattttggacttaacaaatggagacttcaaaacaattattataaaaatgcacaaatcacaaaggaatactatcctagaaaagttaaggaaggtatgatgacagtatctcaccaaaagttaatatcaataatgagagagggtttttgaaagaaagttatagacacgctaaaattaaaaacacagtaattcaaaactatatgtcagaggtgataagcagtatacttgaacctaaaaagaaaaaaaagcacacttagatatatattagtagatatgctatattcaaagaatagtgaaaattgcaataaaatgaaataagcttaacataaaaggtggacccagctagacaaatcaacatatgtttagtgtgaacattagcatgagaagagagaaagaaatatgtcacaaaaatatgtcataatataatgacagataattccatgatttttatgataaatactaatatacacattgaagtatgaatagctcaacaaactcaaggtaaaataagttataagagatcctcaacaaaacacattataataaaatattttacagaaaaactactgagaaaatcttgaaggcagtgagagaaaaacaacttctcatatacaagataattctatcaacagctgatttctcatcaataacagctaatgctaaaaggcagcaggatgacatattttccctttgtatcccattttatcctcaaaggccacctgcatacaaagtagaccagtcttacaagaaaatcacagccctagtgttcttctctcaaggagcccggctatggacctaatggtgccctccccaaagtcataagtataattcccaacctgcaatgttacagtatttggaaatgagacttttgaaagtgatagagtttgaatatttgtcctctcccaaggtcatgttgaaatgtaatcaccaatgctggagggggggcctggtgggaggtattggataatagaggcagatccctcaagaatggcctatgcaatccatgtggtgatgagtgaattttctgttagttcgcatgaaatctggttgtttagaaaagtctggagcctcctccatctcttctcttgccctttcttggccccatctcttctcttgccccttctcttgtcatgtaatgcacctgtgtgcctgctgcctctttgccttccacaatggttataaactttctgaggccctcacaaagcagatgctggcaccacgcttattgtaaagcctagcaaatggaaagccaaaatgaaacctgttttatttataaattttccagcctcaggtactctttcctagcaatgcaaggacacagcaacacagaaaattggtatcaagaagtggagcattgctattaaaaatatgtgaaaatatggacgcagctttggaacaggataaccgtcagggatttggaaggtttggagggctcagaaaaagtcaggaagataaagaacagttgggaaagttttagagactggttaaatggtttgaccaaaatgatgaaataaatatggacagtgaagtcaaggcagagaatgcctcaaatgtaaatgagaaagttatagggaagtgaagtaaagatcgcctgtcaagcaaatcacttgactgcattatgttcatgtcctggggatctgtgcaagtttgaacttacgagtgacgacttagggtatctgacagaaaaaaaattgtcagtagcaaagcattcaagatggagtctgcctgcttctaacagtctaaaatcaggtgcagaagtgaataaatgacttaaagttggaacttctatttaaaagagaagtggaacatggaagtttagaaaatgtacagcctggttctctggtaaagaaataatccagttacactgtgaagcaaccgcttgctagaaagattagcttgactaaaaaggagctgactgtggtaatacgaaacaataggaaaatagtcttgaagtcaattcagaaatctttgaggccaattctctcattacaggcttaggtataggagcagagaatgtttttgggggtgagaccagctagggctcaaaggtacagctcggttcaccacgtctgatggcgcaagctgtgatccttggtggcttccatgtggcataaagcctgggtctgcacagtatgcaagagtcaacatggcttggtgactggcctctagatttcagaggatgtgtgagaaaggctaggtgccagaaatgagcctacctcagggtcagagtacacacagagtaatttttccagggcaatgctgaggtgaaatgaagagttaaatcccccaaaagagatccccaggagaacactgtgtagtggagctgtggagagaaggtcactggccctctagaacccagaatgggagatccaatagcagcatgtgccccaagcctagaaacgctgaaggcactcagctctaaactgtgacagcagccgtgttggctgcactgagaaaagtcacataagcggttttgctctcagacttgcgagcccataattgcaccggctgcaagatgtggagtcactggtcactttggaggcttaagatcgagcgcctgtcctgctaggttttaggcttgcatagagcctgttactcattcatttggcaagttcctctcttttaaaatggagatgtttacccaatgtccgcaccaacattgtacctttgaagtaaataagttctttctaattttacaggctcacagatggaagaaatgtgggcatgaatcttagacaagactttggactttaatggtgaaacaagttcagatttaaggggcagatttcgaggggtgggtattgggaagaaaatgatcccattttgcagttgagaaagatataagattttgggtgataagagttatgtggcttccatatatgtccattcaaaaatctcatgtttgactgttatccccaatgttcgttggggttttgcgttacgggggcggattcctcctgagtggcttagcgccatccacttggtgacgagtgagttctcacatagttagatcactcaggatctgattgtttaagggagacgtggatctccccctttccttctttcccctgctcaccatgtgacactcctgcttcccctgtgccttttaccagaaatataaggtttttgaagccctcaccagaagcagatagcagaaccacacttcctgtacagccttcaaagcagtcagccaaattagaatttattttttataaatttctcatccccaggaatacttttatagcagttaaggaatttctataagaaagaaagtactgaatttaaaggagacgatgagggtgaaacatcagaatgaaattactgacctcaggagtaaagacaccagacagtctctctctctctacttctctctctctatttctctctctctctctctctctctcacacacacacacacacacacacacatgccctaaatgaaaagatcatatgatcaagtaacaatatgatggctgctctgagccaaaagtagaagcctcaaactaaacctatcttgtcagcatcttgatcttggagttcacagcactgataaatggaataaaattaatgttgcacgagtcaccaagtatgacagtttgtaatggcagcttaaactgacgaaagaaaatttggggttaagaagaggaaatctgatgttacaattatttgaacattgtgaaagtagcttggaattgggttatgtgtaacaggatggatacctttgacatatatgaagaaatttgcatattgagggtcatgctgatagacagaaatgagtggttttggaaaatggagcaacagtcatccttatcataaagttttttaaaaaaaacttggctgggcagtgatataatatttagtgaaagagaagttgtgagtagtgagaaattgtgagtagctgagaatagttctaagtgttgaagatattttgcttgattcctcctgagtgcttaaaataagtgaggtagataaattaaaatcagaaaaaaataaaagaaaaagaatacaaaagctgagggcttagaaaattcacaacctatccatattgcaaaaatcagaaactgtattctacaaagaacactgagtatatggctcaaatatcactcagtaagaagcttaagatactctatgaaaagaaatatttcaggttttaaagaatgagaattgacctgagacaaatttgatgaatactgttagatttttcagatttaatggcctggaataatagagctacttggctgcaaatgtacacaattcttccagaagagagaaaaataagctttaaatttatttagaaaccatcagaccactgcctctatttcaacagaccagaaagcctgtttctaaaatcttgaggaagaaaccacccaacagaggcttgggttgggagcacccagcaagccctgtgtgtagggctgcatgaggcccttgacatgggagctgggcctagcagtgcctcaggagcggtgcctctgcctgcagctttggagctgattctgctgctcgaataagctgagaaggaaaaagaatgtttcagagaagattacagtggaggcttaaagcatatggaaatttgttttcctatgcattgtatttgctggagacaaaccacccattttaccccctatttttttctttggcaatgaagctttctattctatgcctaattcaacaggacacagcagcggctgtatccagtttgacaagattcagcatgaaaggttcctattacctgtgccggatgcatcactgatatgcggccaccagtttcttaggttcatatcactttaagggaccaaatacaaatgtcaatagcatatgtcattcttaaactgcagaaatggtgtcaaagaagaatgtggagataagagagcaggaggaattatgaaaatccagatagcatcttctcttctagagtggaaggtacactagtaatttcatgaaacaataaaatagatgaaatgtgtcatcatcatggagtgtctcacagtggcagtgcacaaataaatttctaaaaattccataaggtaggtgtgatggatgaggcttatttccacacagggagcccataaatacccagataagtaaaaaatccaacacctggaacgaaaaatgcctcatcttgacatcacaaacccatctcagtaagtccgaggagtaatgtggaaatgaaacggaaaattcacaaacacatttattgtgaaatttttagcacatgtttgaacattaaaacagaattgtccacaattttaggaaaaccactccatgacaatgagtcactacactcatagaaacaccactgagtcaacagagttctaactgtcagcaggtcagtactgaggcctcaggagaatcaaggctctagggtacattttacagaacccagaattgagccacacaatctatagccaaatgatctttgacaaacttaacaaaaattaacaaaaatatacaccagaaaaaggacaccccattcaataaatggtgctggggaaatggaaatgaacatgcagaagaacaaaactagacccctaccctcaacacatacatactcaacacaaaatgaattaaagacttagatataagacctcaaactataaatgtactcaaataaaataccaggacaactcttctgggcattggctgaggtaaagaatttatgactaacaccccaaaagcacacccaagagaaaaatagacaaatgagacttaattaacctaaagagatatttcgcagcaacagagtgaacaggcaagttgcaaaatgacagaaaattttcgcacaccttgcctttgacaaggaactaacatgaagaaattacaaggaattaaactatacaacgacaacaacaggaagaagaaccaaataaccctattaaaatgagcaaaggacatgagtagacatttccaaagaacacatacaaatggataataaatacataaacaatgctcaacatcactaaccattagggaaatgcaaattaaaactacaataagatattatcttacaaaagccacagtggctattattaaaaactcaaaagtatcagatgttggtgaggatggaaggtaacaggaactcatctacactgtagatgaggatgtggacgaggacaacctctatggaaaatagtatggagtctgcccaaaaaactggaaatagaactgccatttgatgcagcaatcccaccactgggtaactactcaaaggaaaataaatcattacttcaaaaagatatccatgcttctatgtttaccacaaaactattcttaataacacacatgtcaacctgagtgtccaccaacagatgattttataaaagaacatagcacgtatacacaattcaatactagtcaaccacaataataaatgaaactgtcttttgcagcaagatgcctagaactgggaacaacataattagtgaactaactcacaaacagagagtcacatgtcacacattattatttataagtggaaggtaacaacgtgtccacaaggatatggagagagaaatgatggacaccggagacttagaaggatgggaggtggaaggtgggagcatgaggagacattacctagtgggtacaatgtacattatttgggtgagagtacactaaaagccaagaccactgtggaatatatccatgtgcaaaagttgcactcatagcctttaaatttatataaataaatgtacaaacaaaaaaattaaaaatataaaataattaacagttgaccaatgatcttaaagttaaaatttagaccaggcgtggtggctcacgcttgtaatcccagcactttgggaggtcgaagcaggtggatcatgaggtcgggagtttcagaccagcctggccaacatggtgaaaccccatctactaaaaacacaaaaattgaccagatgcggtggcaggcacctgtaatcccagctactcgggaggctgaggcaggagaattgcttgaacccaggaggcggaggttgcaatgagccgagatcatgccactgcactctagcctgggcgacagagcaagactccatctcaaataaaataaaataaaatgtaaaaaatgatcaataaatgaaattactatcagttgaaactcattaaatttaaagacattttctactcaagtaactataagaacatgaatgtcaagtttcagatgggaaactattttcaaatcagataaccaccaatttaattataataagaactctcaggactcaactgtgaaaaaaaaaaaaggaaggaaggaaggaaacaccccatggttaaaataggaaagggttggtgcagacatttcatcaaataggatgtgcaggtgacataagcatttaaacaggctcttaacaggatttcccattaagggaatccaaatcaggcccacaatgagaaaccactatacactttttagaatggctgaaattaggaggaaatacaggtaataccaatgctgatgagcataccaagttcctagtgtctacgacattgttaatgggactgcaaaatgaaacagctactctggaagataatttttagttttttctgcaatcaaacatgcccttaacacatgacctaaatatcccactcttgaattttgcttcagagaaatataatcttatattcacacaaaacctctattcaaatattcaagatattgcgtgtgtgtgtgttagaaactaaaaataacataaatatctcaaaatctgaataggtgaaaaaactaggaagcaactataaattgaataccatcagcaataaaaaatatcaaatgatcgattcacaaaccattacaggtggaactccaggcattacgctaagtgagaggaagccagtctcgactatcaaagggacacagctgtaagcagcacggtcatcctcaggtgtcagtggtttgggctgggctttctttgtctctttcctgaccagacccagatgttgagctctgccacttggagatggaaaattctactattttcaaccatgcactgaggtgtgaattacttcacagactgaccaaacaaacatgggctccactgaagagtgtctggcatttgtttcaaccacaagagaacttttcccagctcttccatgtccttggttctctcctgcaagccaggagccctggagtgtagcctgcatctcccatgtatccacccagctccttccaagggtcttccaccacaccctccactgtttgtgagagcactgggaggctttcaatttttccacattctgttgttactgaagttaggatgtttaggacttattaagatcatattttatgactgaatttcattgccccctctctcctgggacagagctcctaaacaaggttctgcaggtgtagacaaagttgagctgttttattcctcagcctaggagctgagcgctcagtggagggtcggagaggagcttcccaccttctcagcacttcggttatggtgggggagaacctctgccataggacagagctaggaaccagagacccaatgttcccagtggcgctggacccaggggagagcctccatccatgagtggggctctatggaaggagtgagtctctggctctcagtagctcttgtccagcactgaacctcagcatcatgtgctgtgggcagggtcagagggccaacgtactgccccctggggaagagtttcctctggtgggagttggtagaaggtgccctgtcttcttggctgcatctgtccgcagtggagtttacatcatgctgagctgggatgtggaaggaaggaagagcaccttagatcaaatacgatgactggccttactgagttttctatattttcttaaataaatatttcttcacttgctttatgctgttagatcctttccaaaccctgtaattttttcaaaataattttcactggtctcatgagggcatggattcattgagcccctcatgctgttaaagagaaatagaactgtttttttttttcactttttagcgaacatccatgggttataaaataattagttgacatttcttccaacactttacagataccatcaactttcctcttgcttgtgaggttttaaccagaagaatgctatcatcatcttttctgttcttttggaaggaatgccccctctactcacctccacttgcctgcatatatttctatttgtctttgcttttcagcagttttaataagatttacctaaatgtgtgtgggggaagcagggggtgttattctgttgttctgtgttctctgagatgcatggattcaccatttactctgcctccattttggggaacacagttagaaaaaatgtcagtgtgagcccagaaacaagcctccctgaagggggaacaggaccacccgggggcgctcaggacccactgagcacaagagccagcctcagggcaggtgcagacgggggttaaggtctggtttcccgtcagccctgtggcttcctctccataaaacagtttcctctggggcacttctctggattccttatcctgttcttcctattcttcctgaagaagaaacatttgtcgtaacaagagaaaaattttctcacatgcaccaaaggcagagtcacctacagtcacttattccggtttctcaatgtgaataaattatcaatgcttctgaatttaatcagctaaacctattaaaggtgcggtgtttaactcaacactgccgccagctcaacagaactccaagggtcagtgagcaggagggaggataaagggcatgctgggcactggggcagagggagttagcatccagtgcaagagaagaaaggccccgtggtggtcactgtcaggacttcaagcccatagttccaattgtaggtgaccacgttcaaaagaagagagacctcatccatgattagtgtgatgtgtcaagtctgatagtgccacactcacacctcaggtgattatgaaaagatttaccaactctactattgtctgctgagagcagcacaggcctctcaagaaattccaaactggaatttcctcaatggaacaggaaaggaggctggcttagggctttataatgatttggtggtggggtcggggggtcatttattctcaggagaaggagcttgtgtgatttaaacctcacattggcatcagatgagggagcttctacgatttctgactagatttcccatatgtgggggacaagggagaagaagaataaaccttaattcatcagcagcaagcaccaaaataggacctgacactttattctccctagcagcttaagaaaatgagtgaaaaagagagatgagggtccactgtgtgtgaaaagcaaacagaaataaagaaaataaaaatttttattatggtaagcacataataaaaagaaagagaagaaggaatgagacagacagtggtgctgaatcaatgtcctgggtggggccttttctattatccactgtcatcagtttattctgaaggtctcaggtcagcttcctgcttcaaactatcacaggcccttatagggtatataaaaatccttataggatatccacagtttgtcatactttactaaagtagtctaataattagatgaagttctgaatttaatattcagttataataaatattaaaaaataccacaatctacaaattaggaaaccgagactatatttttatcaagggttacagccatcccatatgctggaaagcatagttttggtaaagatgagagacagacactcccaagaagaaggagttgggcagaagatttatgctgaactgtttggctaaacagacttagtcaacaggttacagagaggctactgatgttcatggaggtggtgctgacacatgcatactgaacacacatgcatttaacatgtgagtcctgttcaattgccagtggtgacttagcatttaaattcattacagtcaggccctatgtgcaaacagcagaagcagagacacaaaggcactcagggtgcagcctctgtaaacagccagagccaggccatggtcagcggtctctgatcaggagaaaggtcctgatatcaaatgttcaatcaaagctggggttatggcttgtggaacagggggtcagttcagcagggatgggctgcaattgtcttcatagtgcttgtctcagtgccagtgcttactgagccaccagagaaaacgaataacctattggcagttagaacatagtttatcttttaagtgtagaagtgagtggcaaaatcctcgtctagcaaggccttaggtcttgtttataatttgacatcttactgccactgttctgtcagtcttatgatttctattttaacataagtgttggccattgctgcgtctaaaccacaaagggaagaaggtataacgaggcgtgtctgatctcttgtttagacatggttggaaacagtttttggatttttacggggttccctaggccaagagatggactatttaatcagtcgtgggttttagggatttatttttaggttacagtttataaatatgaacccaactattgactttctgcaatttcactgctgtgttgtggttaaaagtacctgataaaattccttccaaagtggttcaagagcaatattctaccctgatgtttcttacaatagatataattccctgctttaatgttattagaggctattgaaaagatgtagggaaatgatggtttaatctgttgatgaatagtgtgggtaaaatgcagtcatcactttcaacactttgtcatgcatgcatgtaataggacagaggtgagcattgtgggtaaatctctaaatgtatgggccttccagctaccaaataataggctaataactgatgtctccctgaggggattaactataaggctctcttgctagggagagaatctttggccaaggaagttcaagattttcttaaggtttggacaattttagtttaaggatgacaattttcttcaacattttcagaagattgtggatgggatggatgctatgttgtatacataatgctaatgccttccatatttagataatattataaacccctgactgataagactgcttgcttggtgtgatgacccactacaatatgtatactttcagttggtatgctatgtcattttccttcaggtttttactttccaagttacattagtcaggtctctaaaatgcaggactgcatctaaaatgtgttattttgttgtgcattttcacatgttccagaaggtgggagaaatttctttgtgtgaagagcatcccaaagtcaggcactcctctagaacacgtgtttaatccttgtctttggcttattgatgagctctgttgactgcaataacttctgccatccgggctgacttgacatcacatagaggaacaaattctgaatgaaagtttgctctactcaattgagtgcataacctcatttcattactgatgtataatgcatcagagataatattagatcaaggatttcaatgggaatctaatctaaaagatgtaaacaaattttcataatttagataaaattactgtgagcacactgctgctattcagccatgtctcctatcacactgaatccacactaactttgacctaaaagttagcatttgttctaatgttcagaattgttatttttatcataacgtctctagatgattacagagtgtggctatgttggccatcagtaaaggaaagctattttaactgaatgaaaatgagacaaagcacacaacctaatgtaatggaagtcaggacatgagtgtctccaggcttttgtgtttcaagagttcatgcaccaggggatttcttttcttacttgtacacagagcaacacccaaaatgttcatttcctctcccatcgactcttatcatctgtttctatgtcagttagctttgaatttttgaccccagctgcattcaagtagctgcaaataagcgtgatttcattcttttttatagctgcatagtattccactgtgtataagaaccacgttttctttatccagtctataacggatggacatttaggttgattccatgtctatggtactgtgaattgcacagtgatacacacgtgagtggatgtgtttttttgttacaataatttgttttcttttgggcatatacccagtaatgggattgctgaggggaattgtaggtctgttctaagttatttgagaaatctctagatcgatttccacagtgctttggccaagttacattttcaccaaaagtatgtaagtggcgcttttctctatagccttgcctgcatctgttaatttctgatcttttagtgatagcaattctgacatgtgttagatagtatgtgattgggttttgatttgcacttatctgatgatttgaggatgctgagtatttttgtatgttagttggccacttctatgtctgtatttgaaaagtttctgtgcacgtcccttccccatttttaatggggttatctgatttatgctgctgatttaagttccatatagattactgacttgcacacacggagaaagccagtattcccaactaaatagaaaaacataatcacttgtaggtatagacatactgaatttggaatggtcatggcttgcatgttggtattgaaatgggacagcaactttggaaaatggtcttcactgaaaatctcatacacaagtgtacctggtgtcaccacttacagtagttgaatggagaatacaactcaagtgcccatcgactgccacagggatgaagacgccgcggtgtgtctgtgtgtctctaacccacagggatgaagacgccgcggcgtgtctatgtgtctataacccacagggatgaagacgccacggtgtgtctgtgtgtctgtaacccacagagatgaagacgccgcggtgtgtctgtgtgtctgtaacccacagagatgaagacgccgcggtgtgtctgtgtgtctctaacccacagggatgaaggcgccgcggtgtgtctgtgtgtctctaacccacagggatgaagatgccgcggtgtgtctgtgtgtctgtaatgcagctttaaagaggagtgaagcactgacataggctgcaacttggatgagccttgaaaacattgggtgactgaactgagggagacacggaagtctacatccctaattgtcccattgacacgaagcacgcagagcaggaaaatcccagatcacaggaggtcaggggaagggaaacacagagtgaccgcttaatggaggtgaggtttccttttctgtgatgaaaatgttcccaaaccaaatagtggaaatggttgcacagcattgtgaatgtgtaaagtatcactgacccatacacttaccaagggctgaaatggtaagttttatgttatgtgtatctcaacacaataaaaatgagtgccacattttgtttagcatatcaatgacaataacagttcaggtgaatgctggattcctcatcacaaccagtgcttcctgatggagctggattcaggggagggactggagtgggttgggtgcacaggtcatgaaggcagcaaaaattccaacccactcctcaagagtccagtcgccacctccagatctatgtccgccggggcagctcttcctatggctgagctacatgagcaacaagcaaataaccatgttttttgttgttgttgtttagttttgttttgctttgtttttagacagagtctcgctgtgtcacccaggctggagtgcagtggtgcgatctcagctcactgcaatctctgcctcctgagttcaagtgattctcctgcctcagcctgccctagtagctgagactacaggcactcactacgacgcccagctaatatttgtatttttagtagagacagggtttcactatgttggccaggctgttcttgaactcttgacttcgtgatccacccgcctcagcctcccaaagtgccgggattacaggcgtgagccaccgcgctcagccacaaccatgtatttttaagcaaaagacacagtgaggggacatcagtgtgagcccagacacaaacctccctatgcgggttcacaggacagcatggggtgctgaggacagaggtgggcactcaggaaccagcagggaaacccagggggcgcttggcacttcatgggggctcaggaccattgtgggctcagtggtcaggcaggctcaaggctcagcctcagggcaggtgcagcaggcggggaaaggccctggagactgggtttagtgtcaccttctcattgcgccactggacaccctccactacatctattctaatgtgtatgagtacttatgagtttagaaaataacattgatattataaatctatagccatatgtgggtgcatcaagttaccctcttcaacctatgtggaccctgttcatcaggaataagtccctgcatttgaggaccttataaatcaataattatgtagaatcactttctttttcagtctcatttcctccctctttctctctctcacacacactgacaaacacgctgggtgctataactttaattacctgatgtgttaaaaaaaattgattcatttggaacttaaccagtttagctgttgttcacgctgttatgtaaaaaagatccctaaatgacttctacctggtaagaggagggaaggcgttggaaggtgaaattgcaggagaaggagagaatcgtgaaacggagtgagttgttttctctatgaatggtgattaggtcaatatttttcaaacggtgaacatattgtgtgaagattatttgtcaatattatctcattaaaactattgcaaataaaagtgtataatttggtaaaaaaaatgaagagagaaataaaaataatacaagaaaagtcatgaactcctgactccacacgtgagttaaccctcagtttttctatgttacttagaaaaacactgagatacagccaaataatatcatgatatctttataagaagagggttttgtaaccctcactcgaaatttctagctctgtcctagagttaatttagggagcagtcagatccagctgtgagaaacacgggccagacagtgagactggcttttaccagatgtgagctcttagacatgtcacatggcccttccgtgcttgggggtttaccttcacatctgtaaatgaaggaaactttgactcccacagaacataattcatgtgcatctataagtagaaatgctaatgagaattaattatttatgaagtataatcactcgcatccactctgggacacagcctactctgaggcatcccttccagaagtcactatatagtaggagacatgcaggtgggtcctccctctgccgatgaaaaccacccagccctgaccctgcagctctgggagaggacccccagccctgagattcccacgtgtttccattcagtgatcagcactgaacacagaggactcgccatggagtttgggctgagctgggttttccttgttgctattttaaaaggtgattcatggatcaatagagatgttgagtgtgagtgaacacgagtgagagaaacagtggatttgtgtggcagtttctgaccaggtgtctctgtgtttgcaggtgtccagtgtgaggtgcagctggtggagtctgggggaggtgtggtacggcctggggggtccctgagactctcctgtgcagcctctggattcacctttgatgattatggcatgagctgggtccgccaagctccagggaaggggctggagtgggtctctggtattaattggaatggtggtagcacaggttatgcagactctgtgaagggccgattcaccatctccagagacaacgccaagaactccctgtatctgcaaatgaacagtctgagagccgaggacacggccttgtatcactgtgcgagagacacagtgaggggaagccagtgagagcccagacacaaacgtccctgcaggaagacaggaggggcctgggctgcagagggcgctcaggacacattaagaacacagtaaactcagggaccaggtgcccagggaggttaagggctggtttcctttcagagacttagctgtttctccatctaacagtttccccagaaccctgcctagatttgtgatctgtatctgctcaaactatctgtgtcaccttcctcacctgtgactttgaggaagcttagtgtggacattccagtgggtggagagatcttggtgacagcaattgtgtgttctgtctaggcatgtctatggctggccatcaggaacgacaggctggaattcttggaaagaggcacacctgccatccatcaggaaattttgttgtcttctgttctgctagaattaaatcaggcacgcccaggttaactactactatcttcctagcttgagaaaattaatggtgggcttgaataacacctatatgaaatcatcagagcaacacctagattcgagtctcatttaataattgagactatgttctagccaaggagacacataaaactggtgattgccgtggtcagttcatatcatatatttgtcagtagaatctggctggtattatgaacagctttgccaacacatgtgttagtgttggtcttcggagaagcacattctatgaatccattaggtttatgtacagtttcctaaggaaccggtccacgcttttgagaggaaacgcagagcgggtggaaagaggctggggaagctgaaggcatatgagggaagttggtccctgagtgaaggagagagggaggataactcagtggaacttccttaaactgtgctgttctaggaaggtccagcaagtcactgtatctgagtcatgtcaaagtttcccatcggggacccccgtgactcccagcagtggctctactcagatcagcgcggagctcattgttctcctgagagtggagcacaggacgtggccccagcaccagccgtggcatgcacatcagagtgcagccccaggcgcatggctcaggtgcactgtgctccctgcaggtggagggagggaagacctgactcagaacccatatgatgtgggttccatacagaacacaacttttacttaatttctgtagatgacatagaaataaacatacagtctgtaaacaatggtgattcctacatttaccttgagagctttattctttgattctgcagaatgtcctggcatggtgttgcctttctcatgtggaagtgtaacataagttgaggacatgtgttccccactttcattgttttcctccatgtacagagatcctgagtggagtacagctgaccctccttccacactgttcctctcctccccacgggaacagcagataattacctgaggctgaatctgaggtgggatatgtcctgtgcacctcagagcctgcagagacccccggctgcagattcatggagtcaggtgtttgtgcatgtgggaatctcgagctgtgctgttgtcagtgaatgctgcttagaactaattgcaggattcagaattaggagaccccctgatctatcacacctcagctcattctgccactcatcatcttcagaaattctgaatatggttcagtttacatttttgtgatgtactgttctcatttcatttagtcatgagtttggtcagcagaaagtgctaccatttatgtgtcccaacctgatgaagctaatttgcttcacgagaagttaggaggctcctgaatcttatcctaagcctgtctctctgcactttcctttaaaattcagttttacctggaattctgttgtgttgatttagccagttttccccatactgagtgtctgattttcctggatatctgatcagtttccttgtccttcaccataacttgggtgacatctgatcaccctggtctaacttcaacaaaaatcctggcaggctgccctaagcaggatttacctcactcctgatgtttcttcttggtgattttccatcctgtgccccaaccctgctgtatgcctataaatcctcacgttctcattctgtatttggagttctgctgaatctctcccccactgcaaaatcccactgccctggtccctacacctatcatgagggccctggatgaagtcttccttactgtgctggaacaagtgtcttcatatatacattttttctttaacaaatcaacctttagtatttcctaattgatcaaaggacctcaaacattgcatgaaagcgaggatctccattttactataaggggtgttgtgtgaatttcagtttccatgtgtggtgtccagaagtcctgggcaccaacggttgtgcttctctgtccaattctgtgattctgaaacccgggagtcatctgaacatgagtaaataggtgacttttctcactatttagtgactgccttatttcatttaccctgaagcttcacgaacacattgatgaaaagtagatagagaacttgtttggaaatgcaagatttatagtagacgtaaccacctacatgattctggaggtcttcttagtgttccaagaaccagatgtttttcccaccacaggacaaagatgagaacctccacgctgtgaggatagaggacaggcagggcaaagatgagaacctccacgctgtgaggatagaggacaggcagggcggtgtgaggacaaaaggggctgtggtcacgtccagggtgttctctcctagcaacgcctccagctctttcctcactctgtggtatttgtcagatgggaaacatacctcaaatttatatttgacatattgatggaagtccaggcaagaggcatctgaaagcttatttctgaacctgcttctgtaaggaatgcccatatcccttggtctctttcctctttcttaactccattggctcccttcccctcctgcacacacccactgacgtttatggccacttccccacacccttcactgtagtaccattttcttgggctcctgggaaacccaacagctttagttaaactcacagctatgtacacccataggcccctcaggaggttctcagtttcactcctacagtctcccaggctgctccttggggtcctaacctgaccatctctaccctctctcctgagtctggccatccattgaacgtccctgctgccctctaatctggatttgtgtacagtagaaggttaactcagcagacctggattgtttaaaccctgcacattcctgaaaaacattgttcatttatggctctcagttacctcctgatgagaactctgagcccttaaaatgctatgccagataacagtgtctgtggttgtctgcagccttgggacctgtagtacacatttaatcatagtgctttgtagtgaatgccagctatttttttttcctgggtagcgggggagctgttgtctgagtattgtggtcagttgaaatgcctaaccttgttttcactctaactcactactttgaatcttccctgtttgtctctttaatcacctagccttgcttctcatgtaagtaagactctctctagctgggaaagctggacaaactccaattgaccccttaatttacaagacactaagggctcctcacccaacccccttccgtaaggagttaacctgtgtaaacagattctcagcatttcaaaggagcccagttaactgataaggtactagcaccaacaatgtatgaagttcccaggatttttctcaaggagataacaacataaagccttgagttcatgcccggcatagcccctatatctaattataatgaaagatttagagccctgcacctggtactgttgctctttttgtaaccatttgtcttttaaattgtttatctctctgtaaccattttgcttcttttgattcttgcatgtttttacttccgtagaattattgcacttgagttcccctccccttcctaaacctaggtatgaaagttaatcaagccccttcctcggggcccagagaattttgagcattagccgtctctttggccgctggcttaataaaggactcttaattcgtctcaaagtgtggcgttttctctaactcgcctgggtacaacatttttggaggccgcagcgagatattaacaccactgggcgagagccggtctcgctccgggctcccccggaaggatggccagctcggaggagggacaccacctgaggaaagaattttcaggtccgcaaagagtgaccgccttccagaggagagcggatcgaccactgtgtcagcgccctaaaagtcaacatctgagtcctcagcttctgaccccggggtcaggtaggtcggatgtgacttcgtttccggtgagaggggagcggccctgacgagggcgctgagtcctcagcttctgaccccggggtcaggtaggtcggatgtgacttcgtttccggtgagaggggagcggccctgacgagggcgctgagtcctcagcttctgaccccggggtcaggtaggtcggatgtgacttcgtttccggtgagaggggagcggccctgacgagggcgctgagtcctcagcttctgaccccggggtcaggtaggtcggatgtgacttcgtttccggtgagaggggagcggccctgacgagggcgtccctcttttgactcagcccattactctaggatgctagtgggttgagccttcgttttccggtaggcgccttcgtatcttggtttgggtgggaagtggtcctgaccaggaccctcccttgacttagctcaagacccaggacgctggagagctaagccttggtttctggcagacctctctctctctcttctatcttccatccttcttttggaaatctccgggaaaggaaaaaaaaaaaaacctgttataaactctgtgtaaatggtgtgtgaatgtgggaggacaaaggcttgcgtttgtcttccagtttgtagctccatggcgaaagctacggagtttgagtgggccctcacctgccgttctgtggtgacctcataaggcttaaggcagcatcgggcatagctcgatccgagctgggggtttatactggcctgccaatgctaagaggaacccaagtcccctcacggggagtggccaggcaggcatctaaatgatcccatcacgggacccccttcccttgtctgtctaatagagaaggtaaaacaggaaaactgtcatcattgtttacatgccctagggtcaattgtttgttttatgtttattgttttgttcggtgtctattgtcttgtttaatagttgtcaaggtgttacatgtcaggacatcgatatagtccacgaggtctgggtaaaaatttcttcaaggtccttagtgctgattttttgtcacaagaggttaaatttctaatcaatcatttagactggccaccacagtcttgtcttttctgtcataaacaagtaagctgttgttacggaaaagagtgtggagaacattcacctgattggaatttctggcaccatgaaggttgcgggtatttagattgtcataccccacgtcctagtgattggtccccttctaaactgaactggtggtgggttcaaaacagccaccctgcagaccttcttgctcacctcttctgtcattctgtaacttttcctgcgcccttaaataggaccttgtgtaaagaaacctacgcccgtcatgctttacttcgtttagactcctattctgttccactgtggctactttctcatcttaaggacgatccgagtggtccttttccccctcgtccctgccccttaccccgcacatctcgttttccagtgcaacagcaagttcagcgtctccaagacttcgctctgctctcactccttgaacccttaaaggaaaaagctgaatttgaactgtttgcctttgaatcgtggagacataaaaaacacttaggatataggtctagaagaagaagaagagggagaacgcctagatcgaactggcccaggagacctcagactggccaccaatccccctccctcaatcttaaagctacagcaatgtggcaagtggtattagctgttgtggtttttctgttctttctgatcatgttaattctgtttttccgacactccagccccccagggaaagagtttctctgccggtgttggatctgatatctctgctcaagactttgctaaattgtctttaaataataataataataataaacgggaaacacctcctcctggccccgtaagggttggagccctctccagtgtatgctggaaaatttttctcttggtttctcagaggactatggagtccgccttagaaaaggcaaggtctggacactctgtgaactagaatgaccaaagtttggagtcggatggccctgtgaagggtcattaaatcctaccattgttcaagccgtgtgatgggttgttaccggaactcccggccaccctgatcagtttccctatatcgatcaatggctaagtttgattaggaatcctcctccatggctctgttcatgtgccattcgcaattccacctccaaagtcctcctgagccaggccgcgtttttgcctcaaccctccgccagttcggctccccctgttttgcctccctctgaagaagaggagagtcttcctcacccagttccaccgccttaccaccagcctgctcccttggcgccatcccgtgtctcttcgactgcgtcccctgtgggctgtgaccgcccattgccttccgctacgaccgcatgggaggaagcagcccctctactcccactgagagaggcacgagtcccgcggctgatgagcgctcagcccccttcctggtttatgtccctttttctacttctgacttgtataattggaaaacccataatcctcccttctctgaaaagcctcaggctttgacctcactgatggagtccgtgctccggacccatcgacccacctgggatgactgccaacagctccttttaactctgtttacctctgaggagagggagcatatccgaagagaggccagaaagcacttccttgcatcagccggtgggccggaggaggaagactagagacctcctggaggaggaggaagctagagacctcctggaggaggaggaggtctttccctccacctggcctaattggggcccagattcctcaggtggaaggagggctttggacgattttcaccagtatctcctcgcgggtattaaaggagccgcttggaagcccataaacttgtctgagacaactgaagttgtccgggggcctgatgagtcaccaggggtgtttttagaacctctccaggaggcttatcgaattcacacaccttttgacctggcgactcccgagaatagccgtgctcttaatttggcatttgtggctcaggcagccccagatattaggagaaaactccaaaaactggaaggatttactgggatgaatatcagtcagcttttagaaatagcccagaaggtttttgaaaaccgagaatttgaaaaacaaaaacaagcgacacaggcagctgaaaaagctgccgataaagcatataaaagacaagcaaaaatcttggtaacagctatccaagagggcagaaaggaaaggcctgcattccagaaaaatggccaaggaacctcgggttcccaccagaaaagtgaaagaggtgaacaggcccctctaggaaaacaccaatgtgcctattgcaaacagactgggcattggaaaaaggagtgcccgttactgccaaaagaaaaatctgaaaacaaaaaggttctcaccctggccgcaacagaggagcctgatgattgatggggacagggctcccttgctctcggcccccaggagcccatggtaactgctacagtggggggccagcctgtatgtttcctaggagacaccgggggagagcactccgcactggagactcccctggggagtgtctcaaataaaaaaattgctgtacaaggggtaactggagctatacaagaatatcctgtcacacacacctgagaagtaatcttgggacagaaaagagtgacacactctttcctagtagttccagagtgtcctattcctctccttggacgggacctactccataagttacaggcctcaatctccttttcagctcagcaggctcatctcacactaggaaatgcaacttcccccactgcccaactcttgctaactacccctctgtcagaagaataccttctggtttcaccgtcgtaatcaccggaggagaatactaatactcttttgttagatctacagacacttttcccccgagtttcggccgagtcaaaccctcccggactggctaaacaccatccgccagtagtcatagaactcttggccactgccataccggtccaggcaaagcaataccccacaagtcagcaggctagagaggggattaatccccacattcaacgactgttacaagctggcatacttaccccatgccagtcggcctggaacacgccatttttgccggtccagaaacctggaacaaatgattactggccagtacaagacttaagggacgttaataaatggactgttgctgtccacccaaccattcctaatccctatactctactcagcctgctcccaccagaacatacagtatacactgtccttgacctgaaagatgctttctttgctatccctctggcccccaaaatccagccgatttttgctttcaaatggacagatccaagatcaggagacactacccaactgacttggactcagttacctcagggttttaaaaattcccctaccctttttggagaggctcttcagcaagatcttataccttccgagccagtcaccttaactgtactcttctccaatatgtagatgacattttaataacaactgaaactatggatggttgtctacaacacacaagagacctgctctacctccttcaggagctcgggtatggagtctcagccaaaaaggcccagctttgtcttcccagagtgtcctacctggggtacaagataaacaaaggaaaaagggcactcactagtgcccggaaagaagccatcctgcgaatccccactcccgccaccaagagacaggtacatgaattcctaggagccctgggatattgtcgtctttggatatcggggtttgcagagattacaaagcctttgtatactgctacaaaaggtaatggcccactgatttggacagacaccgaggaacaggcttttcagaatctgaaaaaggctttaactgcagcccaggctttagccctcccaaatatctcaaagccttttcatctgtttgtccatgagagccagggagttgctaagagagtgcttactcagactttaggaacttggagaggcccagtggcttatttatctaagaaggtggatcctgtggcctcaggatggccaagttgtttggcagccatagtggctacagcaagcctagtccaagaaactgataaattaactctaggccagaatttaacccttacagttcctcatgctgtagagacttgactacgaagtgcttcaggtaaatggatgtcaaatgctcgtattttacaatatcagagtttactgttggatcagccttgtttgactttctctcccacaaggtgtttaaatcctgctactttactcccagatccagattctaatactcctgtccatgactgtcaggagctgttagaagctaccgaaactggcaggccagatcttcaagatgtgctcctgagaaaggcggacgccaccgtgttcaccgacggcagcagttttctcgaacaggggatacgcaaagctggtgcagctgttaccacagagacagatgtgttgtgggttcaggctttaccggcaagcacctcagcacaaaaagctgaattgattgcccttactcaagctctccgatgggttaaagataaacgtattaacatttatactgacagcaggtatgctttcgctactgtgcatgtacatggagccatctactaagaacgcgggttgctcaggtcagaaggaaaaataattaagaacaaagaggaaattttagccctgcttgaagctgtgtggctccctcaacaagtggctgtaatccattgtaaaggacatcaaaaagaaaacacggctgttgcccgcggtaacccaaaagcggtttcagcagctcgggaagtggcgctgtcttcagctccgtccataaacctgctaccggcagtttcttttccacagccagatctgcctgacaaccccgcgtactcaacagaagaagaaaaactggctgcaaaccttagagcaaataaaaatcaaaaaggttggtggattcttcctgactctagaatcttcgtacccccagctcttggagaaactttagtcagtcacctacattctaccacccatttggtgggacaaaattagctcagctcctccggagctgttttaagatccctcatctacaaagcctaacagatcaagcagttctctggtgcacagcctgcgcccaggtaaatgccaagcaaggtcctaaacccagcccaggtcaccgtctccgaagaaactcgccaggagaaaagtgggaaattgactttacagaggtaaagccacaccgggctgtgtacaagtaccttttagtatcagtagacaccttctccggatggactgaggcatttgctaccaagaacgagacagctaacacagtagttaagttcttactcaatgaaatcatcccctggtacgggttgcctgctgccatagggtctgataatggacctgccttcacctcgtccatagctcaatcagtcagtaaggcattaaacattcagtggaagctccattgtgcctatcaaccccagagctctggacaggtggaatgcatgaaccataccctaaaaaatactcttaccaaattaattctagacaccagtgaaaattgggtaaaactccttcctttagccctacttagagtaaggtgcaccccttatcaggctgggttctcaccttttgaaattatatatgggcgggcaccacctatcttgcctaagctaaaagatgcccattttgcagaaatatcacaagctaatttattacagtacctgcagtctctccaacaggtacaagagatcattctgccacttgtttgagaagcccatcccagtccagttcctgaccagatggggccctgccattcattccagctcagtgacctggtgtttgttaaaaagttccagagagagggcctaactcctgcttggaagggacctcacaccgtcatcctcacgacgccaacagctctgaaggtggacggaattcctgcttggattcatcactcccacatcaaaaaggccaacaaagcccaaacagaaacatgggtccccaagcctggatcaggacccttaaaactacacctaagtcgggtgaaactgttaaattaactctttttatttgcttcttttgtttatccttgcctgtaatgtcttctgtgccttcctactccttccccctcacctctctcacaacaggacgtgttttcgccaatactacttggaaggtggtactccagggcaagtcacctttgcagtcgacttgtgtatactgttcccggagccggctggtacccacgaagatcatcgcgacctgccagtcatgggagcaggaggtgtcgaccttgcagcaggatttggacactctgggagccaagccagatgtggaagctccaaaggtgctgaaaaaggactccaaaaggttgacttttacctctgtcctgaaaatcaccctgatgctagctgttgagatacctaccagttcgtccgcccggattgggcatgtgtaactttagccacttactctgggggatcaactagatctccaactctgtcaataagtcgtgcttctcgtcccaaatcgtgttctaaaaataattgtaaccctcttaacatcattgtccatgaacctaattcagctcaatggtactatggtatgtcatggggattaagactttatgtcccagggttcgatgttggaactatgttcaccatccaaaagaaaattttggtcccctggagcccacccaagccaatcggacctttaactgatctaggtgaccctatgttccaaaatcaccctgacaaagttaatttaactgtgcccccaccattctcagttcctaagacccagctacaaagacatcaactccaacccagtctgatgtctatacttggtggagtacatcattttcttaacctcagccagcctacactagcccaagattgttggctatgtttaaaagcaaaacccccatattatataggattaggagtagaagtcgcacttaaaggtagtcctttatcctgtcatgcacaacctcatgctttcacattaggagatgtgtctggaagtgcttcttgtctaattagtactggatatgacttatctatttctccttttcaggctatctgtaatcagtctctgcttactcccatgagcatctcagtctcttaccaagcacctaacaatacctggttggcctgcacctcaggtctcactcgctgccttaatggaactaaatcagaacccctcttgtgtgttctagttcatgtccttccccaggtatacgagtacagtggatcagaaggacaactcctcattgctcccccggaattacatcccaggctacgcagagctgccccactactggtttctcttttagccggtcttagcatagctgggtcagcagctattagtacagctgccctagttcgaggagaaactggactaatgtctttgtcccaacaggtagatgctgatttaaataatcttcagtctgccatagatatactacattcccaggtagagtctctagctgaagtagtacttcaaaactgccgaggcttagatctgctgttcctctctcaaggaggattatgcgcagctctaggagaaagctgttgcttttacgccaatcaatctggagtcataaaagatacactccaaaaagttcaaaaaaatctagataggagccaacaagaacgagaaaataacacagcctggtatcaaagcatgttcaattggaacccctggttaactactttaatcactggtttagctggacccatcatcatcatattattgagtttaatttttggcccttgtatattaaattggttccttgattttgtaaaacaacgtattgcgtctgtcaaacttatgtatctaagaactcaatataacccccttgttgtaactgaagaatcaacgacttgattcccctaaaacacaagtggggaaatgaaatgcctaacggtgtttttactttaactcgttactttgaattttgtcctgcttgtctctttaatcacctaaccttgcttctcatgtaaataagactctctctagctaggaaagccagacaaactccaattgaccccttagtttacaagacactaagggctcctcacccaaccccctttcgtgaggagttggcctgggtaaacagatcctcagcatttcaaaggagcccaattaactgataaggtacccacaccaacaatgtatgaagttcccaggaattttctccaagagataacaacatgaaaccttgagtttgtgtccggcatagaccctatatctaattataataaaagatttagaaccttgcacctggtaccgttgctcttcttgtaaccatttgtcttttaagttgtttatcactctgtaactattttgattattttgattcttgcatgtttttacttctgtaaaattattacatttgagtccctctccccttcctaaacctaggtataaaatttactcgagccccttcctcgtggccgagagaattttgagcatgagctgtctctttggcagccggcttaataaaggactcttaattcgtctcaaagtgtggcgttttcttaactcacctgggtacaacagtgcagctggtggagtctgggggaggcttggtagagcctggggggtccctgagactctcctgtgcagcctctggattcaccttcagtaacagtgacatgaactgggtccgccaggctccaggaaaggggctggagtgggtatcgggtgttagttggaatggcagtaggacgcactatgcagactctgtgaagggccgattcatcatctccagagacaattccaggaacttcctgtatcagcaaatgaacagcctgaggcccgaggacatggctgtgtattactgtgtgagaaacactgtgagaggacggaagtgtgagcccagacacaaacctcctgcaggaacgttgggggaaatcagctgcagggggcgctcaagacccactcatcagagtcaaccccagagcaggtgcacatggaggctggggtttgtttcctgtcaggatttgggacttcctctgcttctgacagtttctctagggaaactctttaattttagatttctgtgcccaccaatgtcatctctacatttttttaatcattgtaatatgataggaggacttattctcacatgcacaatatgtatattgccacctacgggaatgaaaactcctcaaccatggtcaccagcatcagagtcgtgaggaagctcaggggtgcctggtgagtcttctccagtcagactcaggacagtaacctcaaggggattcccttgtgagaactcacacactttcatgagaacagcaccaggagttggttctaaaccattcatgaaagacccactccatgacccagtcacctcccaccaggtcaccccttcacaattgaggattataatacaacatgagatttggggcaggacacaaatccaaaccatatcagatacacattgtgaaatgctcatgatggtcagggtaatttgtatttctatcacctcacagcgctaccattttattatttttttaaattaaatgcatgagtgagtgtctgatgagaacacctcagatataccctttcagcaacaatcatttttataatacagtattaactataggaccattgctgtacgttagatctccagaactcatccaacctgcacaactgaaactgtacaatttaacaaacatcacccgatttccctctcctcccaggtcctgagaccctctattctgctctctactttcaagagcttgaatattttagatcccacatgtaaatgagatcatgcagcatttgtctttctgcatctggcttattccactcagcatcatgtcctccaggcccatccgtgttgttgcaaatgtcagaatttccctcttttcaaagccaaataaaatacagatttatgtatacacattttctttatacattcatccatttacagtcattaaattattttgcaaatctacactattattaataatcttcaatgaacacgtctttggcaaagtaattttatttcctttgcatatataataagaaatgggatcaccagattatatgatagctttattttcaacttatcgagtaaccaatcctaccacagtgtattccctttccctcacattcttgccaatatttgtcatctattacatttctgataataaccatattaactagtgtgaggtgatatcgcattgtgcttttcatttgaattcctctgataattaggaatgttgagaaccttttcgttttctgtttgccatgcatgtatcttctgaaaaaagttatccaggtttttgcccttttttatcagttcatttgttatttgctattgaggtatatgggttatttatacatttagatagaccttcttgtcggatacataattacacatagtttttcctgtgctttgttgttaaattcaaagaaatcagttccgaattaatggcaggaattttttttgctccatgtgatttatgagtttatggcttcaggtattatgtccaatattagctgatttttttatatggagttagagaaggcctaattttatttcttttgaatatgaatgccagttttacaccattattgaaaagactgtcctttctctactgtgtgctcttggcacacaaaatcaggagagacataatgacaaaagaaaatatcagatgaatattcctgatgaacatagacctgaaagtcctcaacaaaatactatcaaatagaatccagaagcactttaaaatgtaatacatcatggtcaagtgggctttacccctgggatgcaaggctcgttcaatatccacagtaactgtgattcacaatgtaaacagaataaaagcaaaaaccatatgattatgtcaatagatactgagaaagcctctggtaggttctaacatccactcatgataaaaaccctcaacagactagacatcaaagaaacgtacctcagaataatagccatctacagcaaacccacagtcaacaccatactaaatgagccaattaaaacacttgtctttataaattacccagtctgaggagtttctttatagtgtgagaattgactaatacagcatccaaataggaaaggaagtcaatccgtccaccttcagcgatgatataattctatacctagaaaatcctaaaaagtctgccaaaataattctagaataaacaactttagtaaagtgtcaggatacaaaatcaatggacaaaaattaccagcatttctataagccaaccacatccaagctgagagtataatcaagaacaaaatcctatccaacttacagtatccacagagaaaatgaaatgcctgggaacacagataacaaacaaggtgaaagatcactacgaggagaactataaagcacagcagaaataaataataaatgatacaaataaatgggaaacatttcatgctcatggattggaagaatcaatattgtaaacattgtcataatgcccaaaggaattcacagattcaatgctatttacataaaactatcatcatcattcttcacagaatcagaaaaaaatctattctaaaatttatatggaaccaaaaaagaccctgaatagcagaagcaatcctaagcaaaaagaacaatgccagaggcatcatgatactgaccttaaactacaccataatgtcttgctaacaaaagcagcttggactggtacgatagcagacctgcagaaaaaaaaaaatagatcaaaattgaaaacagaaataaagttgcacacctgcaaccttttgatctttgacaaggctgacaaaagcaattggaaaaaaaaaatctctgtattcagtaaatggttctgggataactggattctggcaggtcttgcagaatgcaagagtgaaggagcctgtccagcttctacctagatttcagatgttagagagccctgcatgcccaggaagaagcctgctgcagcagtggatccaccacacaaagcctctactagagcattgccaaagatggggaaagatggagttggagcccccattcagagtccccactaggacgcttcatagtaaagctgtgggaatgtggccacaaccctcaagaccctagaatggtagagctacaggcaacttgcaccctcagcctagaaaagcttccagcacttgactctcacttgtgaaggcagccccgtggtctgtgcctagcaaacctatagggattggctgcctgaggttttggggacccaccccttgttccagtgtgccctggttgaagtacataaagtcaagagagattattttgtagtgttaggatttaatatctgcagtgctgggttttatatgtgtgtgaggcctgttggttgttccactggccaatttatccctttaggattggaattatttacccaatgcctgcaccatcattgcaccttggaagtaaacaactttcatttttaaacttgcaagctcacagctggagggacattgccttaagactcagatgagactttggacattttagttggaggttgatcaacttaacattttgggaactattgaaaaaaggtgattatattttgcagtgtaagaagaatatgagaactttgggtctgagagtgcaatgatatcatttaggggttttcccctccaaatgtcatggtgaaatgtgacccacaatgttggaggtggggccaactgggtggttttgggtcatgaggagatttttcaggactggcttggcatccaccccatggtaattagtgaattcttgctgtattagctactgtgagattttattgttcaaaaaagtctggcaaccctcctaccctctcatgtcccccctcctcaccatatgacacagcctcctccccctttgccttccaccatgactgtaagcttcctgaggccctcgcaagaagcagatgcttgtgccatgcttctcacacagcctgcagatctgtaagccaaataagcctcttgtctttgtaaatcacttggcctcaggtattaatctataccaatgtaaaatagactaatacactgcccaaagcaatatacagagtccatgcaatttatatcaagtaactaatataattgattacatatttttaaaaatcctaaaattcatatagaaccaaaaaagggtctgaaaagcaaaagcaatcttgagcaaaaagaacaaagctggaagtaccgcattccctgacttcaaattacacaacacaaagataacaagaaaggcagcgtggtaatggtagaaaaaaaatcaagagcccagacatacagccaaatatctacaaccaacggttctttgacaaaactgacaaaaatatacactggagaaacaaccctctattcaataagtagtgctgggagaattagatagccttatgcagaagaataaaatgagacttctgtatcatcatagacacaaattaactgtgaatatggattcaatgtttaaatttataaactcataaaaattcctgaagaaaatctaaaaaaaatcctctagacatttgcctaagcaaataaaatatgactaagactgacttcaaaagcaaatgcaatgaaaacaaaattagacaaacaggattaattgaaacacagattgtctgcatagcaaaagaaataaccaacatggtgaacagacaacctgtgaacagtaaaaaaaaatttgcaatctattcatcaaagggctaatacatagaatctacaaggaactcaaataagtcaacaagaaataacaaataacttcattaaagagtgagcaaaaaccagacatttctcaaaagaagacacagacgtggccaaaacaaataaaacatactcagcatcaccaatcatctgataaatgtaaattacaaacaacatgatatagcatcttccaccagtcacaatggctgttattacaaataaaaaacagcaggtgtttggagagaagcataggaaaaataatgctttttatatgcttggtgaaaatataaattagtacaacctctatgaaaaacaatacagaagtttctcaaagaactaatattagaattaccgtttgtcccagtaatccctcccagtgggtatattcctcccaaaaggaaatttttatatcagaaaaagtcacctgcattcctagtgtctttcacagcaacgtgaatagagttgtaggacattagcctaaataaaataactcaaaaagatcttctcttttataattggaaagtaaacaatgggtacacatgtacatacataaaaaacaaaagacactgggaactgcaaaagagggcaaggtgagaggaatgtgagggttaaaaaatcacctactggctccaatgttcactagtgggcgatagttacaccagaagcccaaacctcacctttatgaaatatattcatgttacaaaattgcacatgtacaccctgattctactgaaaaaaacagaaataaaacatgaacagaattgttagactgctagctagatttgtcaacaaagaaaaatgcaaaaggagcaattctctgttttggaaccctttctcattttctggtacaattagaaattgtagactaatccctatattctcttctgaagccctagcattagccatttctcaaagacatgctggttccttttttttttttttttttttttgagacagggtccagactcactgcaacttccacctcctgggttcaagcgattctcctgtctcagcctcccaagtagctgggattacaggcatgcgccactgtgcctggctaatttttgtatttttagtagagacagggtttcgctatgtgggccaggctggtccaaactcctgacctcaaaagatctgcccacctcagcctcctaaagtgctggaattacaggtgttagccactgcacctggtcactggtttcttttatagaagaatagtattaaaaactcaaatcttgattctgggtgtattttttattaatgtgcactcatttcttgtagaaattctcaggtaaaaaatctaggaagtatgtgttgtgtattaacccatatatacacagacatctaaactatttttatctaatatatgtacctatattatgctaaacttgcaaataaaatgacatgtccaccctaagttaataccacatggatgtttatcgcattccttctatgcctgacactaacctcccactccaaccacaaggaaccccatttccccatacgccgtccattctctttgtagtccaattccaagattcctgtggagtgtaacaagatgtgtaagttgtgctcttttgtggaacatcgtcaattggggtacaatgctgatgtgaagtttcttttttctttaatcttattgcctacaccatttctgaatctacttagtacctcttttgaattcatacatttgtaatggaattagacattttctatgttatctgcattccatcctggaattcctaatcacctatttttaaaaaaaattcttttgaagtaagattgtattagtcagggttccctagaggggcagaacaaacaggatatatatacgcacacaggatacacacacacacacacacacacacacacacacacacacacagagtttattaaggagtattaactcgtatgatcacaaggtcccacaataggccatttgcaagccgaggagcatggaagccagtccgagtcccaaagctgaagaacttggagtcccatgttcgagacaaggaagcatccagcacgggagaaagatgtaggctggaaggctaagccagtctaatcgtttcatgttcttctgttgttgttgtttttttttccctctggccacactggcagctaatgagattgtaccacccagattaagagtgtgtctccctttttgagcccactggctcaaaagttaatctcctttggcaacaccctcacagacccacccgggatcaatactttgcacccttcaatctaatcaagttgacactcagtatttagcattacaagtccaccccgtcaacttgaaaccatacacatctcctgagattatacataatcttcaaacaaagacaataataaagtcataattacacctaatataatacaactttattcgttcaactggaaatgcaccaatccccaatccaaatgctattacatatggtccactccctcaaggacacagccaggatcatcctatgacttggtgtctagaagactcatgcacttttaattttacctccaatattagactccactttatcacatgcagacactgcagaatattttaagacatcgatgtcttatgctgaaaaattcaacagtacataaaattgccttcccaccacagccagtggttactactgaataaggatctgccatcccctagggaggtgctatagtggatggtgtgcactgttagtagctatggaaattgatccattgtggcaaatggcagcatctttcttttataacattaaaccatattatattgtatacacataccacattgtctttattcatttgtctgtatgctgaccatcagatagtttccatatcttcgctgttattaacagtgtttcaataaacataggatgcagatatgtttacaaggtggtaatttcatctacttgggtatactcccagaaacaggatttctggtcatataatatctccagttttaattaatttaggacgctttatgttgctttccataattgtggaaatgtagaatggtatagccattatgaaaaacaattttggttttgagttatgatccataaacagcatttgcttatggctctcaatgagagtttctactaaatatgatggaaggccaggaaggattctcaccttaaagcttggatggattatgaatttacctcttatttcctaaaagcaaaagtttggaagcatacatgatggaggctgttggcaggtttcaggatgatctcataaaaggagaatctgctggataaaaatgttgggttttcagttatagacacacctacactcaatatgaaatgatgaagtcaactgaggatctagaacatgttcacttgaagcaacagcacattctcaaaggaacttattgctccatcacaagggcgatgaacttctgaaaccagtaaagtgtgagtgcacagtaagtgataacgttatcacgtttacatgaagtttgtttaatgtgccaaaggctggtacagattaatcttacacaaatatatgaaacatatttttccatacatagatatctagaggataatcctcttagcaaaacttcttcaggttacagaaatctgtgtaagttgtagatctcatggggaactgtctctttataaatactggtctgtttttcaagtcaggaaaaattatctctgttggagtaggcttccaattgtgtagacttctgaattgcttcttgagttgtaacaaatgaaccaaaaaatttgactaattggagttttgtggctgtcttaataaaaatttcttataagctttctttcaattatttgagaccagttttcctgattttatttttctccaatagataaattttcacaagatctcaggaaaccacctctctggctctttagtttaaaagactagcttcttaggaaaagaagcttctttctaacattgaagagctcatttattctgcaaaccatgaagtttgagtctcattgtcaagaatcatgaaaatttttactccaatatactgaaagtcatgactcttgaattcaatatttattggcattcacaaaagtgattcattctcagatgtgtcctatgttgctggcccaacatatcagtgaactgagtatcctcccttagctctctctgtctgtagcactgagtctacaatcttcagagtcatccatgaaggggagtcctgaggttcatgggattcttgtaaacattcaggtcaacagaagaaataagcaggattgagggctgccagccatttccacgccattaggaataattaccatctaagtataaaggtctacatcatacagaataccccacaggataggctgatgcaaaaaattccaaccccacagaggctccacagcaacccttacagttctttcagggaaggaataatctccaagttaaatgagtcagtaaagctgctctgagctacaggaaaaattggatttggccaggtttgtctgagttcaacgtgattattatactcagctcctgctccaatctggactgagtacggggaatttaaatgagcctggctgtgtggtttgttatatgaaaatctgaactatataaacataaatggcatgtctggactagcatgagggtgagagatcctgggaactccaccccccatactcttatcgccctttcctccaggaacctccaggttctcagggtgagaatccacatagatcccttcatggctctatttctaggaaaccaaatctctaataaatacacccagactttcttcagacacagaaaccatgggaaaggcatctctagatcctcatctatgtggggaaaggtaatccatccccattacaagcccatactagcaggcttcctttatcatgaaaatgggtaaaattagccaatagatgtaaatttaaagaaaatttcctgtgatgctccagccagaaaagagcaaaaatcagcttcacttctggagacttcccgtataggtcacagcccagagaaagaagatcaccacagcattaaaattcagctgtaagaacatgtaatgcttccgtgttccacacattatgtctcaccagtttagtcaatatggattaaatacgagagtgtggcaatgcacaaactctatctgaggaggaaataggagaaaaatgttaaggaaaatagaagaattcgacgcctctaataccaggaacttcagcacaaagaaaatgatttcacccttattggcctcaaatttatttttcctgtggcatctgcagggttccaaagtgagaaaaattaattcactgtgcatgcacttccgaagtgtccacttgcattctgatatctttacttctatttgcagaaagtagacacatattcagccttagtgccagtgtagggagtgctttccgtgacatggataccagaaaaatagggtaaacatagggcccattaatgtgaaaatcagacattgtgtgtgtgtgtttgtgtgtgtgtgcgtgtgagttgaatagtagagttggagtgggcttctatccacctacacctgcaggtattctcaggtgccataatcaactgcaggaccctaaaggaaataagagtccccccaaacccctgaagagtttttgggttcaccgtgtgtccaatgattcagtgcctcttgagctctaggaaagggctccccagtgatgcatgagatctttcttggggtctccctgcagagttcactgggattcctaaggccaattcagtatttcaaaagatggtgtgagaagcacaggctgtcactaaaggagaattctgagccagggcacagccactttatacttggctggggacactggtaggaatatactctgtgagatcagacaggaacctccttgcaggggcagggcagggctgcagggggcgctcaggacacacagagcacaggcttccgccccagagcaggtgaaggaggctggggaggggttcctctcagggcctgggacttcctttaaaaaatctaaaataagtatttcacaaggactgccgatgtttatataaatatcctattcaattgtgagcatttatgaaactcgatgttgtaatgagaaccacttttacaattggaatttcaaacttccctagacatcttaatagtaagcagctggaggtcaggaggagatcctttcttataaataagtgcaattttgggagaaacacactcattcccaaaatagcacattcacatattaaggtctagaaatgattcgagttgcccctgagacagtcaaatgtgggttctaagtgaggtgcgtgtcctgggggagcttgttctccagtgggggaagctctgtcaacacagagttcagggatgggtaggggatgcgtggcctctaacaggattacggcttgaaccctcagcttctacaattgtgtcgtccatgtgtcatgtatttgctctttctcatcctgggtcaggaattgggctattaaatagcatccttcatgaatatgcaaataactgaggtgaatatagatatctgtgtgccctgagagcatcacccaaaaaccacacccctccttgggagaatcccctagatcacagctcctcaccatggactggacctggagcatccttttcttggtggcagcagcaacaggtaacggactccccagtcccagggctgagagagaaaccaggccagtcatgtgagacttcacccactcctgtgtcctctccacaggtgcccactcccaggttcagctggtgcagtctggagctgaggtgaagaagcctggggcctcagtgaaggtctcctgcaaggcttctggttacacctttaccagctatggtatcagctgggtgcgacaggcccctggacaagggcttgagtggatgggatggatcagcgcttacaatggtaacacaaactatgcacagaagctccagggcagagtcaccatgaccacagacacatccacgagcacagcctacatggagctgaggagcctgagatctgacgacacggccgtgtattactgtgcgagagacacagtgtgaaaacccacatcctgagggtttcagaaaccccagggaggaggcagctgcactgaatttgaggagattacagggcttacaatgtttaaagttgtttagaaaatgagctgagcaattgaggaatgtgagtaatggaaacatggatgcactctatataggaaatgtttctttcaacagtcaccctatatgcaaaattcagaatggtaaaggcagcaatcagtgaggctgacgcaaatattcccatggaggccttgtgcagacataccgtttttaaaatcagatagataaataatttggaacaagattgctggtaacgtggctaagactaaatatgattcctaaaaactggccaaaatctattccaaattgtctctgccactccttttacataaatgtattaaaaagtagttttaagaccacagcaaaattggacagaaggtgcagagagttctcatgtgcccctgcttcaccatgcacaggctttcccactgtcaccatcctgccccagagtcatcaataagttacaatggatgaacttacatgggcggattggttctttcctcttctggtggtctcttggcataccaagcccaaattatcttgaagcaccataggttctactgtaatgcctaaccttgttttttactctagtttgctactttaaattttccctttttttgtctccttaattgccagccatgtttcccatatgaatagactctccctggctgggaaagctgggcaaactccatttgaccttttgatttataagacattaagggctccttacccaaccctcttcttcaaggaattaacctgtgtaagcagatcctcagcatttcaaaggagcccaattaactgataaggtactggaacaaacaatgtatgaagttcccaggatttttctcaaagagataacaacataaagccttgagttcatgcccagcatagcatcatatctaactataatgaaggatttagagccctgcacctggtaacgttgctttttgtaaccatttgtcttttaaattgtttatctctctgtaaccatttgcttcttttgattcttgcatgtttttacttctgtagaattattgtatttgagttcccctccccttcctaaaccaagatataaaagttaatcaagccccttcctcggggccgagagaattttgagcgttagccatctcttcggcagccggcttaaataaaggactcttaatttgtctcaaagtgtggcgttttctctaactcgtttgggtataacactacaagtgggttcctgggaatgatgccagttcagaggaaaagtgggtggggctattcatatttgggctcttttttagaagattcataaaacagatattttcctatacgttctgtgactcctgatttactatcccttcccagagggtaaggtccctaagtgttttgcggtatatccatgtctatggaaagaaagcaagttctggtgaatcccgtaaggaatgtcctttgatgagaagtggagaccttggtcatgaggcacatcatgtatgattttctataattccgttagattcactgtaattttggggggtgtcctgtggaatgggtcttctgtgtccctgcatgttcagctatatctgtgtggtgccacttacacttaatgagatgagattcctgctgcttgtatcaggtcactggtgatctctgaagctgcttctggtttctgctttaatatgtaaagagcatgtcaaacatcacccacattcttacaataataaaagcctggaaaattgattatcaataatttcttgaatctgttgaagaaatgaaattgcagggaaaaccaggacccccaaaactagaaagacattaaaatagagataatcagactgatggatcaaagttctgtggcaataagataccaaattataaacaaggcctaaagtcatggattaagtcactcacccctacacttaaaaaaatgactgtactgtaacttccacagggcttttttgttttctgtagcacctaaacaagcactggttctgaggtaagcatattaaaacatttgcagctcatggaactccaaacgtggtaactgaccctctcccacaagccataaatagagctttgtttggacaagagacagatttcagtaactgtcttctgagaagagactactgaccatgaacttgtcctggcaatttacagagactgtgcagtgtgtgtctttctgcctctgcacaaagcccttttgatgaacagggcccgattgtcattcatttagttcttaagtcctcatccccaaagcaaacactaaatgcatgtaacatgtgtgtttgcttattagacatgagagcctgcccactatgtgaacatcaacaagatccttctatagcctgctgagtgtgtacacttggccaatccatttgcatgaattcatttctcctctttccctctcttgaagtgcctgctcactgtctctgtgggaggctttgcttcccagcctgttaaggtggctgtcctgcagctttaaccatttctcagaagtaaagtctcctttctaaatttataaattatgtgactgttccgttgaaagtgcaagctggtgggaacagttacatggtaattcggtaaattgctggtggacaggtgtggacagggatagggtaagaactcctgggggctgcacaccccacacttcgatggaatttccctccagaaacttctgggttctcaggatgataatccaaacagattccttcatggctctgtcatcaggagagctactctcttgataaatatgctcagaacttcctccagacaagatcctacagagaaaaaatgcttttcaagatcctctattctatgtgaggggaaggtattcttttccatcccaggcagtttcatcttagccttcctgtgtcataaaaaggtcaggttcaagacaataatatgtggatgctgcagccaggaggggggagtagaagacggaggaaaatcagctgcaccactggagactccttgtaaagggcacagtctagagaaaaaacatcaagaaaacattgaaatcaatttccagtacatatactgctcccctgcccaccacatcacctcttcaccagtatgatcaatctggattaaagagaaaagtgtggcaatgcacagactctgtccaaggactagaccttagggaaaccaaaggcagagggagaggaaaagttaaggacagtgaagcggtttaaagcctctgagaccaacagcttcaggaccaaggccacggcccctctgtcaatggccttagatttacctctcacggggcatccacagggttcccaggtgagaacaggcaaaaacaaggtgaagacactttccaaatctccagcagtactgagcttgctttagctctgtttgaagaaacaaaacaacaacaacaaacaacaacaaccgcaaatataaccaggattaaggtcagtgttggaagcacttttattaatttttttaaattttttatttctcagatggggtcttgctctgtctcccaggctggagtgcagtggtgcggtctcggctctgcaacctccacctcctggggtcaagcaatcctccaccctagcctcccaagtagctgggattacaggtgcatgccacggcgcccagttaatttttgtattttttagtagagacagtgtttttccatgttggtcaggctggtctcgaactcctgacctcaggtgatccgcccaaattgccctcccagagtcctgggattacaagttaattgagttaataaagctgttctgaactatgaaaaacattagtttgctcccagattttcttgatttcagtttgattattatattcagctgctgccctaatatgtttgagcatgttactatttaaatgaccctggctgtttgatttgttatatataaatctaaactaaaacaacttaaaggacaggtttgtactattattaggatgagatattctgggtgcccctcatttgctccatgaacctccacatttttaatttagaattcacataaattccttgtgagttgtgtcagtcatcgagagacctaatctctaacacctttacccagaaccttctccagatagaccacccacaggaagaacatttatagtaatttatctacatggtggaaggtacttcactgccattgtagaaccctcttcccagccttcctttatgaggcaaatgattgccagtatggtaagattgaacaaaaggatgtgccagtagggtaagattgagcaaaaatagtcctgagatcctgcagacagggaaggacgtaatagacaaatatcagctttattagaggagactccttgtaaaggtcatagccaagaaaaagaagacaaaatcactgagattaaattctaagaatcttggtccagttcaatcaagccatcaacagccaggtggcttcagtggccactatgcatattaccccatgcctaaatgttctggcttgtacaaagagcttctctgtaaattgcacattgccatagtggaagatggcatgggagattttgtgacaaacacttaaggtgcaataatagctatttttcctttatcatgacaatatgtggcatgcttctagattcatttcatgccaaagaagttcctcagaagggtaaggaaatggagaatcttacacggtccaatgcagtccccaagaagggactttgaatggacagttacactggttactacgatgtgtctctgaccttctcaggatcgaagatagtcatgagtatcaaggtggagatggtctaggtgagagaaaggaagtagtgttcttagaagatggtatgccaagataagcctgactatctctcctcttccagttcctgcaacttcatattgcctgattgagtcacttgcctatggtggtaatgacatcagcaatgcaataaattctctggtggctttatatctggtttataacatgggagatgtttcctcaagagtggtgatgccagtgtggcttctgctctctggtggtgttggaatctgcattagtctgtgggtttggaggaaggagattcagccatggggaagaatctgacactctcacaccctctgtgccttcggtactggactgctcctgccctcactatggtgattgcatcagatattgcctccccaccagacaacacgttaacatggctccttgtacctggctttaaccaagaaagttgtcgacttgactcttcgtgacattgtatagcctggtttgtcacaatctttatttcgggaattatcagtgctgccatcttggctgtcttcaagtatgtcatcctcacagtgtgaagctgtttgacattaacatttttgtcaatgtttgggactaccttacatattccggctcagttcaaaatgagctatgtaatgtagccaggtttccactgagttccactttgcttcttggctgtctattcctgcgcaagtttctatgtattttgtatcaggcttcaattccattatgtttaaaatgttgtctctaaagataaacaaagatttttttaaaacaaccaaacatgcagccatttgaccgagtgtggtctgcattgttagtctcaccatcttctgccctaacaagcaccgaatctaacaacacaaatatcatggaagctttccttggagtagctcctgtaattagaatcattgtattctgccctcctgtcagtggtggaacgttctattggcacatgtggaaacctcttagagggacgagtttctttgaacacaataaaattttaagttaggaataacttatttgaaagcaattcattgaaggttattgctaagaagttagaaacagtcttttggcagtcatttcttcaagatgtatggcagtgtgggagggatatataaagtggaataggaacttgggctagttaaatggaatagcctccaatgttaatctgtttaccttttaactgaatgaaaaagcctatagttgtaagaaaagaaaaaaaacacaatcctcacacattcccttcccatcagcattgaagatgagtgtggcaatgcagagactctatatagggaggagaacatagggaaatgcaaagacaatgggagaaaaaagtcaaggacagtagagcaactggaagcttctgacaccaacagcttgatgaacagggtcactcaacccttggtggacacagagtcacttctcttagggaaactgcagtattctcaggtgacaatatgcaaacatgatgaatgtacacttgctacgtctccagttgtgtactgttttccttacttctgtttggagaaggaagtcatatactcaggtctagtatccgtgtagagggtgctcaccatttgcaagatactaggaaaaatggcaagttagaggcccactgttgtaaaaatcaaccagttctgtgtgtgtgtgtgtgtgtgtgtgtgtgtgtgtgtgttatagaaaaagaagacatggagtgggcattgatccacaagtatatatacctacaggtattcttagatgtaatattcaattgcaggagaccaaacaagataaagcatcccccaaaacccttgaaaatttttgtgctcactatgtgtccactgattaaatgtatcctgagctccagggaagggctccccgatggtttcttagagttcactgggtctcctaaggtcaatgttttcaaaagatggtgtcagtaacatatggtgtcactgaaggagcattttaaactagggcatgacctcttcctatagccctagagacactgagagagaaatcctctgtgagcccagatggaaacctccatgcagggcagaggcagtgctgcagggggcgcccaggacccacccagaacaggctccagccccagagctggtgcacaggaggctgcagaggggatttctcccagaattgagtgttgttttattgaaaaccaaaaaattataacatgttaaaattagaattttgcaaagactatttctattatctctatacatttagaaataaacaaatcaacaattcagtgagaaccacatttaaaaggcaaaattgttacttgtttgagatattttcctagtaaaaagatgaagaacagggatggttttattaaatcaaaaggtacacatttcagaagacgcagagatcccaagagtaagactgcagacagcaaagcctagaaagggcggaggctgtccatgtgccatgtcctgtgtgagtcaccttcttagtggagaagttctcccttcacaaagttttgggcatataaagggaaacacgacattaaataagaacgaggacttgtacctcagcatcccacagttgtgtggttcatgtgagatctattttctctttctcatgctggatcaagggtaaggctatgaagtagtagttctcgtgaatatgcaaatcacctgaggtgaacactacagatatgtctgtgccctgagagcatcacccaataaccacacaccacaaagacactcgctgagaagagcaaccctaagacacataattgtcagattcaccaaggttgaaatgaaggaaaaagttttaagggcaaccagagttgtgccatggcacagtgttgtgccatgtcctttctctgttttcttgcctgtttatttatgtcagatgtgccacctacatggaataaggtcagaattctgcctccagtaacacatcaaaggtgacctttgattgtacttttggtttatgctccaaaatattgattataaaattcatcaccgtcatattttatgtcaaaataaatctgcataatctgaatgtcagtacattttggaatctattaaataactgaaattgcaagaaatattacccactccaaaaactggagagatgggcatgtccagaatggcagttagcacttgcttacctggtgcagaaactgcagaagccacaagctgttgagggcacttacatggtaaccactacggacgtctgaaagacaaatgtggactcggtaaatgtgaccgttccagagggtcttatacttctaaggtttctggactttctctccagaaacctccagattctaaaatatacaatccaaataaatttccgatgggtcagaattgaagatgaaatgaagatgattaattacagagaaatataccaggagcccacttcaaaagcttctaaagggaatgacttttccagaaccttatcctatgtgaaggaagacaaatctcccattccagattctcccccattcttccattattatatgaatgagtaaagttagccaaaaggggtaagacgtacataaatagtccaaggaggccgaaacctcaaaagggagtaacagccaaaaatgagcttttcccctggagatgctttgtcaaggtcacagcccagaagaggaagcctattgaatctctaggtttccattggaagaacaggcagtgcttacctgcactgcacaatccattctaactaggatgatggctatggattaaagatgaaagtgtggcaatgcacagactccatctgaggagaacacagaaatactaagacaatggcagagggtgagacaaagacagtagagcaatgtgaagcctctgacatcgtgatttttaagaccaacatcttgtaaatgccatcatagttctcagcttcttttattatgggacctttgctggtttcctagctgagaaagtgaaaataacaacctgcatggacttcccaagtctccacctgtatcctgtttgctttagatctctaggagaagaaagtcagataactgggcctggtgtcagtgtaggaggcacttcctaaaagccacatattaggagaagggaaaatgtgtgttattggaatagtggatatggagtgggctttcatttgaatgtatctgcacctgctagtattctcagatgcaacattcaactgcaagagcccagtgaagaaacatggcactcgcaaatctcttgtaagtttttgtcttcattttggttccactaatgaagtgaatctggagcttcagggaaggggctccctcctgtgtcattgaatccttgctctgggtctccctgcagagttcaataggtttagtaaggctaatcaattgtttcaagagatggtgtcagcagcatatggtgtcactgaaggagtattctacactagcacacagccatttcatgctgggctagagaagcctgggggaaatgatttgaagtctcagcaaggaacctccttgcaaggcaggggctgggctgtcgggggcaccgagcaggtgagtcagaaatcaatatgtaaagatgaggacctatggatatgaattgaaaatatataaatacttcaaaaaattccagtaaattgagtccaaaattaaccccaaattattcaaaacacaaattccttgacaattattttgggagcagtgagttcataaagaattcaaaactactgtttcagcttctgattcttattgttcctgagatgagaaaatcatctctaatcacacatcacacagcaaatctgtaaacaagagtgtttctatggaagatcctgggggatctgaacaccaggcaggtgctggagaccctgtttcaggagcgcccagcagatctcagagggacctgctggtcactcacgtgggacatcagcagtaactttctcagtcaccagtcagctgtgctggtgactgatggacccaggacagaaccaaggcacctcctcagtgtcatggagagtgatggttccagaaatcatccaggtgctctctgtgcttataaaatgtaggttcactgtgaggagcatgttctgagggggattgttctgtgaaaggacctctgttcatgagtgttcataaatggagcagggcatgcatttcctcaaacaggaatagcgcttggaccatcagcatctcactcttgtaaatctgatgtgtcatttatcttccctttcttattattgaccaggctttgcgctatgaaatgctctgtctcatgaatatgcaaataacctgagatccactgaggtaaatttggatgtctgtgccctgagagcatcacccaacaaccacatccctcctctatagaagcccctgagagcacagctcctcaccatggactgtacctgggggatcctcttcttggtggcagctgccacaggtaaggggctcccaagtcctagtgatgaggaggggattgagtccagtcaagggggcttttatcatctcctcccttctcctcacagatgtccattcccaggttcagctgttgcagcctggggctgaggtgaagaagcctgcgtcctcagtgaaggtctcctgccaggcttccagatacaccttcaccaaatactttacacagtgggtgcgacagggccctggacaagggcatagtggttgggatgcatcaacccttacaatgataacacacactacgcacagaagttccggggcagagtcaccattaccagtgacaggtccgtgagcacagcctacatggagctgagcagcctgagatctgaagacatggtcgtgtattcctgtgtgagagacacagtgcgaaaacccacatcctgagagtgtcagaaaccccaggaaggaggcacctgtgctgacacagaggagatgacaaagattattagattaaagattttcttagaaaatgacactaagtcattaaagaaaaggaacaatattaatgtgtatttgagaaattttaattatttgagagatttttcatacagcatttattctgtaaacaaatttcaatgattacagaatgaatcaaattaatgaaactaatacagaacttcctctgaaggtatctttgtaaacattaatttcttaatcagtgctgtaagtattttggaacacagacacaaaatcacattttaagtctgcatttatgtctattaaaaatgccaaaaaaatctccttttgtgcatgtagcattttgaattcccaccatcaatgcatgatagttcttggttttccacattcatattgtcatgtatccttatgagaattgtgtgttttaaccaatctagtaggtgagtaatgggatctaatttttatttaaatgcacatgtccctccaaaagttcatatttaacaattttcctataacttctgttgagacgcctctcctgacattcggttcattttaactgcattgcttcatttcgattcattgcaagttgacttgcatattgtttataaaagtcatttcacaaattaaaagaattcatttcacaaatatgtgacttggaagtattttctccaagtctgtggctgtctttattcccttatcagtgtgtattgcagaaacatatgtgtgtgtatgtgtctgtgtgtgtatgtgtctgtttgtacgaatttagactcaaaaacatgtaaaattgcattcattcatagatgatgtatttggcaatatatatgaagtctcattataaaatacactaatagtgattattttttccatgtctctcaactcaggccacaatcaactcatgagtgtttaaacttcatctacttgattggaggactatccatttcagatatttggaatacttctgtaaggaaatgtgttcatcttcccaatatttatttatataatcatctattaatatgtgtattggtttatgaatatatatttcatactctgaagaagatccatgctatattattcattttatcgttcaaatcaccacagctttattaggtcctgggagctcatttaatttggatcctgtatccttacagcacacctcatccttttgtttttgaatacttccctgtttccttgtattacaataaattctaagctcattttctatattaccttttttgtacatagaattagccttttttctaaagattgcttgtttctaatgttaacgaatagcagtaaaataaaaaaaattgtgataccgtgtataattacttctaggacctctcaacctactggcctagtagacgtgcatgtttatatgaacccatgtttgtggacgcatcaaaactatttatgtaactaatcttctgtaactttattatattaaaaatgagaacacactggtctcctgacccaactatgctaccacatggacctttctagccttccttccttgactgtccataaccacccactgcaaagtgaggaatcctatcctaccaactgccttattattacctagttgcacaattttaggacacatgcatagcggtatcagaaatgtaaagctcattggaaatatatttatctactagaatagagtgttatgtgtagtttctttacattttaaacttatagaatttcctcatttccaaagttaattagattagcaacttcattttctactttctttagtgaagtcatttcaattacattatataatatcatttatttgaaattcggtataaaccaaaactatagtcaagtaaacagatagaggatattcaaggaacttagagagtgagtattaaataagtacaaatggcactgtttaagaatagtaaaattatttttagtgatataaaatggttgagacacgatgcagttaatttgtctaaactcataaatgtgtgatggaaaatataaacctaaatatatacaatttttgtaaaaagtatttagcagttcattaaccccaggattaaatgcagactgtatcaagttatctaataacttatttggtgagggtggggatgtcatgagatgcatgcaaaaaagaatgaagtaattttcctcatttgcgtttaagatgttaccattcactaaagacctttaatttaaaaaaaatcaattttctacgtgacccaggttttttcttcctgacgagcaaataacccagataattcttttctttccttggttgagaaagattttccccaaacttcagctcagttcaggcacacactgtccctgaatgggcatttaccctcagatgggtaacacacctgtcaacatggggactcttctgtcagacaaacacacctttactcacgtggattcttccctcagaccaacacacaagtccccacatggactctttcctcagaccaccacatatgtccttacatttactctttcctctagtaatgacatttcctcatgtggactcttgtctcagacaaacaaacatgtctgcatgtgaactcttcactctgataagtacaaatatttccacagtgactgtttcctgacacaagcacatatatccaatgttgaactgttttatggcaaaatgatctcaagataataattataaaatccctcctgacaaggtgtagatctgcatttttttattgtaccttaactttgccttattgtcaagaacaatagtttgcagctctatatgcaccgattagagattggtgtccattttctctggaaatgtatttttatattcttactggatgtatttttttgataatgtttgctactgtgaagatacctgaacagggtccacactagaaaataaaaaagactaatcggcagattaaccctgtgcatccagacccacgagtcctttgatcctgcccccctgaaatggagacacagaggacagatgagcaatgctgagcggtgcacccaagaccacaaaaagaaagacaaggaaatgtgtcccctcccctcctcatgaaaggcagctcatcccctgttccttcaggccctggtgaggagccaacccatgtctgttcccttcctcggtgtccacaccgtggggtctgccctgatttgggcttcccttctcatcaccctcaatattagtgtcccttgtgaatcaggtccagctgcggctgctccacatggggccgttcttccatttcctctgtgtttgcagaagtcctgtgtgaaatttactgatagagtcaggggggaaaattgtacagcccagtggttcactgagactctcatgcaaagcctctgatttcacctttactggctacagcatgagcttggtccagcaggcttcatgacagggattggtgtgggtggaaacagtgagtgatcaagtgggagttctcagagttactctccatgagtacaaataaattaacagtcccaagcgacaccttttcatgtgcagtctaccttaaagggaccaaactgaaagtcaaggacaaggccttgtaatactgtgagagacacaggagagggaatatctgcgtgagcccagacagaaaaatctctgcaggaagacaggagggagctgcatggtagatgctcctcagaaccaccagggcaccttggggacaacctgggggcactcagaaccaccagggtgtgcttaggaccacgggacactcaggatattagggggtgctcaggatcacgagggggcgctcatgacaccaggggacactcagaatcacaagggggcgctcaggacacgagggtttgcccgggaccaccagcaggcactcaggtcaccagggggtgctcaggaccaccagggggcgctcaggacaccagggggcgctcagaaccaccagggggcgctcaggacacctgggggcgctcagaagcatcaggggtgctcaggatatcagagtgccctcagtaccacgagggggcgctcatgacaccaggggcactcagaaccaccagggggcgctcagtacacgggggttctcttaggaggcagctccaaatcagaagcctgagaggctgtggttttcttttaaaccttggtgattcccgacctggtcaagcaaaagtcttccccaggatctctcaccatttcttccttgtaagtccatgattacttttacctacaaaacattaacttagaacaggaatttaattcaacttttaatgctgcatattttccaagtaatactagcaatgatctctcaggacaatttttacaataggttatttatatattttcttgattaaaaataatactattattaaaatagtaaagttataaaaatcacacctgtaatcccagcactttgggaggctaaggcaggcagatcacttgagctcaggacttttagaacagcctggcagcacagtgaggtcttttctatatatatatatgtaaaataataataataataataaatacctgggtatggttccacctgtggtagcagctacttgaaaggctgaggcaggaggatcccttaagcctgggaggttaatgctgcagtgagctgtgattgtgccactgcactccagcctcgttgacagagtgagaccctatttaaagaaaatgtataccctcaatacaaactgtttcaatgattagagttttgtatttttgtgctgtaatagtcaaacaattgtacatgttttttaacattaactcagcatatacatggtattttgtttatttttctttcatctgctgtttttggaaattaaacacgactttaaatgctcttgttctccattttggttggcttcaggtgtcctgtttttcagactatttctccatcttccctttctctttgaaagtattttactttcctcagtctccatgaaggaaaaagaaagtccctttactttctgacctccaagtctgttgaatcagttcccttctcttcataatcactgaagccaaccaagtttagaggataatggttctccttagaatatgctcgtctacctgcagactctctgccctaactcacccttttccagggtcctgcagaccatctcctcgtttccctaagtaccacagagtgggctctgcagctcctgctgccctctgtgtgctcagccctggggctcactagtgttttgatgatcaagtccaaatccccatgtgcttggaccctctgagaccaccctctaggaagatgccattgtgagtgagccctgaaaatcatggactgtgttcagtttcatattcctggatgttctctgttgtaaaggaatattgacaaataaatactagagtttgtattgaatattcatgccaaaaaagttttttaaaaatttttcaaatgaaacaattttatcttgcctagtttgaaaactacaatctaaatttaacaaataatgtaatacaacgtttgtcctattagttattcaatttattaaaaacagactgatatttaaagttaataccattgcacatttgagtgacatatttggcaagaacagcatttacattcagctttaacaaaacatgtatttatatatatttgtctttttagtattggaataggcagacatacacgtagaagagcattattttctactacaacctcaaactgcaaacacaatttaaattcaattaagtaataaaaaaaatatgaaacaaatgggtgtgctgttttggtgtttagatatacattcacttttgcatgggcacatgtatgtgtctttgctgggctgttgtgtatgtatgtgtgtttgtagaaccatgaagttttcaaatacatcattaaatgacatagttatattaatcttggccaggcatggtggctcaagcctgtaatcccagcactttgggaatcttaggcaggcagatcacctggggtcaagggtttgagaccagcctggtcaacagggtaaaaccccgtctctactaaaaatacaaaaattagccaggtattgtggcacaagcctttagtcccagtgtggcagggaaatgtggggtcggaaatcccacacagagtttctactggtataccacctagtggagctgtaagaagaaagccactgccctccagaacccagaatggtagatccactgacagcttgcaccatgtttctggaaaaaccacataccctcaatgccagctcgtgaaagcagccaggagggagactgtgccctgcaaaagttttttaaaacttttcatttgaaaagttttaaaaaagttctgtcacaggggcagaacttcccaagaccatgtgaacccacttgttacatcaggtaacctggatttgagacatggagtcaaagaagattattttggaacattaagatttgacttcccagctggatttcagacttgcatgggacctgtagtttggaccaatttctccatttggaatggctgtatttacacaatgcctgaactcccattctttctaggaagtaactgacttggtttttattttacaggctcatagatggaagagacttgcctcatctcaaatgagaccttggactgtggacttttgagttaaggctcaaatgagttaagactttggcagactcttgaacaggcatgattggttttgaaatgcgacagcaatcattactctagaggaccacacgtgaagtgcaacaagcaggcgcagaagacaagtgattcgtgatttcactgtagtttgtttaaatggtagactcacagaagtagaatagaatgttggttaccaggggctggaggggtggactggaaaaggagagattgtggtcaaagtgtaaaatgttccagttagacagaaggagtaagttacagtgttctaatgcacaagatggaaaatatggctgtgaatgcattatatatttcaaaatggctaaacatgcaaatgttaaaattttttcccactaagaaattatacaggtcgggagcgggggctcacacttgtaaacccagcactttcggaggccgaggtgggtggatcacaaggtcaggagttcaagaccagacttgccaagatggtgaaaccctgtctccactaaaaacacaaaaattagccaggcgtggtgttcaccacaggagaattgcttgaagcaaaggctgcagtgagccaagatcataccactgcactccaaccggggtgacagagtgagactcagtctcaaaaaaaaaaaagaaatacatttatgaggtgctggatatgttaaatagcttgattaacaattccataatgtatgcatgtatgatagcatgtgtgaatggacctgtatgaaggtgaggtgccctggtcacgtgacagtgaggtgacttgggggaggtgtaaggttacctgggggtatgtgtgcggtgaacttgggcacatgtgaggtgacccacggtgcatgtgtggtggcctgggtgcgtgtgaggttacctggacatgtatgaggtgacatggggaattcgtgaggtgacttggatatgtatgatgtgacctcaggcatgtgtgaggtgacctggccgacgtgtgaggtgacctgggggacgtgtgaggtgacatggggaatgtgtgaggtgacctgcgggaatgtgtgaggtgacctgcgagcattccaggtgacctggggggtgtgtgagcttagcaggagtgtgtgtgaggtgacatggggtatatgtgaggtgacccccctgacgtgtgaggtgacctgagcacatgtgaggtcacctaaggcacatctgagttgacctgggggatgtgtgaggtgacctagggaaatgtatgagctgacaaagggcatgtgtgcagtgacctgggtgcatgtgaggtgacctggtgcatgtgttagtttacctgggggatgtgtgaggtgaacaggggcaggtgtgaagtgcctgaggaatgcatgaggtgacctggtgcatgtgtgtggtgacctagcagatttacgaggtgacctgcgggatgtgtgaggtgaatagggacttgtgtgaggtggccacaggaatgtgtgaggtgacctgggggatgtgtaaggtgacattggggatgtgtgaggtgactcagggcacatgtgaggtgacctgggggatgtgcaaggtcaccttgggtgagtgtgaggtgaccttggggatgtgcaaggtcacactgtgtgagtgtgaggtcatctgggatatttcaaacttcgtaaggaaagcctgcaacagtatatggcactaaaagcttcacactccaacaccgttaatgcgcacatcctcaaggaactctaagtgtttccaggttagcttaaatgccatggagcgacacctgccccaggcacactcatatatgcatcctgggtctccctatcaacccctatcctcaaattttcagtttatgtttgctccatgatatcaactctgatatgttgaaggttttttttttcttttatttgtagttgttcaggtttgctatttcactctcattactctgggctcagtcctctcctcaggtgtcccacttcagagcttgctatataataggagacatgcaaataggaccctcccttttctgatgaaaagcagcgcagcctgaccctgcagccctgggagagaagccccagccctgggattctcaggtgtttctattgggtcaacagcaataaacaaattaccatggaatttgggctgagctgggtttttcttgctggtattttaaaaggtgattcatggagaactaaggatattgagtgagtggacatgagtgagagaaacagtggatatgtgtggcagtttctgaccagggtgtctctgtgtttgcaggtgtccagtgtgaggtgcagctggtggagtctgggggaggcttggtacagcctggggggtccctgagactctcctgtgcagcctctggattcaccttcagtaacagtgacatgaactgggcccgcaaggctccaggaaaggggctggagtgggtatcgggtgttagttggaatggcagtaggacgcactatgtggactccgtgaagcgccgattcatcatctccagagacaattccaggaactccctgtatctgcaaaagaacagacggagagccgaggacatggctgtgtattactgtgtgagaaatcctgtgaggggacacaagtgcgagcccagacacaaacctcctgcaggaacactgggcgaaatcagctgcagggggtgctcagggcccactcatcagagtcaaccccagagcaggtgcacatggaggctggggtttgtttcctgtcaggatttgggacttcctctgcttctgacagtttccctagggaaactctttaattttagatttctgtgcccaccaatgtcatctctacatatatttttttaaatcattataatacgaggactcattctcacatgcacaatatgtatattgccacctacgggaatgaaaactcctcaaccatggtcaccagcatcagagttgtgaggaagctcaggggtgcctggtgagtcttctccagtcagactcaggacagtaacctcaatgggattccctgactagaatggcttttagggatttcgattacagccaagagagaggctggaccaggttcagtgtcatgtaggacctcacagattttatgtatgacatttctcctgacaataaagtatgcaaatgagtatcagtcactgatctggtgcttcctgactttcatttttagtggttctcgcttttccatttgattttcctgctttctggataaaaggatgttgtccctgtggtctaaatccctggggctcaagccctttccctggagcttaggtggggctcaggctgtgactcctgcagccattgggagaggctgctgagactttcttctctctcattgttcaggatactccactctgttttctggagacgcgtctgagaacgcgtgtggccattagtaatgagggcacaagcttctttggtcaaaatggggtgaggatgtggaattgatcctgtgctgtgtaaactgtcacagagtcaccttcttcaccagtagtgttagaagagcttgtaaaatttgtcggaatccaactggagtcccctgtgttcaaaccctgacaaatggagctggggaaggccatggatggaagcttctcatgcacatacccctgagaacaagacctagctttataacactccaaaaaaccacaaattgaacaaaggcaaccacaacaataaaagaattacttatatccctgagaacaagagctagctttataacactcagaataaccacaacaacaaaataattacttatatacctaacaacaagagctagctttttaacactcggaaaggccacaatcttgcacaaggcaaccacaacaatgaaagaattacttctgtgaaaatatctgcacagcaactgcctatccaaccttacactgatgtcaaccttgttattgatgcttctagcccaggatcgtcctcatcaaaatgtcattcagatcctgcctatgaaaaaaattgtgtttttcagtgcactcatgttctagtaaagccctcagagaccctctccttcacctgtgctgtctctggatttccaatcataaccagtacttcctcctggagctgtatctgccagcccccagggaagaagctgaagtgggtcaggtgtgtaggtcacgaggaaacacacagtgcaacccgcttctcaagagtccagtcaccacctccagatccacattcagaaaacagtttttcctacagctgagctacccgcacaatgagtaaaccaccatggatttttatacaaaagacacagaaggggaggtcattgtgaggccagacacaaacctccctgcagggaagctcaggacaccagggggtgctcagacaccaagggctctcaggacacatcaaggcaggtgcaagaggggaaaaaaggtgctggaggtggggtttttcatcactgtcatattttactctccactatatttattctaatgtatattattttattattagacaatgatatttatataaatatatagccatacgtaggtgcaccaagttgtcctttccatcttatgtggaccttgtccattaggacgaagtccctgtatgtatttgagcacctcataagttatggttaattatgtaggatctctcactttttctgtgtcccttcctccctcctctctcacacacaaactgacacccacaaagagttctacaactttaattacctgatgcgttgaagaaaatttactgaagtgcagctttttcagtttaactgctgttcatgttgatgtaggaataagaacattgtctttctcaactgtgtagctctctaagctgagtagcacctttatttataatacccagatactgaaagcaatccaaatattgatcagcaggttaagcagtaaacactttgttctaaattcgttcacttgaataatacccactgttcaaacaagtacggctggaaatgctcaacaagggtaaattcacaagtacttatgaagagtaacataagccaaagaaatacaagtacatacatacagttccacttttataaattttataaaatgaaaactaatctaaagttacataatgaaaaccagtagttggccgtggacatggtatgagaagggaaggtgtaggaagtggcaattacaggacaacgagaggaaattttgaggataattttttctgtattgagaaaggttatggttatgtcattatttgtcaaattgtacacattaagtgaagattattactttctaatttcgacttcttaaaatactacaaatttaaacatatataatttggtagaaaaggagttagagatggataaaatatatgagaaataaaaaagaaaatctcagaacgatggcataaggattcaaccatcaaactaaataaattttaaatttctcaacacagaattatagattcataaaaccagctcctggattcattgattttgtggaattgatttacatgtctttatctccttcagttctgctctgatgttaggtatttcttctcttctgctagcttgtgaatttgctcttgcttctttagttcttcaaattgtgatgttagggtgtcagttttagatctttcctgctttctcttgtagacacctagtactataaatttccctctacacactgctttaaatgtgtcctgaagattctcatatgttgtgtctttgttctcattggtttcaaagatcatctttatttctgccttcatttctttatttacccagtagacattcaggaacaggttttccagtttccatgtagttgtgcagttttgagtgaatttcttcatcctgagttctaatttgattattgcacttgtggtctgacagactgtttgttatgatttctgttcttttgcatttggcgaggagtgtattacttccaattatgtggtcagttttagaatatgtgcgatgaggtgctgagaagaatgtatattctgttgacttggggtggagagttctgtagatatctattaggtctgcttcaagtcctgaatatccttgttaattttctgtctcgttgatctgtctaatattgacagcggggtgttaaagtctcccactcttgttgtgtgggagtctaagtctctttgtaggtctctaaggacttcctttatgaatcggggtgctcctgtatttggtgcatatatatttaagatatttagctcttcttgttgcattgatccctttaccattatgcaatgcctttctttgtctcttttgatcttttttggtttaaaatgttttatcagagattaggattgcaactcctgctttttttttttttttgctttccatttgcttagcaaatattcctccatccctttattttgagcctatgtgtgtctttgcatgtgagatgggtctcctgaatagagcacatcaacaaaataaatagacagctagccagattaataaagaagaaaagagagaagaatcaaataaatgcaataaaaagtaatgtaggggatatcactactgatcccaccgaaatacaaactaccatcagagaatactataaatgcctctatgcaaatatactagaaaatctagaagaaatgcataactgcctggacacatacaccgtccaaagtctaaatcaggaagaagtcaaatccctgaatagaacaataacaaattctgaaattgaggcagtaattaatagcgtacaaaccaaaaaaaaagtccgtgaccagatggattcacagctgaattctaccagaggtacaaagaggaactggtaccattccttctgaaactatttcaaacaatagaaaaagagggactcctccctaactctttttatgaagccagcatcatcctgataccaaaacctggcagagacacaacaaaaaaaagaaaagctcaggccaatatccctgatgaacatcaatgcaccaattctcaataaaatactggcaaaccaaatccagcagcacatcaaaaagcttatccaccacgatcaagtgggcttcatccctgggatgcaaggctggttcaacatatgcaaaacaataaatgtaatccatcacctaaacagaagcaatgacagaaaccacataatcatctcaaaagatgcagaaaaggacttcaacaaaattcaacaccccttcatgctaaaaactcaatgctctaggtattgatggaatgtatctcaaaataataaaagctatttatggcaaacccacagccaatatcatacagaatgggcaaaaactggaagcatttactttgaaaaccagcacaagacaacgatgcctctctcaccactccaattcaacgtagtattgagagatctggccagggtaatcaggcaagagaaagaaataaattgtataaaaataggaaaagaggaagtcagattgtctctgtgtgcagatgacatgattgtatatttagaaaaccccatcgtctcagcccaaaatctccttaagctgataagcaacttcaacaaagtctcaggatacaaaatcaatgtgcaaaaatcacaagcatttctataacccaataacagaaaaacagagagccaaatcatgagtgaactcccactcaaaattgctacaaagaaaataaaatacctaggaatagaacttacaagggatgtgaaggatctcttcaaggagaactgcaaaccaccgctcaaagaaataagagaggacccaaacaaatggaaaaacattccatgctcatgaataggaagaataaacatcatgaaaatggccatactgcccaaagcaacttatagattgaatgctatccccatcaaactaccaatgactttcttcacagaattggaaaaaactattttaaagttcatatggaaccaaaaatacatcctgcatagccatgacaatcctgagcaaaaaaaaaaacaaagctggaggcatcatgctacctgacttcaaactatactacaaggctacagtaaccgaaacagcatggtattggtaccaaaacagacatatagaccaatggaacagagcagaggcctcacaaataacaccacacatctacaaccatctgaactttgacaatcttgacactaacaaacaatggggaaagaattccggaactatttaataagtggtgttgggaaaactggcgagccatatacagaaaactgaaactggaccccttccttacaccttatacaaaaactaactcaagatggatgaaagacttatccagacctgaaaccataaaaatcctagaagaaaatctaggcaataccatccaggacataggcatgggcaaagacttcaagtctaaaacaccaaaagtaatggcaacaaaagctaatactgacaaatgagatataattaaaggaaagtgcttctgcacagcaaaagaaactatcatcagaatgaacaggcacctacagaatgggagatttttgcaatctatccatctgacaaagggctaatatccagaatctacaacaaatttacaagaaaaaaaaacccatcaaaaagtaggtgaaggatatgaacagacatttctcaaaagaagacatttatgcagccagcaaacatgaaaaaaccctcctcatcactggtcattagagaaatgcaaatcaaaaccacaatgagataccatctcacaccagttagaatggtgaccattaaaaagtcaggaaacaacagatgctggagaggatgtggagaaatagtaacatttttacactgttggtgggagtgtaattaagttcatccattgtggaggacagtgtggcgattcctcaaggatctagaactagaaataccatttgacccagcaatcccattacttggtatgtaccccaaggattataaatcattctactacaaagacacattgcggcaccattcccaatagcaaagacttgaaaccaacccaaatgtccatcaataatagactggataaagaaaatgtggcacatatacaccatggaatactatgcagccataaaaaaggattagttcatgtcctttgcagggacatggatgaagctggaaaccatcattctcagctaactaacagaagaacagaaaaccagacaccgctgttctcactcgtaagtgggagttgaaccatgagaccaggtggacacagggaggggaatatcacacactgaggcctgttgggaggtaaagggctaggggagggatagcattaggagaaatacctaaggtagacggcaggttgatgggtgcagcaaaccaccatggcgtgtgtatacctatgtaacaaaactgcacattctgcacacgtaccccagaacgtaaagtatcatttaaagaaaggattacatattccattaaatatatatgagaaatcagagactcctgaatatacacatgaatacacactgggtctacctatatttttagggaaacactagaatacagcaaaataatgtcatgattttattaaaaaggggggtttatcaaaccacaccaggcatgtccagctctgtcctggagctggttcagggaacaggtgggtcctgtgtttgggagccatgacaacaagctcacagcgtcagttctagttgaaacctcaaaaaggcaaagggatctcaactaaaatatcatgtggatgtcacatctgtgggtgctgcatactcccccgatgtgaatatggaaaggttaattacctcttgaactctctgccgagattagtgctggtctctcaggaacacccaaaatggctcgatagagccagaaagcagactggctcagggtttttgtgatggtttcgtcgtgggtcagagtgaggcttcccacgcacaggaaggggattgtacagtgcgaaacacccactggtgtcaaatgaggaagctcccgcaattcctaactagattcacattgtgtgataaaagacacacaatagacataacttcatggtcggatatcacaaaatgccgttaaaagatgtggtaaaaaggcaactttaaatttttagtcattggagtgcgtacaacacaaaaatcattttcaatatttgtaacacatgcatgcaataggacaaaggtatgtgatgagggtaaaatctcgaaagtgtgaatcttccagctaccaagtcgtagggtaataactgatgtgtgctgagggaggaaaccatcacgccatagtgctaatggtataacccttggtgaagagagttcaatattttattgaagttttcataatttttatttaaagatgccatttttcaacatactcagatgattgtgagtgccattgattctgtatcgtatgaacaatggcaataccttccatgtttacataatattaaaaaccacgttaagactgaatatttggtgtcatggtgcatcacgttattctagcttccatactagttgttttatttgtttgttttctcctttgttggcatttggtttcgaattcatatgtcaggtctctataatgtaggaatttatttaaaagtgtctttttttgtccattttgatggggcttccaggagacgtaagaacctcctctgcttgcaacacattttaaaattacacactaatgtagaacatctgtatttaatcctggtttttagttaattgacaagctctaataagtgaagtaacttctccattctgggctgattttacatcaggtataggaatatatcctaggtgaaagtttgtaccagtaatatgaattattaggtaataacctccacctttatgatttacatgttattcatcaagaaatagtgttaaatcaggagtctcaatgaaagtattacctaagggatatacaaaatatattgctaatctacataaaacagatgtgaacacactcttagtatccagccatgtttcctgtcaaccacacagtaactttgacttcacttgggacttgttctaattttcaaattagttacttattaatcttaatgcttctagatattatgtgtgactattttagcagagagtgaagaaagacagcctaggccgactaaacaatgaggaaaatcacaacctgatgaaacaggaagcctctggatgtgagtggctccaggattgaataatttgacaactcatgtacccaggaagtttcttttctcaattttccacactgatgcatccagaaagtcagcttcaccccccaggtgactcccataatgcagtgacatggtgacaatattcccatggtcacatacgtattttatatattggctggaaaaggggcagagacagttctgcaattctcctctgaaggaccaggaacacctcaacagaccacctcccctgcccccatgactagaactgcaccacgtgcccacatggacactcatccctgatggggataagaagactccattgatgaggccgactattttagcatataaattagtaaagactgatataaaggtttcaacaactaattgaagtctgttcttctatgtccaccagagactatagatgctccagcgatatcttgtttttctttgctgcgtgactgtgtctcttctccttgttccatcctccagagaatctctttcagctcccacaggtgcattcctctgttacatgtaactgacaattgataaattagtggaagcccttacactaaaggaagagtctctgacctcatcttggtccatattcctagaaaggcattgtgcccgtaagtctgggtgtgaccttctgagtgttcctgaccctcctccagaggagatgctcatctgtgtgttcttgtccctttcactggggtagaaccaccctgtttcccccaggtgttccctcccacagctccagtgttccgcatcagtgtcatcacctcccagatctgctgccctgccctgcagactaaagctctgattccataagaaggagagttatgtctcaacagaacttcgtggcagtgacctctgttcccatctcaattcctgaggggttgcaccagtgcccctagggtactggttttggtggttcccctgcaaagtaatttttggttctgtagtggatataagggagtcgagtctgaatgcctttcaaaaatgggggctcttgttctctcccagacagacactttgggaaaggaagattttgtgactgccccttttttggggaaagggattcaagaggatagaaaagctcttcagtatgtggtcccttagaatttcaaactacaacaagcttaccatattcagtttcaagcaatcccatatatatttgtatttttatctttaacagactatatttcatatgccagactctgccttaggtaatctcatatgctggctttgttactctctacaagaacttgcttcttgttaaatttaagattttttttaacttcagttatcctaagcattcagaaatttgcaaaatttcatcttgactgtttatctgttattgttgatgtagttgtaagaaataaagaatatatatccctcatttatgtacattttcaagtcgagtagtagatttttagtactaccagagtaataaaataatttgaacattgttaagctgcttaacagaaaatcaaattatggtaaatttgttcaatggaatactacacaacatttataataaataattgtctgatacatgcaacaagaaggtaaaatatctaagtatttttgctgagtaaaataaaccagacaaatgagaagatttaccatataatttcatttatataaattctggaaaataaaaactgaacttacttaagtaatataacaacaaggtaaaatatctaagtattgatgttcaggaaaataaagcaaatgaataagaatatgtactatgttattccattttaataaactctgataaattaaattgaatctacagcaatataaagaagaacagaatttaccatttggggaaatggtagaagaagggaagaggaaaggaggaggaatatagaagaatgagagggaaattttgtgaattttctggttcaccttggtaactaggatggttacatcaggtttatcaattgtacactttaaatatgtgaagtttattatcagtaaactgaaatttataaaatttattaccagcaaacaaatgaaaacttgcacaagaaataagtgacataaagatagaaaaaatattaaatttcagaaacacctaataatttatcttcgtgaaccctagttctcaccatatttttaggtgaatgctagaatgcagcaaaattacacatgctctcaatacagaaagtgggtttcacaaaccacactaggcatgctcagctctgtcctggagttgggttagggagtaatatagggccagtggatgaggagcacaggcctagatactggggctcactaacctcaggtatgagctcttagatacatacaaagcccctccacgcatgggtttacttccccatctgtaaattgagaaaccattgacccctaaaaatatgatttacacaaatatgtaaaaatgtaagagagtgattagtgcaaagtgtttatcacagcacaatttcataacaagacagcaagttttccaaacagcatcattgtcattagattcctgcagggcatcattaccttatctgggccctgccctctgttcaggcatcccaccccagagcttgctatatagtaggtgacatgcaaatagggccctccctctcctgatgaaaaccagcccagtcctgaccctgcagctctgggagaggagccccagccttgggattcccaagtgttttcattcagtgatcaggactgaacacagaggactcaccatggagtttgggctgagctggattttccttgctgctattttaaaaggtgatttatggagaactagagagattaagtgtgagtggacgtgagtgagagaaacagtggatatgtgtggcagtttctgatcttagtgtctctgtgtttgcaggtgtccagtgtgaggtgcagctggtggagtctgggggaggcttggtaaagcctggggggtcccttagactctcctgtgcagcctctggattcactttcagtaacgcctggatgagctgggtccgccaggctccagggaaggggctggagtgggttggccgtattaaaagcaaaactgatggtgggacaacagactacgctgcacccgtgaaaggcagattcaccatctcaagagatgattcaaaaaacacgctgtatctgcaaatgaacagcctgaaaaccgaggacacagccgtgtattactgtaccacagacacagtgaggggaggtcagtgtgagcccggacacaaacctccctgcaggggcgcgcggggccaccagggggcgctcgtgacccactgagggcgggacaggtcccaggagcaggtgccgggagaggtttcctttctcctcagctggaaaagtcaggtttatcttcgcaggactctggagtcttctaggctgtgatattttgttacttatatttattatgaattttatcattaatacttaaattttagtaattattaacattctacatattattatatttttaagtatatactttcaagaaataaacattcctaattgcataataattattgtaacataattattgtaacatataattatatcctaaatgcataataattattgtaacaatcacattctcattttgtatttgaattttcatatttattttactaagattttaattttaatataaaatatttttctacaattgtctgttttccatttttgtgagataaaattagcatatacaaaaatgcacagattctccaggtacagttagagggtttcaggcaaatgtgcacatacttgtctacagcagctaagtgagggtgaggaacaggtgaggtccatctccccacaaagtgtcctcttagtgcttccagttagttctcacataaggatttttttttatttcaactttataatttagatacagagggttcatgtgtggatttgttacatgggattactgagtgatgctgaggtttggaatacagatttcttcaccccctccctccatggtctagcagtccacagtgtctgttgctcccatatttatgtctatgtgtgctcaatgctgaggtcccacttacaagaatatgtggtgttcagttttattttcctgaattaatttgtttaggattaagaactccagctccatttgttttgctgcaaaggacatgatttcattctttcttatggctgtgtagtattatatattttacatgtaacacattttatatatccactctaccattgatgtgcatctgggctgatctttgtctttgccactgtgaataacacagcaataaacatacacatgcatgtgtctctttggtagaattatttgtttaccttgtagtgtataccctgtaataggatagctggttcatataatatctccattttaagttttttgagaaatctccagtctgctttccaaagtgggtggactaatttatattcccattaacagtgtgtaagtgctttcttttcaccacagccccatcagtatccattggtttttgactttttagtgataaaaatttgagtggtgtgaggctgcacacctacaaccatatgatctttgataaggctgacaaaaaaacaagaaatgagaaaggaattccctgttccataaatggtgctgggacaactagctggccacacgacaaagattgaaactggatgtctgctttcaacatatataaaaattaactcaaaattgataaaagatttaaatgtaagacatcaaactataacaatccttgaagacaacgtgaaaatactcttctcgacaccagctttgacaaatactttttggctaagtatgcaaaagcaattgcaacaaaaacaaaaatagataaggagagactaatttgctaaagagttactacacagcaaaccaaccagctaatcaaccaaacaaacaaataaacaaacaaaactatcagcatagtaagcagacaacctacagaatgtgggaagttattcacaaatattgcatccaacaatgccctaatatccagaattgtattagctggttttcatgctgctaataaagacatacccgatattaggaaatttatcaaaaaagaagaagaagaggtttgatccacagttccacaaggctggagaggcctcacagtcatggtggaatgtgaaaggcacgtctcatatggcagcagacaagaaaagagaacttgtgcaggaaaatccccctttataaaactatcagattttatgagacattcactctcaagagaatagcatgggaaagacccacccccatgatttaattatctcacagggggtttattccacaacattaggaaattactgaagctccaattaagatgagaattgggtggggacacagtcaaatcatatcattctgcccctggctcctcctaaatctcatgtactcacatttcaaaatggatcctgccttcccaacagtcccaaattcttatttcagcattaactgaaatgtccgcattccaaggcctcatctgagacaaagcaagtcccttctgcctatgagcctgtaaaatcaaaagtaagttaattacttcctagacacaatgggagtacaggtattgggtaaatagagcaattccaaatgggagaagttggccaaaacacagaggctaaaggccccgtacaagtccaaaatccagtgggacagttaaatcttaaagctcaaaaaagatctattttgactccatgtctcacatccaggtcatgctgatgtaagtgttgggttcccatggtcttgggcagctatgtgcctctggctttgcagggtacagtctttcacccagctgttttcaccggcttgctctgagtgtccatggcttttctaggtgcatggtgcaagctgttggtggatctactattctggggtctgaataactgcggccttctaatcatagcttcactaggcaatgcaccagtggggactctgtgtgaaagcacccaccccacattttctttcctcgctgcccctaacagaggttcccatgtgggcccctccctgcagccaccttctgcctggacatccaggcatttacatacatcctccgaaatctgggcagaggttattaaacctcaattcttgacttctgtgcacttgcaggctcaacacaaaatggaagatgctaaggctcggggctttcaccccctgaagccacagcctgagttatatgtaccttggccccttttaatcatggctggagcagctctgatgcaaggaagcaagtccctagactgcacacagcagagggaccctgagcccagcccatgaaacaattttttcctcctaggtctctggcttatgatgggagaaccttccacaaaggtctctgacatgccctggaacattttctgcattgtcttggtgaccaacatttgggtcctcgttacttatgtaaatttacgcagctggtttgaatttatcctaaccaaatgggattttattttctattgcattgtcgggctgcaaattttctgaacttttatgttctacctcctttttaaaactgagtgtgtttaacagcacccaagtcacaccttgaatactttgttgcttagaattttttactgccagatacctggtatcatctctctcaagctcaaagttccacaaatctctaaggcagaggcaaaatgccaccagtctctttgctaaagcctaactagagtcacctttgctccagttcccaacaagttccttgtctccatctgaggccacctcagcctggattttattgttgacatcattatcggcattttggccaaagccattcaacaaatctctagagagtttcaaactttcacacattttttgtgtcttcctcttagccctccaaactgtttcatcctcagcgtgttttccaattccaaatttgcttttatgcttttgggtatcttatcagaagcacttcactcaactgataccaatttaccgtattagttgcttttcatgctgctgataaagacatacctgagactgggcatttacaagagaaagaggttgaatagactcacacttccacgttgctggggaggcctcgaaatcatggcagaacatgaaaggcacatatcacatggtggcatacaagagaagagaggacatgcagggaaactcccctttataaaatcatcagcaagacaggagaactcatgcagggaaactcccctttatcaaatcatcagatctcatgagactaattcactatcatgagaatagcatgggaaagacccccccccaccatgattcaattatctcccacggggtccctcccacaacacatggtaattatgggagcagcaattcatgataagatttgtgtggggacacaatcaaaccatatcaagaatgtataggaaacttaaacaaatcaagaatcaaaagacaaataaccccattaataaatgggcaaataacaagaacagacacttctgaaaagaagacttacaggtggccagcaatattttaaaagattctcatcatcactaaccatcagaaaaatgcaaatagaaaaatgttctaatttttgtcattatagattgattttttctgttttgaacttatttttgctattttttaggtttatttatgtaatttcatgtctcaaggttttgtcattgtatatatacatatgtatgtactaatacacatatgaatatttcatatctgaatcaatccataacatcagtaaatgacagtttattaagtaaataaatcagtttattatgtgaaataatgacgatatgtatatttgttttcctgttgatgaaatttaaatttgtttccaacataaatattataagcaaactgttataactatttttgtgcaagtttttctgtttatattctcacatattgataaaatatgtagaaatataagtatgcttttttattataagacttacattttcagctttatggagctaaagttgacaaataaaattgtatgtatttaaggtacaccacttgacgtattgatatacatgggaaaatgctggatggtagataagtaaacaatgctaaacagcactaattatcagggagatgcaaattaaaactgcagtgatatttcttaaaccagtcagaacagctactattaaagagccaaaaataacaggtattggtgaggattgaaggcaaaaggaacgcttggacacttgtggtgaggatgtagattagcacagcctcgatggaaaacagtatggagatttttcaaagaagtaaaagtagaactactttgattcgataaccacaaataactacctaaaggaaaaataaatcattatatcagaatgataagcagacttttgttttcctgcagaactattcataatagcacagtcatcaaacttaggaattaacctatgcctaacaacagatagttttataaagaaaatgttacatatatatacatttaaatactatccagccatattaagggatgcaatcatatcttttgcagctacatggatggaattcatcattattttaagtataataattgagaaacagaacatcatacaccacatgttctcacttataaatgagagtgaactcatatgtgcacaaggacatagagaaaggaatgatggacattggagactcagaaagatgggagagcaaaaggtgggagaatggtgagaaattacttaatgggtatgatgtacattatttggatcatggatatgttaaagccaagactactatgcaatatatatatgtaacaaaattgcagtcactccccataaatttatacatataaaataaaaacaaatacaattaaaatgattaacagttgataaacaatactgaaaattaaaatttgtgatcaataaatgaaaataatattagttgaacttcaaattttaaaacattttctactcaagtgactatcaagaaaattaaggacaagctgcaaaggaaaaaatatttgcaagtcatatatctaccaatgtaattataacaagaaccggcaaacctcaaagatgtacagatgacacatcagcataggaatgtgattttccaccagagaaatgcaaatcaagaccaaaaggagacactactatagactttctagaaagacaaaaaataaaaaagaaatactgacaatatcagagttggtgaggaagtcagtcaccctagagactaatatattgctagtgggaatgcaaaatgaaaccgtttctgggaaaatcatttacagtttcccataaaattaaacatgtccttaatccatgacctagaactctcactcctaagtatgtcctacaaaggattaaaatcatatgttcacacacgtattcagatgtttaacattgtgtgtgtgtgtgtgtgtgtgtgtgtggtgtgtgtgtgtgtgttagaaactaaaaacaacatggacgtctttgaaaatttgacacaaaccattacaggtgaactccagactttcttctgagtgacagaaggcctgcctgaaagatccccagagacacagtcgtggatttcactgtcaccctcgcatgtcactggcttgggctgggctctctctggctcttccctgaccaggaccagatgttgagctccactacctgcagttggaagtttatattttcaacaatgcactgaggtctaagttgctctgcagatggaaccaaacaaacatgggcgcctttgaacaaacagtgcctgacatttgtactgaccccaggagaactcttcccagctctcattcttcttggttctctcctgcaggccagcagccctgaagtttagcctggatctcccatgcatccacccatctccttccaagtgcattttaccacagcctccactgtttttgaagcactcttgggctttgtaattctccacactctgttgtaaaggaagtcaggtccttcaagaccagattcgggactctattttatgaccaaatttcagcctcacccctgctcctgagagagagctcctagataagattctgcaggtggagattaggagtgtttttcttcttcaatgtagttgctgagcgctcagtgcagggttggggagaaactttccactttgtcagcatgcagctcctgctggggtagaccttcttccatagaagcagggttgggaaccagggggccaatgtcctcagtgctgctgcacccagggcagagccttcatccatcagtggggctgtggaagaagtgagtctctggttctcagtagctcttgtccagaactgagcctctgcagcatgttctgtcggccccagtgtcctggcccctaaggagcagcatcctaaaatgggagctagcatatttgagaataacaacacctacacattcagaagctctttggctttctttccagctaatataatttccttttttttgtgtagcaacctgtacacacgcatattgatgcatacagacctatgacacttttttctcgataagtaaaaaattattgatcactgtgatcttttctccaagttcaccatttccctgaaggtgagcacaggtccttctgcatgtgttcaaacaaaaggcccagagactacctggtaagtgaggtgctcacctggttctggatgtttggtctgtctcctcccctctgttgccccacacaaggtcagcccactctttccaggtccgaagaagagagcacaggtttgtcctgattatatgactcacccagcttctgatgactctcctgttgccagcgtccatggcctcagtgaaggtctcctgcaaagctctggatacaccttcgccagctacgacattcactgtgtgtgacaggcccctggataagggtttgaatggatggtagggagctactctggcaatggtaacacaggctatgcacagaagtttcagggcagagtcaccatgaccagggacacgtccacgagcacagcctacatggagctgagcagtcagagatctgaggacatagatgtgtactactgtgcgagacacacagtgtgaaaacccacatcctgagagagtcagaaatcctgagggaggtggcagcagtgctaggcttgagagatgacagggattttatttgctttaaaggctttttttagaaagcgaggttaattcattacagaaaaaaggaaaatagaaatgtgtatggactctaattatgtgggaaattttccatacaacttttgttctctaagcaaaattcagggagtggaaaacaaatcaaattaataaacctgataaaagaattcctctgaaaatttagtgtgagcataagtttttgaatgggtgttgtaaatattttggaacacagctgctagatcacattttaactctacacttatctccattatataaaatatcaaaatgttttaatgttttccattttgtgcaattataattttgtgttataatcacattttaacactttaactctacacttatctccattatataaaatatcaaaatgttttaatgttttccatttcgtgcaattataattttgtgttcatgccagcaatgcatgatagatcttgttcttccgcatcctcattgccatttggcactaagagtattgtgtattttaatattctaatagattagtagtgatagctcattgctgtttaaatgcacatatttctaattaaaattttgtatttaattattttatataattgtgatgaagtgtctcgtatggtatttggattattttttattgcattgtttctttttgatcagttgtaagtttccttatatacccattatataagtcactcacaaagttaacaaaaaattgattaacaaatatgtgttttacaagtgtattctccaaattgttgttgtcgttttactcccatatcagtgtctgtgggagaaaaatatttatatacatatatatgtgtgtgtgcatatatatatatatatatatatagtgtgtgtgtgtgtaaacttagataaaataattatttcataaatcatacttttggcatcatatctaaaaactaattatgaattccactaacaggatttttctcttgtctccaatctcaggccacaatcacagcataagcatttaaatttctcctatttgatgagaagattattaacttaagatgtttagaattcttctgaatggaaggtgccttttttctaattttctgtattcaataatctgttaatatcagtattggctcatgaatgtttattttttactatggagaagatctagtgctacattatttattttatcgctcaaatcaccacagcttttttttaggttctgtgagctcatttagtttggattctgtatttttacagcatgccccatccttttgtttttgatcacttccctatttcctggtattacaagaaatactaagctcattatctctattatcttttccacacatagaatcagttatttctccaaggattactggtccctgatattaaagaattatattaaaacacaaaattatgatgttggatgtgtgtgttgttaatgtactgtcagtgtttctagaatctctaagctaacaggcctagaaaatgtgtatgtgtatattaacccatgttaactgacccatctaatctatttatgtatccaatcttctgtatgtttattgcatcaaactttagaacactggtatctacaatctactatgatgatacatgaatgtttcaagccttccttccttgcctgtccataccacctactgcaaagtgaggaacccctcccatcatttgccgttcattcaatttgttgtacaattttagaatatatgcgtcgtggtattagaattgttaacttgtacccctgttggaagtatgtttattgactagaataaagtgtttaagtgcagtttctttatactttagacttacagaacaccctgagttctaagttatataggtgagaaactttatgtgccaccttcttcagtgaggttatttgaaatatgttgtatacattttatttgacattctgtaaaagacaaaactgtagatgtcataaatatatgaggattttctagaaatttagagagagggtatgcattaggagaaacaggtactgtttgcaaacagtgaaattttttatgatctgcagtagtgaacacatgacacaatttgttaattctcacaattttatgatgtaaactgtgaatctaaatatatacaacttacaaaattatgtagcacatcatgaacatgcaaagtgtacaaaaataaaatatcaaatacatttacaccgcgtgggcagggaattgcatgagatgcaggcaacaaagaatgaagtaaccttccccatttgcacataagatgtttccattcacaagagacctttcttttatcaggttcatgtgcaaccaagtttccctgctgacaagcatttaagccagatgattcgcaacttcctttgactgagaaagatttccctcaaacttcagctcagtgcaggcacacaccatctctgaatgggcatttaccatcagacaatgcccacacctgtccccacatggacctttccctcagacaaacaaacacatcctcaggttgactcttccctcagacaagcacccctgtcttcatgtgaactcttccctcagataagcacacatgtccccacattgactttttcctcagacaagcacatatagctgacaacgaacagttatgtggcaaaatgagctcaggatagtggtaattatggactccagctctgatagtttgtagaaattgtcatttttaaaattctgactgaagactttcctttattgtagaagacagtcctttacagctctaattgcacagcctacagacaggagtccatttcctctgggcaaggtttatttttatttgtttactgtacttatttgttgataaatattgatactacaaagatagcctatagggtccacatacgagaaaaaaagagtaatgggcagatcaaccctgcaaatccagtcccaggagtctttgaccctgccctccctggaatccagagacagagatgggaagaggcctgctgagcagtgcactcatgtccccagggagaaagacatggaaatgaggcccctcctctgcaaatgaaaagtagctcatcccctgttcctgtagatcctggtgaggagccatcccacatctgtgcccttcctcagtgtccacaccatggggtctgtgcagatctgggctgctcttgtcatcactctcaatgttcaggttccccgtggatcaggccctgctgtggctgttgcctctgtgttttcagaagtcccctgtgaagttaactaatggagttagacagagaaatactacagaccaggaattctgccttttctgcaaagcctctggattcactttcactgaaaacagcataagcttgatccagcaggcttcatgacaggggtgggtgtgggtaataacaataattcaaatagaagttctcagtgggactctccttgagtaaaaagatgattaacaatcctcaaatacactcagttcaggagattctcttttaagatgattaacctgagagctcaggaaaagtccgtgtattactttgagggacacagtgaggggacatctgtgtgaactcagacaccaacctccctgcagggagacaggaggggactgcctggtagatgcttctcagaaccaccagggggtgctcaggacatcagggggcactcagaaccatcaggggatgctcaggacaccagagggcactcaggacactggggggggggtgtcactcagaaccaccagggggcactcaggacactggggggggggggtcactcagaaccaccagggggcgctcaggacactgcggggggggggggggggtcactcaaaaccaccagggggcgctcaggacactatgagggggggtggtcactcaaaaccaccagggggcgctccggacacggtggtgaggggtagctcaggatagcaggggtgctcagaaccaccagggggcgctcaggacactggggggggggggtcactcagaaccaccaggggacactcaggacactggtggcggggggggggggggtggtcactcagaaccaccagggggcactcgagacaccagggagccctcaggacactagggggagctcagaaacaccaaagggcaatcaagacaccagggggatctcagaaccaccaggaggtgctcaggacaccaggggtctctgaaccactagggggagattaggaccccagggggctcagaaccactagggggttttcaggagaccagggggcgctcaggacaccagggggcgatagggacaccaggtggttcagaaccactagagtgtgctgagaaccaccaggggtgctcagaaccccagggggctgctaaggacaatagggagtgctgagaaccaccagtgggcgctcaggacaccagggggatctcagaatcaccaggctgtgctcaggacaccggggggtgctcaggacctccaggagcgcacacgacacaaaggatagctcaggacctacagggggcgatcagaacgccagggtgcgttgaggacaacaaggggctcacaggacacaacgacgtgcttagtaaaccgggggacactcacaaccaccgggggtactcaggacaccagggggtgcccaggaaaccagggagcactgaggacaccactgctcccttaggaggcagctccacatcaggtccctgagtgggagcagggaggagggttcctcttgtatcttgccactaacatgttgggagtttttctgcttcctttgtggtttcaattattggctgattcttcggtacaaagcagagcaagtataaagctctgctttcttggattatgtaatgtttttggctttggatgctaccagaattacattgtactttgagaggattcattcatggtgtgtgcaatagtgaatgaaacctgtaattttaggggtggctttgaaagctatgttaggtgtggctgagggcagtttacaggaaatggtcatcactatagaaggctactcatttctttgcacatttgcgtaagcaattgtagtttatgaattaaaaactgcctgttttcttggtcctttttcttaaatggtcccactctaagggcagtaatgtaatcaagctgtgtttcaaagatctgcaatcaagttaagtctgtttaatgaaatgctttgtaaagaaaatgtacatctattttttagagtcacctttacattttacattgctttacaaatattaatttggtaaatttagtctcataattatcttcagtaattaaaaatcttaaagtcatgtcatgttaaattaagtaatcctaggcttctcactgtgaattagggttactaaaaattagaatagtaagagagtataatcaatttatggtgaagtttattaagaaagatgaagatatgttttttgcttaaaaatattttgttttccagtttacagggcctttctactggttttaagatgacaaccactgtttacatctgacccttttttgttgaacatctgttgagtttctattgatattccacagctagagttttaaagtaaaagctctagtatctttgtattagtgtgaatgtgtgcttgtatgtattatgtacatatatatatattttttgttatgtgttatggctacaaggtacaaaattgactttaaaataaataactattttaaattaagtcaatgagccctaatgcatctgaagtacatgtaacttaaataaatatgtaataaataagctggcttcaaaattattggtaaaataaaattggaaatattttaacaattattagaatacctcatagtttatatcaattgatcaagtgattttatatttaaaatcacagctagatattatatggtgtgaaacatttctatgaagattataaaattattaacctagttaaaaccagaatgatctttgtaatttgacaaataagatgtttaatactgttgttttaataaaaaacaggtaaatagttattggaaatacaatcatttatttaataagaattttacttaggtaaacacctgaaattcatgggttataatatgggtaacagggaaaaaactttaaaggatgagtattactgttttcataaatgatctaggtaagctatttaaaaaataaattaggttaatgtaacaaaataaaccttttaaataaacttgttctacaatttaaaaatctaaagtttaattaaataatagatattaactaaatgtttaggtcattactaattgttttaaaaaatgtatactataagaaaatatttttgtaaaaaatttgttcttacagaaagattttatttaattcagaggttacttataaaacatcctaaacataaccagtaaataagagagatgccactgcactccagcctgggtgacagagcaagattctgtctcaaaaaaaaaaaaagaaaagaaatttttagacatagaggagtacttttggtatgaaaggttaaaataaaaaaaaataattttatatgagaaagaatcttgtaactttttatcctaaaataaaaatgactttatttaagaaacagtgatgtttagaataaaactatatgctcaagtatgccataagcgttttgtgtaagtcaaactaaggtttgtaaaaagttaattaattaaaataacttcatattatgaagttgactataattaaaaaggaagtatttataatagtctttatagatttgtagagatctggctttcatataaaaatatataaatatactaaagattggttaggaatgaaaaattgtgcttaaagtattgatttactcaataaaattataagatattttaattttttaacccaaaagtttaactcttactgcatcttgccagttttattttattctcttttgagaaggcttgagaggatctcaaatttttcatgagctcctctaacattttttttcttacagcagttagcctctaacgatgttaacttctaactgttgttagcttctaactgctattattgcctgatgctaaaaatcttttatattaaagttcttaataaaatgttttatttcaatatagtattctgcactcttgggtttttttaaatgtctatatttgtctatggaaccaaaatcttcacttgtaatccaagacacattcttcctatgtctaattaatcaaatactttgtttcattagagttgacttgcaggttatctgcatggatttccccacagggaaacacagtcacactgctgaaggtgttttttcccatttggtaactggcataaaacaaattttatattttcttgaaatacttcctctgtagctgtttttaagtttttcaactacttaggaatactgagattttgagaaaatataaattattgttattacgttaatgtaactatctggcataacttttaaaggacttgtcctgctacattactgatctttgattcctaggtctaaaaaggatacacaacactttgggaggcttcagagggtggatctcctgagggcaggagttagagacgaacctggccaaaaaggcacaatctcattttaataaaaaatacaaaaattagctgggcgtggtggcgggcgcaggtaatcccaactacttgggagcctgaggcagggagaattgcttgaacctgggaggcagaggttacagtaagccgagattacaccactgcactccagcctgggtgagactctgtctcaggaaaaacaaataaatacaataaaaataaaaaagacaccgagtcttgctaaattttaaactctgacagcaattgaagccccatctagagatgtggaagaaaatgacaataaaaattaatcacacacttaagacacaaggccggaaaattgaatctactcaaccactccaggcccagggactgttacagaagaagcggtttgtaagattgtaaaagctaattttgaaagatgaaattacttgagagtttctttatacagtaaacattaatattaaaggcacactaatgccaggctagtagctgggccatgtgtcagattgacaagggtttcttgaagaattaatccactttttaatttgaaaaacttataaaagtttataagagatcatttgaaattaaattttatggtaaaagtaattataatgtaatagatttatttttcagaattgagagacagttttaacttctctcatgctgttcttataaggggctattgtttagaaaattaattcttctctttgaaaaataaaagtttttgctttctttcaaaatcactgagttctcactgggctaaataaataacttacattacagcaatctgtaatcctattttgtaatatcaagcattgtaaacttttgatatttgacaaacttcacaaaataaaattctaaattcagtcatttgacctcattattcttttatgatattaggtccccaaagccaaaattaaacatattcagcttatttggtataattaaaatatgcaggaagcaatgtcaaatttgcaaaagtgtttaactttggactatatttaaataaatgtggactatataattggactatatttatataaattaaagagtatattttccaaaattgtatgagattcaagtgatttgatatgtcttagtatattttatcagtagtatttatgattattatgtaaaatttctgtttattgccagaaataagcaaatcttctcctcaattctgtctttaaccatggctattctaaaacttcagtcatccacagttggtgttttactttgattctttatcaggtggcttatagtaatctatagaattttgaggagtactcaaatatacgattgtgacaattttataaattgtgccattggtatagagattaaaacttccatgactctcattgatacctgattcatttatgatgattgttaatctaatattaagcaggacaggacttaattgcatgaactgaattgacagaagactgaaattgtttttatggcttattctttaatgcatttgctaattacttatgttctgttttttcagaatcaggaaaagtttgtcttttaagctcttcacagttgttaacaattgagtatggtatactttactgataaaaaaataaaaacataatatcttcttatttacataatttctccaaaatttggaaactgtgagtattcttatatcaaaatagttatttgcataggttcaataaaaacctgctttcttccataacagggcacaattggagacaatggtcattttactaaggctttaacttgaattatatattttcagatttactttataaaatgaatctaacctggagagctgataaagccccttgggaaaactggcatgcacatttttttttttttacagggccccgaactgtagtaagtaaacaatttaatttctgacagacccaggactcccaggttttcttggaaacttgaaaaaagagaaagtaacccaattcacatagctatctggtggcacagataaaatattggctgggcttgaagattttaaagattctaccctttgattccttataaaaaatttccagcaaagtcaatttatggaataaaattggcctatgtacaaacaaaaaatagaaaacaaaaagagagctaatatgttaaagggttactttggctggcatcttatacaaaaaaaccagggccaagtctcataagcctaaaactgattttacaaatagattagtcctactatgattttgtgtctaataaaattggggaattatagagagaaatattatttcaaaataaactatagtgcatcagttaatagattttaaccttgtccacttgcttttcaatttatattattttctacaatttggactgaattttaaagcgtatctttgcacgagtctccaaaataatgttttcagttatttccctttttaaatatttttcctggcttgaaatcagcagaagttaaactgtgctttcttacagctagacaatgtaaattctaaaagaaaacaaaatcaatgatatggtttggctccgtgtccctacccaaatctcaccttgtattgtaataattcacacattgcaagggtggaatgaggtggagataattgaatcataggggctgttttcttcatgcttttctcctgttagtgagtgagttctcacaagatttgataattttatgaggggcttccctcttcacttaacacttctctctcctgcagtcatgtgaaatagcatgtgtttgctacccctttcatcatgattgtaagttttttgtggcctccccagccatgcagaactgtgagtcaattaaacctatttttctttaaaaattacccagcctcgtgtatgtccttatagcaacctgaaaatggactgatacaagcaacttaactacatacgaagtctccttttgtacctgcctattgtgaagagaaaataaatcttgagaccccaaaatcactaagctaaagagaagagtccagctggtgtaataggagatagaaagaaattatttaggtagatagttaggatgaaagagtctctggcaaaacttttcttctcacaagaattagctcagaaataacttcttttctaatcagacacagttcaaagagatcacttctaacaaagagcagcctgaaagatcgggctgtaaaacatagataaacaactctggcagagagggtatttctgtgtgtaatcaccaaagttcacatacataggatgggtcccaataaaaacattgggtcttaatgagcacattcctttccttttctggggtcacactgagataggaaagctgttagcttgcacggggtttgggatgcctccagctgcaaggaggtaccagggacctggcatggaaactcctcccccctttttcagcacatgcatggtggaaggagataaggaacgtggagcagaccaagctaagtccccacctgcataataaaagcatgagatggggctgccagagacttcgctctctgcagatggcacacctggtcctgcttttgcaccttatgttgataagaagccatctccccacgagcacatttataaaaatccttacgttgataagatactgtctccccacgagcacatttataaaaatccttacattttactgcggcacagcaacccatctgggaccctttctgtgacagagagattttttttccttttacacattaaatttctgctctaacctcactctttgtgtgtctgtgtccttgattttcatagccacgacacaaagaacctttggtgatattccagataacaaaggtgctttactggagagggctttgggcaacctgcctcccattctattcaaagtgattcctctgaggcccacacgagacagatacatatctgattgcttcctcttcagtatcatttatgaaaaaatgaagattcactaagtctgactaaattgtggattcagtggtaggctgataaaggacttaaaataatgcaacctactgtgtcttatctacttctaaactgcaaaaccccctttcaatttgtcctgtcttgaaggaaaaaaaatgtacattttacatatattgattgatgtctcatgtctctctaaaatgtataaaatcaagctgtacttcaatcgccttgggcacatgtctcaggacttcctgaggctggtcatgggtgggttcttaactttggcaaaataaatgtattagtctgttctcctgctactaataaaaacataaccaagcctgggtaatttataaagcaatgaggtttaatggacttatagttccacatggctgggaatgcttcaaaatcatgtcaggaaagcaagggacatcttacatggtggcagacaagagagagcttgcacaggggaactccccttgataaaaccatcagatctaatgggacttattcactatcatgagaacagcatgggaaagtgctgacttactgcaggagaactacataattttatattttcctatatgcttctttttcattacacatgtaaattttcataccatccaaatttccccttacccagcttttcctctttatatattgaaagccctaaaaattgtctttggggaatggcactaaccacacacagtttctgtgattacttttatttttcttccaggcatgtcctggaaagacataatttcctttgggaaaattaattttaatttgattaagatctgtctcagaaaccttcggtttacactaggaaagatcccaaattaggagccaattactgtaaaaatcagccataccactctgtgagtgtgtgtgtgtgtggcggggggtgtatatgtgtgtgtacatgcatgttttcatttctgtgggctttaagccatgtagttctctctgcgaagatactatttggcatgacctttgaatagagaattgtaagagaaataagaggctcctatgaattatccgaaagtttctggactcaccatgtatcttgactgtgtcattgcatctgacagtcccagggaagtgactctctggtggtttcatgaatctgtgcttgggctctctctgcagtttactgggtatagtaatgacaaatcactgtttcaagagacaatttcgaaagcattagatgctgctgagagaggattatgaaccaggggacagccccttcattctgggggagcgacattgggagaatatgctctgtgagcccaaacagcttcctcccctgcagggtgagggcagagctgcaggacaggcccagaacccactcaacacagatgtcagccctggagctgctgcagaggagtctgaggagaaaattttaccagcacctgaattacacttatttcaaacaaaaatgcatgtcctgtgagtgtttgtttccctattggaggagttctgtactcatgaagttctggacatgccagcggacaaatatcagtaaacaaacatcagaacttgaacctcagcttcccactgttgcattctccatgtgtcatctctattatttctcatgctagatcaggtatttagctatgaaatattccagctaattaacgtgtaaatagcttgaagtctactgagttaaatacatatattttctcttgtttttgccaggtgttccctcccacacctccaatagtctccactattatcatcatcttctagatcttctgcgatgccctggagattaaggatttgattccatgacagagaggaggtgcatttcgatggaactttggtgaaaaccttggtctttatcccatttcctctggggctccaccagtgcctctggaatcatggtttcagtggcttgcccctgcatggtaggtcattcctttattctgtagtgctgatgagggaggtgggtctgaacgcatttcagtagtatgggctctccttctgtctcagacactttgggaaaggaaaatttttctgagcgtcctcattctagaacaaagggattcaattgtataggaatgctgaaaatagaaaaccttcagccaaattaaggttaataagattaattgagcaatggatgattcatgaattgggcagcccccagaatcacagcagattcaaagagacttcagtgcagtcacggggtggaagaagatttatagattagaaaaatgatgtacagaaatcagaagtgaggtacagaaacagctggattggttacaggttgcttttgtcttatttaaacaaggtgtgcaccctcaagagtgtacgagtggttgaggtatggctgctggaattggccaagactccgctgttgttacaggcgcatgctccgaagttggcttttcaatctcgtccacctattcaggtaggttacagtttgtccacaaggactcaaacacagaagtacggagtccttttcaggccatatttaattcactttatcagtgcccttcagtatgtggttcctgagaatttcacatgacaacacgtttaccacactggaatttaagcaatccaacacgtttgtagctttgtcttgtaatgggctatatttcatgtggcagcctcggcctcagtttagctaacactatggcttcatttctctctacaagaactcatttcttccaagatttccatgttcctgaaaggaaaataaacctttgggacccccatatcactaagccaaagggaagtcaagctgaaaattgtttggggcaaacccacctccattctttccctaaaatgagagctactaaggtttttaaaagctacagacctccttcaaaatttgaccacaagtaaaatccttgtggacccaggacagagagagtcatttctctgctcatgtaagtcaaacgcatacctgattgctccctgtgctctactgtttcactaaatcagactaaggcctacgtgactattcctgtaaattgtgcattcagttaaaggctaatcagaaactcaaataatgcaaccatttctctcaaacctacctatgatctagaagccctctccccacttcaagttgtcctgcctttctgaactaaatcaatgtacatctgatatatatatattgattaatgtctcatgtctccctaaattgtataaaaccaagctgtgcccacaagcttgggcacatgtcgtcagcactccctgaggctgtgtcacaggcatgtccttaatcttggaaattgaacttcctaaatctattgagattagtctcagatactctttggtttacaggtttgtttttatttcataacttcaattatttgacatgctaaagaaaatttgccaaatagcgcattctcttgtttatgtgttattgttgttgcaaaaataatatattttatatataatttatcatctatgtacattaccaaattgagtagcagatttattagtaagacccaaagtaatgaaaagttcagataccaattagcaacttagaaaaacaaattatgctacatttgtttgctgaaatgctacctattatttataaaaaataaacaatacaacataaaaggtttaattctcagtatttctattgagaaaaataagccaaatagatgagtacatactatattatttcattcttataaattctagagaataaaaactagtctaaagaaatatgaaaacatcagtacttttataaagaaatggtagaagaaaaggagaaaaacaaaaatatatctataaaagagcaagaggaattctgaggtgagttgacttgtcaccttcttgaaaatagagactttctttatcaaaatttactattgtacaggttaaatatgtgaattttatcatctgtcaattaaaactcataaaatttattacaagtaaacaagtgaaattttagacaaaaaagggatgataagaaggaacaaataaatacattaaatgtcagatacaccaaaaatgtatctgcctgacgcctagttgtctctgtatttttaggtaaatgcagcaaaatcacacaggttgtcgtggcaggaagtggattctgcaaaccacactaggccgtttatctctgtcctgtagttggttcagagcaactgaggccagctgtgaggcgcataggcccaggtactaggactcactcatgccagatataagccctgagacacgtacatagcccctccatgtgtgggttcacttttacatctgtacatgaagaaaccactgactcctaaataacatcatctatacacataggtaaaaaaattaaaaatatgatagttgttaaatgtttatcgcagaacaatttcaaaataaggcagcattttcccaaatacaatcattgtcatcaaaatcccccaggacgctctcatctactctgcgccctgccttcacctcagatgtcccaccccagagcttgctatatagtaacagacatgcaaatagttgactccctctcctgatgaaaaccagcccagccctgaccctgcagctctgggagtggagccccagccttgggattcccaagtgtttgtattcagtgatcaggactgaacacacaggactcaccatggagttggggctgagctgggttttccttgttgctatattagaaggtgattcatggagaactagagatattgagtgtgaatgggcatgaatgagagaaacagtgggtatgtgtggcaatttctgacttttgtgtctctgtgtttgcaggtgtccagtgtgaggtgcagctggtggagtctgggggaggcttggtacagcctggggggtccctgagactctcctgtgcagcctctggattcaccttcagtagctacgacatgcactgggtccgccaagctacaggaaaaggtctggagtgggtctcagctattggtactgctggtgacacatactatccaggctccgtgaagggccgattcaccatctccagagaaaatgccaagaactccttgtatcttcaaatgaacagcctgagagccggggacacggctgtgtattactgtgcaagagacacagtgaggggaagtcagtatgagcccagacacaaacctccctgcagaatgcctgggggaaatcagctgcagggggcgcacaggacccactgatcagagtcatccccagaggcaggtgcagatggaggctggtttcctgtcaggatgtgggacttcatctttttagagtttctctagggaacctctctaagttcagaattctgtgcttaccaatgccatccctacatatttttaaaatgattattttaatatgaaaacctattctcttatgcacgaaacacagactgatgcttacagagatgaaaagccctcaaccattgtcaccaggatcagagtattgaggaaactcaggggtacctggtgggtcttctccactcagactcaggacagaaacctcagtgagattccctgactaggacggtctttaggaattgtgatcgcagccaatagagagtctgggcaaggatcagtgtcatgtagaacttcacaggtttcacttctgacccttctcctgacactaaagtatacaacttagtatcagcactgatctggggccccttttgctcttagcccattctatttctttttatttgttgttgttgttcttgcttttccttgtagtgttcctgctccctgtaaagtggggatgtggctcttgctgccaaagctccaggtctcaagcccattccctgcagctcaggtggggctcaggctgtggctcctgcagccacgtggaagaggctgatgggactttcctctctcccattgctcagcaccctccagtgtgtcacgtggagactcacctgcgaatggaagtggccaacagtagtgaaggggatgagcttgtgtggacaaaatgggatgtggatgtgaaatttatcctgtgctgtgcaaagtagcacagagtgagtcaccttcctcaccagtagtgttagaaagagggtgtgaaagttgtcagaatcaaaatagatccacttgtgttaaaaccctgacaaatggaactaggaatgaccatgaaggaggtttcccatgcacatactcctgataacaagatcgaccataaatggattctgcttaaccacaacctttgatagaagccaccatgaccttataaaaatcacttctacaaggacatcttcccagcaaatcacggtttaaccctatactgatgccaaccttggtattgactctacaagcaaggaaaatcctctcaaaacaatttatgcaacccacctcattttcactcataaacctatggattgacatcctggagccactgctgcatttgttgttactggtaattagccccttttacaatatttgtgactgtttttctccgatgtctcttggaaaataaataatttacaagctgatggcagtaaagaaactatttaggacatttttaacatcctgttgaatatttctgcatagcacatcggtcccctaaaatacttcgctgtattggcatgtgatgaatcagagtataatgctgaaggtaaaatgggaaatacatgggcttttgatgaatcaagtcatagggtgagaatgtctgtgtccttgaggaaggagaccttgggctgtaagttctagtgggagtacctttggcaaagggatttcatgagtttctgaacgttatgctacttttaatttaagaatgcaacttatcatttatttttacttaaatctttccagaagatatttggcagtaaggacagggtagcattcgtgtgatactgatgacttagagagttattttgtaatttctcctgtaaggtatgcacattgctcacttgatacagaagttcaaatgtcacaggcgggaaaataggaataaagcaaattttattaaatgtcacgactgtagtttttggcaaggaagtgcttcatgtcaacctgaaaatagacagacaacaataaaacatattcaaatccaaagggagtcagacctatgtccctctctcttataagtacaaggctttgccacatccaaaatatcctttaggctccagggtataaaatgcttttggactgtgaagctaacagctctcccctcagacagggataaggcatctggggaatgcagagttgtgttcatgaagaagatggcattactgtgtcttctcctgtgcctggtgatggctcccccagggtgagtgactcggatgtcagatgtgggtctatggggtgagtgtaggtacatgtgactgacggggactgattccccatgtattcacatgccctgtcccaggagcagctgcaggagtcagccctggacctgaagagcacacacttaccctctgcttcacctacaccatttctggccactccatcacaaccagtccttactactggacctggatctgccagctctcagggaggggctgcaatggatacaatgcattgctagtggtggtgggaatccatttgtcttgtggaaaatggcagcatctctttattttataaggcagaataatgttatattgtgtacacataccacattgtctttatccatttgtccatcgacagacacttagtttccatatcttggctgttgtgaatagcgctgcagtaagcacaggagagcaggtatcttcacagggtggtaatttcatcccatttaggtgtatttccataagctggatcgctggtcatatggtatttctgttttaatttatttagaagccaccacactgttttgcataatggtaatgatgggaatgtagaatgtcatagccgctacgaagaacagttttagatttgaggtataatccaaaagcaaataatgtttgatcatggttctcatatgaggctctaataaatctagtggaagtccagaaagttttcccaccttgggcaaggatgagtttgcccctaattgtctttgaggcagaatatttgcagaatgtgagatggagtatgtcggcaggattcaggatgattcagccataaatagtaatggcacagaaaaacagggagttagagacatgcagagaaagaaagagatagagagaatatgaatctcataagaggaaaatctgctggatatcagtgttgggttttcattcatagagacatcagtgtcagcaagaaaccatgaagtcaagtgaggagtggagaacatgttcagtctgaaaatcagcatattctcagaggcacccattgtcccatgacacaggcagagaatttcggaaaccagtgaagtgggagttcacaataagtgatgaagttatcatttttccaaactttcattaatatgcaaagtatttctatagatcactcatgcacatacacacaaaatgtgtttttgcatttatgggtgtctagagaaaaataagtgagaaaatttttccaggttgcagagatctgtttaagttatagattccacaggagagtgtctttgaatgaatactattctattaattaaataggacaaaattccctctgttggagcagccttccaattatgtagatttctttattgcttcttgagttgtgaaacataaacccaaggattgacttactggaattcgagtgctgtgttgataaaatttctgataagttttcttccaatgatttgagaatagctttcctgtttttttactcaaggaaatgaattttcacaaggtttcaggacatcacgtttcaggtgttttacttaaagagactcttcctgggtgcagtcagctttcttctaaccatgagctcacttcttcagcaaaccattcagtttgtgcctctattaagaattatgaagcttttaaacttcaatgcactgaaaatcatgccccttgaattaaatgttgattggcactgacatgaattgtccactcttggatatgtgtcctatgttatgggctcaacatatcagtggactgagaatcctccattagctgcctctgactgtggcactgaccagattgagaatcctcagagtcatccatgaaaaagagagtctttaggttcatggggtttttggagacattcaggtgagtggaggggagaaacaggactgggggtggccagccatttcaacaagactgggaaagattagcatctaagtttaaaggtctacatcattccaaacaccctgcatgacaggctgacaggaagaaatccaaccccacagcggctccatagcatctctttagtatacttggtagtgaagctgtttcagggaagaaacgtccactcaagggagtcagtgatgcttctctgagctacaataaacagtgtattggacccaggtttctctgagttcaatgtgatgattacactcagctgctgctccagtgagtttaaatgagcatgtggcaattcagatgagcctggctgtgtggtatgttatatgtaaatcggaactatgtaaacataaagggcatgtcggaactagtgtgagggtgagagatcttagaggccccacacctcacactcttgtgcttatttgctccaggaacctccaggttctttgagtgaaaatcaacatagatcctttcctggataaatcatccaaatatctaatctctgagaaatacacatgcacatttctccggatagaccatccaggggaaagacatatctagaaccttatctgtgttgggtaaggtagtccatctccattacagaccctcccagcagccttcctttatcatgaaagtggataaaattagccaatagagaaataatcctataatgttatagccagaaaagggaaagcaacagtttcatttctggagactctgcgtataggtcacagcccagagaaagaaaggatgactgaattattaagaatcaattgtaagaacatataatacttccaggatgcacactttgttttctcaccagtataatctgggttaaagatgaaagtgtggaaatgcacagactctatgtgaggaggagaacatagggaaactgaaagacaatggcagagaataagacaaggacagtaggaaaatctgaagcctctgacataaattttttgaagacaaggtcttggcaaatccattgacctcagattcttttatcatggggcatttgcagggttcctagctgagaaaaaaaatgcatgcacttcccaagtctccacttgtattctgtttgcctcagatcgctaagtgaaaaaaagccataaacctaggcctagtgtgtgtgtaggaggcactttttataggctagaaaatagtaagaaaggagaatatgtgttattggaatagcatatacaaaggtgtctttattctgaatttatctgtacctgcagatattctcaggtgcaacattcaactgcaagagcccagcgaagaaactaggcactccccaaatccttcaagtttttgtgttcattgtgtgtccactgactcaggaaatgtgaagcttcagaaaagggggtcccttctgtgtcacagaatcttgtctgtgggtctccctctgtaggtttagtaaggctaatcaattgttaaaagacatggtgtcagcagcctgtggtgtcactgatggagaattctaaaccaggacacagccacttcatgctgggctagagactctgaaggaaaatatttgtgagccccgacagaaacctcattgcaaggcaagagcttctgtggaagggggcacttgggagccaccaagcgcaggttccagccctggagcaggtgcacagctggggaggaggtttcctctcagtgcctgtgttttcgtttgtcaggaaaaaacaatctaaaataactgttcaaaaagtcgctgatgtgctttaaatattctatcacatcaaaaccattcatataacttaaggcactggggaactattttttaaagtgggtttctagaactataatatcttaatagtgagaatatgaaggataggcatgtttttactaattctatgggtacagattagttgaagaaactacattcctatgaataagaaattcagatttcagtgttaagtaatgttgcttacattgtgtgagtgacagggcagtggtggatctgagagtgtggcaggtgcacagaccaagtgagtcagaaatcaatatggaaaggtgagggtctgtggatatgaactgaaagtatgtaaatacttgacgaaatactaataaatggagttcaaaataacccaaaattgttctaaacacaaattccttgacaattactttgggagtagagagttcataatggactccaaactcctgctttatcttctgattcccattgtctgtgagatgagaaaatcagctctaattatgcatcacagggcaaatctgtaaatcaagagtgttcaatagaattgaagaccctgggggatcaggacatgaggcaggtgctggagacagtgtctcaggagcacccagtagatctcagaggtccctcctggacactcatgtgggacgtaagcatcactttctcagagtcaccaatgagctgtgctggtggctgatgggtccaggaaaagaccaaggcacctgctcagtgtgatggagagtgatggttccaaaaatgatccaggtggtctctatgctaatcaaatgtaggctcacagtgaggagcctgttctatatgggcttattcttcagtgaaaggacgtctgtccacaaatgtttgtaaatggagcagggcatgcatttcctcaagcaggattagggcttcgaccgtctgcatctcactcttgttaggctgatgtgtcatttatcttccctttcttatcatggattgggctttgagctaagaaaggctttgtcttatgaatatgcaaatatactgatatccactgaggtaaatatgttctgtgccctgagagaatcacctgagagaatcccctgagagcacatctcctcatgggctggacctgcaagatcctcttcttggtggcagcagccacaggtaagcagttcccaggtccaagtaatgaggaggggattgagtccagtcaagggggctttcatccactcctgtgtcctccccacaggtgcccactcccaggtgcagctggtgcaatctggggctgaggtgaagaagcctggggcctcagtgaaggtctcctgcaaggcttctggatacaccttcacctactgctacttgcactgggtatgacaggcccctggacaagggcttgaatggacaggattttagttatttgagagatttttcatacaacatttattctgtaagcaaatttcagggattgttgaatgaatcatattaacaaatctgacacagaacttcctctgaatcaatctttgtaaacatcaatttctgaatcaatgttgtaaatatttcagaacacaagcacaaattcacattttaactctacttttatctctatttaaaaaatatcaaaaaatctcattttgtgcatgtaacgttttgaatgcccaccatcaatgcatgacatttcttgtttttccacattcatgttaccatttatcatcatgagaattgtgagttttagccatgctgataggtgagtaatggcatctaatttttatttaaatgcacatgtcccaaataaaaaattcgtattaagcaatttttatataatttttgctgggatgcctttcctgatatgtggttcattattatctgcattgttttcttttcattagttgtaagtttacttgcatattgattataaaagtcacttaacaaatccaaagaattgatttaacaaatagatgacttggaagtattttctcccagtctgtggttgtctttttctctcttatcagtgggtatttcaaaaaatatatgtgtgtctgtgtgtctgtgtgtgtgtgtgtgcacagatttagacaaaaaacataaaaaattattcattcatagatcatgtatttggcattatatctgaagtctcattataaaatacactaatagtgattatttattccatgttgctaatctcaggccacaatcaactcatgagtgcttagccttcacctattgattggaggactatccacctgagatatttggaatacttccatgaggagatgtgttcttcttcccatcatttctttatttaatcatctattaacatccgtattggtttatggacatctatttcatactctgaagaagatccatgctacattattcattttcttgttcaaatctccacagctttattaggtgctgggactcatttagtttggatcgtgcatcctaacagcaaagctcatcttttgtttttgaacacttccctgtttcctgatattaggatagattctaagcttgtttctttatcacctttttcatacatagaattagccatttatataaagattgcttgtttctgattttaaagagtagtgttaaaataaaatattgtgataatgggtatgtgtgttgttaatgtggtataagtacttctgggacctctcaaccttctgttctagcaaatgtgcatgtttatatgaatcatgtcatgtccatatatccaatgttgaactatgttgcgaaaagtgatctcaagataatggtaattatcaaccccctccctaacaaggtgtagatctgcatttttttttcattgtaactcaactttgcctcatggtcaggaacagtggtttccagctctaaatgtactgattacagcgagatgtccgttttccctggaaatgtatttttaagttcttactggatgtatatgatgataatgttttctactatgaagatacctgaacagtgtccacactagagagtaagaaagagtaatgggcagattaaccctgtgcatccagacccaggaatcctctgatcctgccctccctgaaacggagacacagaggatggatgagcaatgctgagcggtgcacccaagaccacaaaaagaaagacatggaaatatgtcccctcccctcctcaagaaaggcagctcatcccctgttccctcaggcccgggcgaggagccaccccatgtctcttcccttcctcagtgtccacactgtggggtctgcactgatctgggcttcccttctcatcaccctcgtattagtggcccttgtgaatcaggtccagctgtggctgctgctcatggggctgctctcagtctgatctctctgtgtttgcagaagtcctgtgtgaagtttactgatggagtcagagggagaaagattgtacagcccagcggttcactcagccactcctgcaaagactctggatcaccttcactgattgcagcataagcttggtccagcaggctccaggaccagagttggcgtgggcagcaacagggagaaattcaagaggaagttcttacatgcacccttacgtgcacggtctcactgagatctttacttcctttatcacgtttgttctgtaaatcacaacgaatggtgcattcttcatctattatacacttgttaagtcttttttggcatcttttaaaaaactggtaactttatcctgtgtaatatccctgttaagtcctaaaagtcttttttgatgtctattttttcttaactttacacagctactatagatttattttggttcatatttttgtaatccatgttttctcatctttagtttttacatttgtgaatacgtacagtaattttctaatacatagcttctagttggggcttgctttttaaaatcaactataataagctctatttttaaactaatattatttttctgttacattgtttaaattagcatttcacaatgatgtttatttctctactaacatataatctaattcacttttataaatattatattggttaccataagttttacaataagaattgtatataattagattctataagaattgtatataattggattctaatgcagatactgtgatggccttgatatgaagaacagagacagtgtaactgtgtgctttgaattcctccttctcactgctctttcttgtttattcccagtttgcacttacatatactataaaacataatatataaattttttattcctttcatagttatataatatagcaattacaaagataaaaactgcacttcatcttgattttcccattttgtacagtcttaatttcttcgtatagatttatgttttgaatgtatatcacacggctactagcagagaaagtttgttaaaatgtgcactgaagcatgaatgtgctgacaataaattgtctcaagatctttttgtaatgacagaattttatttgcctttcacttttaatgaaaatgtaatgcacatagaattccagtttgcatttcacttgtaatttattttcttgtgtttattattttgttcatggagatgatcacacattacattctgctgggcctttattaaccacatttctatgaacctagtcagggttggatttcaagtgtatggttgccacggctatcagagttgaagtcagcttctcctgttcacaaaaagttcaggttcctccagtgatacccacttttgtgtcccggtttggctcttcccatttctttctccccagagagagcctgtctctttcatctgtggcaggtgcatcctgctgacacttttacttggtgattgtttgtggggtgaaagggcttggacacagggggatgttctccaaccttctgaccaagcatccttcttagctatgggtggtgagaatggctctgaagcatggtcttccaagcgttcctgttccttcccttccccaagtcagagtgtctctttctagccacagtggtcttccatcagtgtcctcagcttctgacccactgtccttactccacagactcaggatttcattcctcaggaaagagacgggaggtgtttctgggtagagtctccttagtgtcctctgtttccttctgttctagttgattctaccagtgcctgaaggacacaagatttaataaatgtctcccacatatcgtgaagagggattcagcattgaacggagctactgttcttcctccccagtcaacatcacaggacagcaggtggctgagttgtctggggatttctccaattctgtaggaaaagcccgcaagtgccaggagtttcacactctcacagcattagcacacacatcctcaacaactcatgaaacatttccaggttagctttttcctatcttcaataccatacaatgagtggcacctgccccaggtactctaataaatggacctagttttctctgcaggctccccattttctcagatttcaggggtttttttctctgcaacatcaactcagatatgttgaagggttcattttttgtagttcttcaagtttcttgttaatgaggtcagaagaagatcattttctcatttttttttttacattcccgtgcttagtatctgctttctaaataaaattcggaaactaagacaaaatatcaaatatccactatttggtgcattgttaaactatttgagaaatattcatgtactgaaatacaatgaacaattgaaatcaaggcatgcctcagtcacataagaatgtgaggacattatcaaataattgtgctgagtgaaggaagctaaagaattcacagtaaatctcctgtgatttcttttgtataaattgtagaaaatgcaactattctaaattaacatggagaagatctgaatttttctgagaaaagtgtggtgaggtaacaagatggtgaaataaaattacagagaagtgagagaaaaaaatttggaggttaatttaattgctaatagcacgattgaagtgctgattcaaaggctgcacacatataccaacattttccatatcgtacactataaatttgaattcactattgattgaatttttgaataaagcagtaacaaaaatgagtatattggctgaggaagagcaagaaagagatgaatattgacacttgaataatcacggactcctgaaaatacacacatgtgaacactgattgcatatttcaggtaaatactagaaaaagcaaagtcacataaagtcgttatgacaggtgggataccctgcaaatcacactaggcatgtcccacactgccctggagctgtctcaggggagcagtctcctccagtgtttagaggcacaggcacggataatagggctgacgctgtccagatgtgtgatattggacacattgcacaactgctctgttatgtatgtaattcatcttctctaaaaatgtaacattgacacttgcactgaatatattctgcaaatatgtaaacattaaataagatgatgactgctaattgatcatcaagtcacaatcacataatctgaagttatattttcctgagagataggattacctccagtgttttccgggaccctctcatctgctctgggcactgccctctcctccagcgtcccactagagcttgctatatagtaggagacatgcaaatagggccctccctctgctgataaaaaccagccgagcccagaccctgcagctctgggagaagagccccagccccagaattcccaggagtttccattcggtgatcagcactgaacacagaggactcaccatggagtttgggctgagctgggttttccttgttgctattataaaaggtgatttatggagaactagagacattgagtggacgtgagtgagataagcagtgaatatatgtggcagtttctgactaggttgtctctgtgtttgcaggtgtccagtgtcaggtgcagctggtggagtctgggggaggcttggtcaagcctggagggtccctgagactctcctgtgcagcctctggattcaccttcagtgactactacatgagctggatccgccaggctccagggaaggggctggagtgggtttcatacattagtagtagtggtagtaccatatactacgcagactctgtgaagggccgattcaccatctccagggacaacgccaagaactcactgtatctgcaaatgaacagcctgagagccgaggacacggccgtgtattactgtgcgagagacacagtgaggggaagtcagtgtgagcccagacacaaacctccctgcaggggtcccttgggaccaccagggggcgcccgggacactgagcacggggctgtctccagggcaggtgcaggtgctgctgagggctggcttcctgtcgcggtctggggcggcctcgtcgtcaaatttccccaggaacttctccagatttacaattctgtactaacatttgatgtctctaagtggaaaacgtttttgtcctttttgtttctttgtttttgtaacaagaggaaacatcctcagctccacagaagccagggtgtcactttggggacagaaataatcctttcatggtcaccaggataagagtcctgaggaatcccagggaaacctggagagtgttttccagttagactcagggcagagacctccatgggaatctctgattagaacaggccttgagctctgacgggagccaagagagaggctcgcccagggtcagagtccttaaaacctgatggttttcacagctatcccccctcgtcttgtaaactcagactgattcagttgaccctctttctgctaatccatttccttctctgtaggtttgattctcacagttcgctttcttcttctcttccctgaaaacagacgatgtgttttctgtagtcaaaatcccagggctcaggtctgcaggacctgggtaggctacggggactttctcactcaccattgtctggacactcttgtcttctgtgcatggaggcatttggaaaatgaagtggacattagccatgaagggaataatactagttttctccaataggatattgatgtagagctgatcttgtgcttctcacactgtctcagagtttggactttcacctgtgactttgagaagagctggggatgggcactccattgtgctgtgagctctgggtaacgataattgtagaatctgcctaggcagtctaaggtcaatactactggtcatcaggaaagacagctggaattcctgggaagatctgcatctgccgtccaccatggagtcccatcgtcttctgttatgctctctttgaatcagtcccacctagattatctagaacactcttcctgacttaggaaaaataatggcaggctccactaacacctgtgttatgccatgggagcaacacctaagctagtgtgtgaatgagtagatgagactgtggtctagtcaaggtgacaggtaaaattgattgttgccattatgatattttattttatatttggcaatatagtcatgctcctattataaatattttttgagacggagtcttgctctgttgccagcctggagagtgcagcagcacgatctcggctcactgcaacctcttccacctcccaggttcaagcagttctcctgcctcagcctcccgagaaactgggattacaggtgcacgccaccatgcctggctaatttttgtatttttagtatcgacagggtttcaccatgtgggccagtgtggtctcgatttcctgacctcgtgatctgcacacctcggcctcccaaagtgctgggattacaggcatgagccaccacacctggcctagttttattaatgtctgtccataccagcaactacatacctatggggacattaatttacatctgcagacagatgtgtaaatacacaagcctatacatacatgtgtagccatttatatttaacattataataaaataattctaaaatattttctaaagaattaaacttaatgatgagctaaatataaattagagtaatctataattgatttcgatcattctctatagtttgcataaatggatgtctatttctaagccttaacatagtgtattcgtcattttaaaacagtcaagaaaaaattacaaatgttcttgtcacaaaaaaagataaggatttgatgatttgaggtaatatatatgtcaattaacttgattcaattattctgtattgcattcacaaaccataacatacctttgtgccccataaatatatacaaccaaaatttctcaattttcaatgaaattttaattatatatttttaaatctgatgcctctccttggattaagccacctcctcaggcttacagggctcttccattttctcaacatgctgttataccagatgagcacaaacacattaatttcattatgcttagctttaatttttcaaaacaacatgaaggtgataattttaccaatagacgtattgcaacctactatgcatgagaccctttctgtgcttcaaggtttcttctcaggactttatatgtattgcaaattttcatttttttctgatatggaatgctgatttctctttattacagattatcagtttatttttcaaatttatctcttaaaattaattttttcaaagtcccactcaaaccagggtattattagaactttgaagtgtaatagttggaccaactttgagaatacattcaatttagttcacgtgctctcaagtatcttttcttctttaaaagttgttgtcagttgtaatatcacacaaaatattagtaatttatactaatgacacaggttaaaatattgtataaataatttaattacatttgattggaaaaaaggaatatatgttcctcatatcttgacttttttttcttctctatgagatgcatgtttattaattattaagtttaagatgttacccttgtctttttgatttctgggatttaattttagtacatatacttgaatgcattgtattaattcatataataatgttcatattttggatagggttttaatattaattttgttattactgaattttaaactattctacactttttcattttttgtttttatgcgataaaatttacatataagaaaatatgcatagatctggaatgtatcactagagagtttctggcaaatgtgaatacccttgtccccagcacctaaggtagctgaagagcaagtccatccccacatcgcgggtctttccctgtgcctgcggtcaactcctgcatggggaaatgttttgatttctcacactacagatccatttttttccgttttgaactttatataaatggaatcaaacattatagaccttttttttgaaaggggcttcgatatttttgagattaattcatgctatttaatgtataaaattagatcaacatattgtcatttattcaattcatggactgactctgatatgaaacctcaaagttttcatgtatatatggagacagggagaggaaggagaaagattttatatctgagtcagtccattaagtaaataaatgagaatattttgatttattttcctgttgatgtactttaaatttgtttccattttatgaatattataggcaaagccgttacaaatatattagtgtaggttttcctatattgtctcatttttgttgagaaaatatgaagtatatatttctttttttatttttgattactatttatttatattttatattttactttaagttctgggatacatgtgctgaacatgcaggcttcttacgtaagtatgcatgtgccgtggcggtttgctgcacctatcaacctgtcatctaggtttgaagcacctcatgcattaggtatttgtcctaatgctctccctcccctttcctaatgcttttcctcccctgacacatcccagtgtgtgatgttcccctccttgtgtccatgtgttctcattgttcaactcccacttatgagtgagaacatgtggtgtttggttttctgttcctgtgttagtttgccgaggatgatgatttccagcttcatccatgtccctgcaaaggacatggaaatcattcttttttatggctgcatagtagttcatggtgtacatatgccacattttttcatacagtctatcattgatggacatttgagttggttccatgtctttgctattgtaaatagtgctgcaataaacatacatgtgcatatgtctttatagtagaatgatttataatcctttgggtatatagccggtaacaggactgctgggtcaaatggtgtttctcgttctagatccttgaggaatttccacactgtcttccacaatggttgaactgatttacactccccctcaacagtgtaaaagtgttcctatttctccacattctcaccagcatctgttgtttccagactttttaatgatcaacactctaactggcatgagatggtgtctcattgtgattttcatttgcatttctctaatgaccagtgataatgagctttttttcatatgtttgttagctgcataaatgtctttttttgagaagtgtctgttcatgtccttcgctcactttttgatggggttgttttttttttgtaaatttgtttaagttccttgtagattctggatattagacctttgtcagatggatagattgcaaaaattttctcccattctgtaggttgcctgttcattctgatgatagtttcttttgctgagcagaagctctttggtttaattagatcccatttgtcagttttggcttttgtcgtaattgctttggtgttttagtcatgaagcctttgcccatgcctatgtcctgaatgatactgcctatgttttcttctagggtttttgtggttttagattttacatttaagtctttaatgcatctagagttaatttttgtataaggtataaggaagggatccagtttcagttttctccatatggctacccagttttcccagcaccatttattaaatagggatcatttccccatcgcttgtttttgtcaggtttgttgaagatcagatggttgtagatgtgtggtgttatttctgaggcctctgctctgttccattggtctatataactgttttggcaccactaccatgctgtttttgttactgtagccttatagtataatttgaagtcaggtagcatgatgccttcagctttgttctttttgcttaggactatcttggctatacaggctgtttttagttccatatgaagtttaaggtagttttttctggctctgtgaagaaagtcaatggtagcttgatgggaatagcattgattgtataaattactttgggcactatggtcattttcacaatattgattcttcctatccatgagcatggtatttatttattataaaagtaactttaattttttcagttttaatgaggaacaattgaaatatttttaaatgtatatgtttaaggtgcaccacttcatgttttgatattgtgttagtccattctcacactgctataaagaaatgcctgagactgagtaatgtgaaacaaaaaaatagatgtttaattggctcatttttctgcagactgtacaggaagtgtagtggcttctccttctggtgagactcaggaaagttagaatcatagcagaagacaaatagtagtagacacatcacatggccagagcaggggccacaggaagagagggaggtctacacagttagacaaccagatcttatgataactcacacaatattatgagaacagcgccaagagtcagtgctaaaccattcatgaaagacccaccccatgacccaagcatctcccactgggtcccagcttcaggattgaggattataatacaacacgagattcaggccaggacgagttgcaaactgtatcagatacacattgtaaaatgctcatcatgatcaaggtaatttgtgtgcctatcatcccacatacattttttttttaaatggagtgtgtgtgtgtgtgtgtgtgtgtgtgtgtgtgtgatgagaatatctaagatctaccctttcagcaaaaatcacttttacaacacagtattaaatacaggaacattgctgtagattagatctccagaactcattcaacctgcacacctgaaattctgtaccctttaaacatcacccaatttccctctcctcccacatcctgggacccattattttactttctgctttcaagagcttgggtgttttagataccacatgtaaatgagataatgcagcatttgtctttctgcatctggcttattccacttagcatcatgtcctccaggcccatccgtgttgttgcaaatgtcagaatttccttcttttcaaagcctaataaaattcagttttatgtgtacacattttctttatacattcatcagtctgtggtcattaaattattttacaaatctacactattataaataaccttgcaatcagcatgtgtttaacataataattttacttatttgaatacataacaagaagtgggatcaccagatgatatgatagctttatttttcaatttattgagtaaccaatcctaccacaccctaaaaggattctcttttcaccacattcttgccaatatgtgttatatgtcttgctgatgatagccattttaagcagagtgaggtgataactcatcatgattttgatttgaattcctctgataattagtaatgttgagaaccctttgaggctctgtttttcatgtgtgtgttttctgaagaaaaacctatccagtttttgccctttttatcagatcatttgttatttgctattgagttgcatgagttatttatacttttggatagaacttatgtcaggtatataattgcacatagtttttttcctgtgcttttttctattaaattcaaagaaatcatttctgaatcaatgacaggaagtttttttccatgtgttctatgagtttgtggcttcaggttatgttcatttttagtttatttttgaatacggtgttagagaaggtctaattttatttcttttgcatatggatgttaagcttttacatcatatattgaggagactgtccatccttcactgtgtgttcttgggatacaaaatcaggaagatgcataatttaaaaagaaaacatcagatgaatattcctggtgaatatagaccgaaaagttctcaacaaaatactagcaaatagaatccagaagcactttaaaatgtaatacctcatgatcaagtaggctttacccctggaaggcaaggttcattcaacatccacaattcagtaactgtgattcaccatgtaagcagaataaaagcaaaaaccatatgattatctcaatagatgctgagaaagcttttgataggatccaacatccgctcataataaaagccctcaacagactaggcatcaaaaaaacttacctcgaaataataagagccatctatgaccaatccacagtcaacattatactgagtgagcaaaagctcaaaaccctttagaagtgaaagaagaccaagatgccctctcaccactgctattgaacatagtactagaaaccctagtcagagcaaccaagcaatatcaaaataaaaggcagctgatatggtttgtacttgtgtccccactcaaattaaatgtcaaattgtaatacgcagtgttgagggtggggcctgatgaaaggtggttagatcatggggatgagtctctctctcgtgctgatcccatgatagagccctcaggagatctggtttcaaagtacgtggcacctccctcgtctttcttcctcctgctccagccaggtaggacatgatgcttccctttctgtactgattgtcaggatcctgaggcctccccagccatgcttcctgtatagcctgaagaaccatgaaacaattaaaaatctttataaattacacagtctcaggtgtttctttatagtttgcgaatggactaatacagaatccaaataggaaaagaagaactcaatgtatctctccaaactgatgatataattctatacctagaaaattctaaagaccctgccaaaataattctagaatagataaacaattttggtaaagtgttgggatacaaaatcaatgtacaaaaatcactagcatttctataccccaactatgtccaagctgagactgaaatcaagaacacaatcctatcccacttacaatattcacacacacaaaatatgaaatgcctggaaatacaggtaacaaacaaggtgaaggatctctgcaaggagaactacaaaatacagcagaaataaataaataaatcgtacatgacacatgactcatctgacaaagggctaatatccagaatctacaatgaacttaaacaaatttacaagaaaaacaaacaaccccatcaaaaagcgggcaaaggatatgaatagacacttctcaaaagaagacatttatggagccaacagacacatgaaaaaatgctcatcatcactggccatcagaggaatgcaaatcaaaaccacaatgagataccatctcacaccagctagaatggcgatcattaaaaagtcagggaacaacaggcgctggaggggatgtggagaaataggaacacttttacactgctggtgggactgtaaactagttcaaccattgtggaagacagtgtggcgatcctcaaggatctagaactagaaataccatttgacccagcagtcccattacttgctatatacccaaaggattataaatcatgctgctataaagacacatgcacacttatgtttattgtgtcactattgacaatagcaaagacttggagccagcccaaatgtccaccagtgatagactggattaagaaaatgtggcacatatacaccatggaatactatgcagccataaaaaaggatgagttcatgtcctttgtagggacatggatgaaaatggaaaccatcattctgtgcaaactatcacaaggacagaaaaccaaacactgcatgttctcattcataggtgggaactgaacagtgagaacatttggactcaaggtggggaacatcacacaccggggcccgtcatggggtcgtgggagtggggagggatagcattaggagatatacctaatgtaatgttaatgggtgcagcacaccaacatagcacatgtatacatatgtagcaaacctgcacattgtgcacatggaccctagaacttaaagtattatttaaaaagaaagaaaaaaactattaatttttctgaaccatgaacatggaatatttcagatatattttcaatttgtgtgtgttcactttattttttattatcaatcatttctggttttcttttagaaatctttcacttatttggtaatatgaaatataatttttagctattataaacaaaatgctttattgattttttgctgtttgcatttagcaatgccaccaatttttgtatgtaggtgttgtattctgcaaatttacagaattttttatcaattataacagtttttccagcaccatttattaaatagggaatcgtttccccatttcttgtttttgtcaggtttgtcaaagatcagatggtcgtagatatgcagcattatttctgagggctctgttctgttccattggtctatatctctgttttggtaccagtaccatgctgttttggttactgtagccttgtagcatagcttgaagtcaggtagcgtgatgcctccatctttgttgttttggcttaggattgagttggcaatgcaggctcttttttgttccatatgaactttaaagtagttttttccaattctgtgaagaaagtcattgatggggatggcatcgaatctataaattaccttgggcagtatggccattttcacgatattgattcttgctacccatgagcatggaatgttcttccatttctttgtgtcctcttttatttcattgagcagtggtttgtagttctccttgaagaggtccttcacatcccttgtaagttggattcctaggtgttttattctctttgaagcaattgtgaatgggagttcactcatgatttggctctctgtttgtctgttattggtgtataagaatgctagtgatttttgcacactgattttgtaccctgagacttcactgatgttgcctattagcttagggagatttggggctgagacaatggggttttctagatatacaatcatgtcatctgcaaacagggacaatttgacttcctcttttcctaatcgaataccctttatttccttctcctgcctgattgccctggccagaatatgtagaaagctgaaactggatcccttccttgcaccttatacaaaaattaattcaagatggattaaagacttaaatgttagatctaaaaccataaaaaccctagaagaaaacctaagcaataccattcaggacataggcatgggcaaggacttcatgtctaaaacagcaaaagcaatggcaacaaaagccaaaattgacaaatgggatctaattaagctaaagagcttctgcacagcaaaagaaactatcatcagagtgaacaggcaaccaacagaatgggagaaaacttttgcgatctactcatctgacaaagggctaatatccagaatctacaatgaactcaaacaaatttacaagaaaaaaacaaacaaccccatcaaaaagtgggtgaaggatatgaacagacacttctcaaaagaagacatttatgcagccaacagacacatgaaaaaatgctcatcatcactggccatcagagaaatgcaaatcaaaaccacaatgagataccatctcacaccagttgggatggcgatcattaaaaagtcagggaacaacaggcgctggagaggatatggagaaataggaacacttttacactgttggtgggactgtaaactagttcaaccattgtggaagacagtgtggcgatcctcaaggatctagaactagaaataccatttgacccagcagtcccattacttgctatatacccaaaggattataaatcatgctgctataaagacacatgcacacttatgtttattgtgtcactattgacaatagcaaagacttggagccaacccaaatgtccaccagtgatagactggattaagaaaatgtggcacatatacaccatggaatactatgcagccataaaaaaggatgagttcatgtcctttgtggggacatggatgaaaatggaaaccatcattctgtgcaaactatcacaaggacagaaaaccaaacactgcatgttctcattcataggtgggaactgaacaatgagaacatttggtctcaaggtggggaacatcacacaccggggcccgtcatggggtcgtgggagtggggagggatagcattaggagatatacctaatggtaaatgacaagttaataggtgcagcacaccaacgtggcacacgtatacatatgtaactaacctgcacattgtgcacatgtaccctaaaacttaaagtataataaaaaaaagaaaaaagagacccaattgttgacaaagttatgaaaaagatagtttttaaggagtctttaagtaatattgtattttctgcaaacagacaatttgatttcccctattccaaatttcaggacatttcttcttttttcttgtcaaattgttctggctagaattacagtaccatgtagaagtggtggaaaagagcatttttgtcttgttcaacatcttagagaaaaggctttcagtttttccagccttggtataatgcaagctgtgggtttcacatatctggactttattattttgagatatgtttcttgtataccaagtttgttgagaatttctataaggaatggaggttgaatttttttctatgactttcttaaagcaattaatcataaaataataataagcaggtcaatacaagatccataaattagtggaagctagttatttgcactgctgccatagagtaggatcactacacaactcatggtgttgatgggaaactataattctgcaataattaaagactagtgatttacactgggctctattgagagatttggttgtcaactacagaaatcgagatgaaggggcactgagaaacatttcgcttcatatcatctcaacttctaatatcaatttttagtactaatacagtcctattttctcagtatactgtctcacaggttatagtatatgtcttagaaaattaagggttgtttcattctaataattaactcagaaaaattcatttcctattatggatgacaagtgtaaattcatatcttaataattacccacactccaaaacactactacaggcaaaggcaagagaaaggcaggtatagatgagattctctgaggtcagttatgtaaatacccaaggactattgtctatgaccttgaatgtcactttcttcccttccatgagctacatccaggatattctgtgaatctgagagcgttgagcatgtttaattattttatctcactgccccttagtcttgctttctccagttgacaaccaaatctctcaacaataggcccagcgtaaatcaccagacttcaattattgtagaactatggtttcccaacaacattatgagttacaaaatgatactactttatggcagcagtgaaaatgatgaacttccactaacttatgaatctctgaatggctagcatggaggtgtgtatgtatcagcgcactgttctagaaatgttccgtttctgtccattattttatgtagtaatgaggacaacgtgaactaaagggagtatccatggccttataagcacagagaccacatccagtgcaggtgcagagcaaggctgcaacagtcagcaagttgctctctgaagagtcttccaattcccttgcccaaagcatctgctcattcatgggctgagaaaagggaagtcatgcatgcagtctactctctctacagagctgacaggggacacggacaacatcgattattcatggaattttcccataggaatgcagctgtgtgcacacacacataatacatttttaaatgttttttttatttatcctctccaattttaaaaaagtcatcaccttttctcctaatcaaagaggattttgaccagaatgcttggtgggagccccctgctctcccagatgcccacccttatttctcttgaagtgaagaacggcagctctcttgatttctactctcatcctctaggactaaaaccagaaggttccacgccccctgggtgaacatccaagaagaccctgtctgtagcagcaggagcctcaagccttgactgagagctatggtcctgaaatgagacagtgtcccccatggagagcacacgtggacgcccacaactgagggctcactgctcttcaccacagatgcgctcccttactgagtcctgagacctgagtgcaccccatagggtagggctcagaagaggggatgcaaatctccaccagctccacccttctctgtgttgaaaagccgagcatggggacctagttcagtgactcctgtgccccaccacatggagctttactccacgcttctcctgctgactgtcccttcctgtgagttcagtggtcagggaatccttcaggggtgaaacacctgttcttttctttgtgggcttcatcttcttatgctttctccacaggggtcttatcccaggtcaccttgaaggagtctggtcctgcactggtgaaacccacacagaccctcatgctgacctgcaccttctctgggttctcactcagcacttctggaatgggtgtgggttagatctgtcagccctcagcaaaggccctggagtggcttgcacacatttattagaatgataataaatactacagcccatctctgaagagtaggctcattatctccaaggacacctccaagaatgaagtggttctaacagtgatcaacatggacattgtggacacagccacacattactgtgcaaggagaccacagagacagagcccagggtgcctcttgtacaagaacccaggctgcttctcagtggcgctccctccccacctctgcagaacaggaaagtgtggctgagatgccatttcctgtcagggtctgggtgtcttatcctatctgactcagagccttgtcttcctccctcttctttagtaataaatggcatgacccctgttagtggttcatgcaagcagaggctgtatcctgtttgacaaagattcagcatgaaaggttcctgttacttgagccagatgcatcactgatatgtggccaccagtttcttagactcataccactttaagggaccaaatacaaatgtccatagcatatgccattcttaaactgcagaaatgatgtcaaagaagaatgtggagataagagagcaggaggaattatgaaaatctggatagcatcttctcttctagggtggaaggtatgctagtaaagtaatttaatgaaacaatcagacagatgcaatatgtcctcatcatggagtgtctcacatgggcagtgcacaaataaatttctaaaaattccataaggtagatgtgatggatgaggcttatttccacacagggagcccacaaatatccagagaagtaaaaaatctgacacttggaaagaaaattgcctcatcttgacatcagaaacccatttcaacatgtccgaggggcaatgtggaaaagaaatggaaacttcaaaaacacatttcttatgaaatgtctagctcatgtttgaacataaaaacagaattgtccatgattttagaaaaaccaacccatgacagcgagtcactacactcagaaacaccactgagtcaacagacttcagtctgtgagcaggtcagtactgaggccccaggtgaatcaaggctctcacgtacattgtacagaacccagaattgagccacacaatctataaccaagtcttctttgacaaactttacaaaaattaacaaaaaaatacaccagagaaattcaatatatgaaattcaatatacccattcaatatatggtgctggggaaattggttagccacgtgcagaagaacaaaactagacccccaccctcaacacatatatactcaacacaaaatgaattaaagacttacatataagacctcaaactataaatctactcaaacaaaacaccaggacaactcttctgggctttggcctaggtaaagaatttatgactaagaccccaaaagcaaatccaagaaaaaaatagacaaatgggacttaattaacctaaagcatttttcacagcaccggagtgaacagacaagttgcagagcgaaagaaaatttttccacaccacacctgtgacagggaactaatatgaagaatttgcaaggaactcaaactactctacaacaacaacagcaacaagaaccaaataactccgttaaaattagcagaggacatgagtagacattttcaaaagaacacataaaaatggataataaatatataaactacgctcaacatcactcatcatcagggaaatgcaaattaaaaccacaataagatatcatcttccaccagtcacaatgactattactaaaaactcaaaaatatcagatgttggtgaagatggaaaggaaagggaactcttagacactgttgatgaggatgtggatgaggacaacttctatggaaaatggtatggagatttcccaaaaaactagaaatagaactcccctttgatccagcaatcccactactgggtttactacccaaaggaaaataattttttatttccaaaagatatccacacttctatgtttatcacaaaactattatcaacagcacatatgtcaacctgagtgtccaccaacagatgattttataaaagaatatagcatatatgcacaattcaatactagtcagccacaataaggaatgaaactgtcttttgcagcaatatgcatagaactggaagacaacataattagtgacctaactcacaaacagagagtcacatgtcacatgttattatttataagtggaaggtaacaacgtgtccacaaggatatggagagagaaatgatggacaccagagacttagaaggatgggaggtggaaggtgggagcatgaggagacattacctagtgggtacaatgtacattatttgggtgatagtacactaaaagccaagaccactatggaatatagccatgtccaaaagtggcattcgtagtccttaagtttatacaagtaaatgtacacacaaataaaattaaaaatataaaataattaacagttgaccaatgatcttaaaagttgatttaaaatataatcaataaatgaaatgaatatcagttgaacctcattaaatttgaaaacgttttatactcaaatgactataagaaaatgaatgtcaagtttcagatgagaaactgtttgcaaatcattagccaccaacataagtataataagaaccctcagaactcaactgtgaaaaaaagaaacaacccatggatagaataggcaaaggtttgtgcagacatttcatcaaataagatgtacagatgacacataggcatataaatgggctcgcaacaggattttccattcgaaaaattcaaatcaagccgacagtgagacactactatacaatttttagaaattaagaagaaatacagataataccaatgctggtgagcatatcagggtccaagactctaaaacgttgcaaacaggaatgcaaaatgaaactgctactcaggaaaataatttatagttttttctaaaatcaaacattttcttaatatatgacctaaatatcccactcctgaatatttgtgtcagagaaatacaatcttagattcacaacaaacttccatttaaatgttcaatatattgtgctcacgtgtgtgtgtgcacgatagaaacaaaaagtaacatgaatgtctcaaaatttgaataggtaaaaagtaggaagtgtctattaattgaataccatcagcaataaaaaataacaaaatgactgatacacaaaccattacaggtgaactccagacatgatgctaagtgagagaagccagtctcaatgatcaaagggacacatctgtaagcaccacggtcatcctcaggtgtcagtggtttgggctgggctctctgtctctttcctgaccagacccagatgttgagctccgccacttgcagatggaaaattctactattttcaacaatgcactgaggtttgaactgcttcacagactgaacgaaacaaacacgggctcctttgaacagtgtgcagcatttgttccaaccacaagagaatgtctcccagctctgccccttctcagttttccctgcaagccagcagccctgcagtttagcctgcatctcccatgcatgcacccatctccttccaagggccttactccacaacctccacttattttgagtgcactgactggctttgaacttttccacattctgttgttattgaagttaggatgtttagagccatattaaggatcatattttatgactgaattccagtgccccctctctcctgggacagagcacgtaaccaacattctgcatgtggagacaaagatgagcttttttcttcctcagcctaggagatgagcgctcagtggagggttggatagaagcttcccaccttctcagcactccagttctggtggggagaacctctgccataggagcagagctagaaaccagggaccgaatgttcccagtgacactggacccagggtagagcctccatccacgagtggggctccatggaagaagcgagtctctggctctcagtagcttttgtccagaactgagccttaggatcgtgtactgtgggcagagtcagagggccaatgtcctggctcctggggaacagtttcctctgaagggagctgggtagaaggtgtcctgtcttcttggctacatctgtttgcagtggagtttacatcatgctgagttgggatgtggaaggaaggaggagcatcttagatcaattatgatggctagacttactgaattttgtagattttcttgaataaatgtttcttcacttgctgtatgctgtgagagcctttccaaaccctgtattttttcaaaataattttcactggtctcatgagggcatggattcattgagcccctcatgctatcaaagagaaatagaactttttttgttcactttttagagaacatccatgggttataaaacaatgggttgacttctcttccaaaactttacagataccgtcaattttcctcttgcttgtaaggttttatccagaagaatgctgtcatcattttttctgcttttttggaaggaatgccccttctactcacctcaaattgcctgcatgtatttctatttttctttggttttcagcagttttaataagatttagctaaatgtgtgtggggggagcagggagtgtcattctgctgttctgtgttctctgagatgcatggattcacggtttactctgtctccattttggggaacacaattagaaaaaatgtcagtgtgagcccagaaacaagcctccctgaagtgggcagaggaccacctgggggcgctcaggacccactgagcacaagagccagccccagggcaggtgcagacgggggttaagatctggtttcccgtcagccctgtggcttcctctccataaaacagttccctcgggggcacgtctctggattccttatcttgttcttactgtgaagtctctgaagaataaacatttgttgtaacaagagaaaaattttctcccatgcaccaaaggcagagtcacctacagtcaattagtcctgtttctcaatgttaataaactatcaatgtttctgaaggtacattgtacagaacccagaattcagccacacaatgtatagccaagtgatattgacaaacttaacaaaatatacaccagggaaaggacgtcccattcaataaatggtacttgggaaaatggatagaaacatgcagaagaacaaaactagatccccaccctcaacacattagtcaggtctctaaaatgcaggagtacatatctaaaatttattattttattgtgcatttttacgtgttccagaaggtgggagaaatttctttctgtgaagagcatcccaaagtcaggcactcctctagaacacgtgtttaatccttgtctttggcttattgatgagctctgttggctgcaataacttctgccatccgggctgactttgcatcatgtagaggagcaaattctgaatgaaagtttgcactactcaattgagtgcataacctacagttttgttactgatgtatgattcatcagagatgatatcagatcaaggatttcaatgagaatctaatctaaaagatgtaaacaaattttcctaatttagataaaattactgtgagcacactgctagtattcagccatgtctcctatcacattgaatctacactaagtttgacctaaaagctagcacttgttctcatgttccaatatgttatttttattttaatgtattcagattactatgtgttgctattttacccaaagtgaaggaaagcaattttaactgactgaaaatgagaaaaagcacaacctaatgaaatggaagtcaggacatgagtgtctccagccttgtctatttcaaaaattcacgtacgcagggggatttctttcctcaattttacacagagaaacttccaaaatgtttgtttcctctcccatggactctatcatcagtttctatgtcagtttgcttagaattttggcctccagctccaaccaatttggtgcaaaaacatgatttcattcttttttatagctgcagagtattgcactgtgtataagtaccatgttttctttatgcagtctataactgatgggcgtctaggttgattccctgtattaggtaatgtgaattgcacagagataaacacatgagtggatgtgtctttgtgttacaatgattggttttctcttgggcatatacccagtaatgagattgctgaggggaatagtagctctgttttaagttctttgagaaatctctagactgactgaattgttttctctgtgaatggtgataattatgtcaatatttgtcaaattttgaatgtattgtttgaagattgttatttgtcaatattacctcattaaaactattaaaaatggaagtgtataatttggtagaaaaggattaaaagaaagataaaaataatacaagaaaagtcacagactcctgaatccacatgtgaattagcactcagtttttctatattatttataaaaacactaagatacagccaaataatatcatgatatccttataagaagagtgtttcgtaaacctcactgggaatttctagctctgtcctagagttaatttagggagcagtcggatccagtcctgagcaacacaggccagacactgagacttaccacatcttaccagatgtgagctcttagacacgtcacatggcctctccatgcttgggggtttaccttcacatctgtaaatgaaggaaacattgactgccacagaacatacttcatgtgcatctatacagtagaaatgctaataagaattaattgtttatgaagtgtaatcactctgggacacagcccactcagaggcatcccttccagaacccgctatatagtaggagacatgcaaatagggccctccctctgctgatgaaaaccagcccagccctgaccctgcagctctgggagaggagccccagccctgagattcccaggtgtttccattcagtgatcagcactgaacacagaggactcaccatggagttgggactgagctggattttccttttggctattttaaaaggtgattcatggagaaatagagagattgagtgtgagtggacatgagtggatttgtgtggcagtttctgaccttggtgtctctgtgtttgcaggtgtccagtgtgaagtgcagctggtggagtctgggggaggcttggtacagcctggcaggtccctgagactctcctgtgcagcctctggattcacctttgatgattatgccatgcactgggtccggcaagctccagggaagggcctggagtgggtctcaggtattagttggaatagtggtagcataggctatgcggactctgtgaagggccgattcaccatctccagagacaacgccaagaactccctgtatctgcaaatgaacagtctgagagctgaggacacggccttgtattactgtgcaaaagatacacagtgaggggaagtcagcgagagcccagacaaaaacctcctgcaggaagacaggaggggcctgggctgcagagggcactcaagacacactgaaaacacggttaacactgggacaagttgctcaggaaggttaagggctggtttcctttcagagtctttgctgtttctgtatctaacagtttccccaggaaccctgtctagatttgcgatcttgatctgcttaaactgtctctgtgtcatttttcttacctgtgactttaggggagctgatcgtggacactccagtgtgtggagatttcctggtgacagcaattgtgtgttctgtctaagcatgtctagggccggtcatcaggaaggacaggaaggacaggctggaattcttggaaacagctgcacctgccatccaccagggaactttattgtcttctgttctgctaaaattaaatcaggcacaccaagtttaactagcactatcttcctagcttaagaaaattgatggcaggtttcaataacacctatattaaaccttcagagcaacacctacattagtgtctgatttgataattgagactatgttctagccaagcagacacataaaactggtgattgccatgcttagttcatatttcatatttatcaatagaatctggctggtgttataaacagatttgccaacacatgtgtgttagtgtttgtcttcggagaggcacattctatgactggattaagtttgtgtacaggttcctaaggaacctgttcatgcttttgagaggaaatgcagagggggtggaaggcggctggggaagctgaaggtatacgagggaagtcagtccctgagtgaaggagagagggaggagaactgggtagaactttcctaaacttctgtgctggtctaggaaggtccagcaagatcactgagtcagattcgtgtcaaagtttcccatcggggacccccgtgactcccagcagtggctctgctcagatcagcacagagctcgttcttctcctgagagtggagcagaggatgtggctccagcaccagccatggcatggacgtcagagagcagccccaggcacctgagtcgggtgcattgtgccccctgcaggtggacggagggaggtgctgactcagggcccacacgctgtgggttctatacagaacacacacttttacttcatttctgtggatgacatagaaacaaacatgcagtctattaacagcggtgattcctacatttgccccaattgctttattccttgattccgcagaatatcctgacgcagaattgtctttctctcgtggaattgcgacgtgtttaggacgtgtgttccccactttcagtgttctgctccatgaacagagatcctgagtagagtacagctgaccctccttccacactgttcctctcctccccacaggaagagcagataattacctgaggctgaatctgaggtgggatctgtcctctgaacctcagagcctgcagagacccccggctgcagattcatggagtcaggtgtttgtacatgtgggaaacttgagctgttcttttgtcagtgaacactccttagaactaattgtgggttcagaattaggacacccattgatctatcacacctcagctcattctgccactcagaatctccagaaattcaggaaatggttcaatttacatgtttgtgacacattgttctcatttcatttagttgtgagtttggtcagcaaaagtgctaccatttatgtgtcccaacctgatgaagctaacttgcttcaccagatgttgggagctcctgaattttatcctaagcccctctctctccacttcatgtgaaattcggtttgacctggaattctggtgtgttgatttagccagatttccccatactgagtgtctgattttcctggatatctgatcagtttccttgtccttcaccataacttgggtgacatctgatcaccctgggctaacttcaacaaaaatcctggcaggttgccttaagcaggatttacctcactcctgatgtttcttcttgattttccatcctttgccccaaccctgctgcatgcctataaatccccacgttctcactctgtatttggagttctgctgaatctctccctcattgcaaaatcccactgccctggtccctacacctatcatgagggccctggataaagtcttccttactgtgctgtagaaagtgtctttgtatatacattttttctttaacaaatctgcctttagtatttcctaattgatcaaggaacctcaaacattgaatgaaagtgaggttttccattttactaacatatgtgtatctgtgaatttcaatttcaatgtgtggtgtccagaagtcctgagcaccaacagttgtgcttctctgtccaattatttgattctgaaacctgggagtcatcccaacacaggtaaatatgtgattttttttttttttttggtttttactgtttagtgactgacttatttcacttacactgaagcttcatgaacacaatgatgaaaagtagagagaggacttgtttgaaaatgccagatttatggtagactttaccacccacgtgtgtctggaggtcttcttaaggttccaagaacaggacatttttcccacaacaagacaaggatgagaacctctgagctgtgaggatggaggacaggcagggccatgtgtggacaaggacgggctgctgctatgtccagggtgttctctactagcaaccactccatctccttcctcactctgtggtatttgtcagatgggaaacatgcctagaatttatctttgacatctggatggaagcccaggcaagaggcatttgacagcttattcgtgagcctacttctttaaggaatgccagatcccttgctctccttcctagttcttaacccctttaactcccttcccctcctgcacccatccactgcctatttacagccacgtccccacacccttcactgtagcaccattttcttgggctcctgggaaacacaacagctttggtttaactcacagctcaggcacactcacgggtcctttcagaggctctcaacttccctcctacagtccctcagctcctcctggggtcctaacttggccatctctatcctctctgctgagcctggccatacacaatccatcccatctggatatgtgtatagcagtgggttaactcagcaggcatgaatagttcaaaccctccacgttcctaaaaaggtaaataactaaaaaataaaaacaaaagtaaacctttgttcatttatggctgtctgttacctcctgggatgagatctccgagtccatgaaatcttacacctgataaaagtgtctgcagatgtctgcagccttgggacatgctgtacgagtttaatcacagtgatttatagtgaacgcctgcttttgttttgctggggagggctgtggtctgagtattgtggtcagttacccaggtgttccatagtctatgattcattccccaaacacagccctggacaagaaaactcaggggcactcccctgggtgttgacacttcacacatgtcatcttacctcatagctggagcattacacatgtgcagaaggctccacagtgggaggacccctgagagcttgtgcctggattctcctgagcttcactctttgtgccttttttttccatgtattttcaattgtatcattttgctgtaataaactgttcctgtgaatacgagttttcatgagtcctgtgtttttactgagttttgagcctgagggtggcagatgcaacttctcaatgcagttgtatcagaagaaggatttcctagagagatcctaagtgacacatggctgaagtattgttcagaaaacataagtattcaggtgtggaatggcaaaatctgatacttgggtggcaacagaattacccggtctgagacagcagctgaactgaagtagatgtctggagataaatgcaatttagaaacgataactcatactcccaaagagctggctcaatcgatacataaggaaaaataaaatgataaaaaataacctaaatatgcaattactatttgtgagaacatccgggagagtgattgcagggaaagtggcctgcgccgacctcagattttggccaatgtcatttctggctgatgggctccagggcactacctaagggagcaattatgctgcaatgacagacagaagcttcgcaagctctctccacccagaaggtggttcaggtggtgaagtgcggggactggtgagccacaaaacactgaaatgagggaggaaagtgagaaagtgaaaggcttttgagctttttctttagcttaataatttttgttaattattaacaaaataattggacaatgactaatgtaaaagtggaccgtgttttgagtcccttagaacggaggagaatgcagcggtcaatgttgtgcccagagattactatagaacaatagtaggtggttgaacatgctccaaacacaaagcctcttgttgctgatgggacagctgccctcgtctactgcacaacagcttctccaaagtgtgtttaccctgagcattgagattgcctttctcttgtaagtgaaaaaatcggaaaactccaaataaaggaggagttgtaacgctctatgtgtaagaaattctaatgtggatttatgataactgggatatgcatccacttatctttttatctgtaaaaattcatgggtgaaagtgcaattttgttacatggatatattgttcagtgatgaagtctgggctttgaggagagtcatcatctggatggtgtatattgtacccagcaagtaatttctcatcccacacaccactcccaccatccaaaccttccaagtttccaatatttattatgccacactctatattcatgtgtgcacattatttagttcttacttatatatgacatgtggtattcaactttattcttctgagttatttaacttaagatagcagcctacagtttcatccatgatactgtaaaatacataatttcattttttattattgagtagtaattaaatgtgtgtatatatattcacaaatatatataatgtatttgtgagggtgtgtatgtgtgtatatatgtgcatatatacatatacaacatgttttctttatccaatcattcattaaaaacacttagtttggtaccgcatatgtgctattgtgaataaggcaacagcaaacataaatgcagcatctatcgaatataaaattcatttttctttgagtcgataccaagtagtggatttgccgaattaaatattagttccatttaataagagaacttaccaacatctgtttcttgtttagtttagtttttatttttgactttttaataatagttattctgactggtttaatatggcttctcgttttgacttcaaattgcatttctgtgatgattaatgacattgattgttttttcatatcctggttgatgatttttatggcctcttttgaaaaataaatgtctgatatttgctcactttttaatgtggctatttgtgctttttgtgttgctttagtttcttgtagattccaaatattagctctttgtcagatgtagtgtttaaaaatatttttcgtcattctgtaggttttctgttaactttgttgattatttattttgctgatcagatgttttgcttcttatttgtattaagtccaaataacctattttggtttagttgtgtttacttttaaggtcatagtcatgaattctttgcctagcacaatgttcagaaaaacacttcctaggatttcatttatgactttcagactctcaggcctcccagtcaagtcttttatccatattggtgtaatgtttgtatgtagtgagacatatgggtccagttttattcttctgcaaatagctgttcagtttttcctgcacaatttattgaacaaggtgacattttcccagggtatgctttttgtctggttggtcacagtcagttggctgcaggcacatgactgtatttctggaatgtctattctgttccaagtatctatggttctctggttgattgttacttgtgtataaaaatcctactggcttttgtatgcttttttatcctttattctaaaacttcactgaattaattcatcaattctaggagtacttctaaagaatattagtttttaagtacaaaatcatattgtcagcaaacacacacaaaaaactgacttcttcttttccaatttgggtgcctttatttctttctggtgtcttatttctctggctaggatttcaagttctatattgattaagagtggtgaaagtgggcatccttgacgtgttctgagtcttaggaggaatactttcaacatattgctactcagtataatgttgtatgtgagtttgtcatatatgatttttattaatttgaggtatgttttccttctattctaattttgttgagggttttttatcataaagaaatcctaaatgttatcaaatttttttttctggacctattgacatgattatatgttttttgtttatgtggtggatcacagttattgagacatgaacgttgaactatccttgcatccctgaaatgaaacttagcagattgtagcatattatctttttgatatgtagttggacttgattttcttgtgtcttgttgaggatttttccatctatagtcatcagtgatattgatctgtagtattcatttttgggtccttgcatggatgtggtatcaggctattagtggctttgtagaatgagttagggagaaaaaccctctcctcgtttttttggaaaaagtttcagtagaattactagcagatctttttgtatattggacagaattcaccttttaaaataatatgctttacggctttgatgttgagatttttttaaattactgcttcgatgtcactaatttttgttggtcctttcaggatttttatttcttcctatttcaatcttgggagattatatatttccagacatttatctattcaccctaaattttctagtttatgagcctggagatgttcatagtagactatgttgatcattatatttctatggcatcagttgtaatcttttcttttttgtttctcattctgcttatttaaattgtctgtctactttacttgcctaatctagctagtggtctgtaagttttgtttatcatctcaaaaacccaatgttttattgtattggttctttgtatttcttggttcttaactttatctagttctgctctggtctttgttatttgttttcttctgctgtgtgtttggtttgatgttgtttttctagttatttgatacgtaatgttaggttgttaatttgtgatctttctttttgatgtggtcatttaacattataatcttatcccttagcacagcttttgctgtaaaccagaggttttggtatgctgtttctctatttttattcatttcacaacatgttacaatctttttaaattttatcattgacccaaagttcattcagttgcaggttgttaaattttcattgtgtgtgtagtcttgaatattcttctagggtttgatttctggctttatattactgtggtctgagaagatatttcatttttaaaaagttattgagtcttttatttctggcatagtatataatccatgtttgaaaatattccttgctaatgggaataatgtatattctgcagtcattaggttaaatgttctgttaatgtctgttaggttcatttggtctagagtccaatttaagtctagtgtttctttgttgattttctgtcttaatgttttgcctagtattatcatttgggcattgaaatccatcacaattgtattgttacctgtgttcttccttaggtctaatagtatttgttttatgaacatgggttttctggtgcagagtgcatatatatttagaattgtcatttttaatcaatcattttatcattatataatgactttctttgtctttacttactggtgtttatttaaagtttttttatatgatatagatagtcttgcttgcttttggtttccaattgcatgaaatatattttttcaccctcttgatcttgaatctacgtatttttaccaattaagtgagtttcctgtcagcagcataaatttcaaaactcttttttattctttccactaatctatatattttaggtgaagaatttaactcatttatattcaaacttaatacagatatgtgaggtctggcttctgttgtcatgttaattattaactagtggctttgtagtcttaattgtgtaatagttttatgagtgaattttataattttgtgttgtttatgatggtgagtactgacctattgcttccatgtctaggtctcccttgagcatttcttgtaggtgcggtctggtgtaaataaatgtccttggcattttcttaccttagaaatactttatttctccttcatttatgaagcttagtttagaaggatacaaaattaatttctgacatagaattttttctttttttttctttaagtagtctgaaattgggagtccaatctcttctatcttataactttatgctgagaagtacactgtcagcatgatagaatttcagataaattattagacacttttctattgtgaattttaggatttttttcttcctatttactttagatagtctgaggactatagatcttggtaatgtctgtcttccagtgtcttctcatgtagttttctgaaccacttttatctgcatatgcaaatatctagcaagactagtgatgttttcctcaattacttcatcaaattggtcctctaaaactttttactaattttctccctcaggaatatccatgattattggctaagttgttttacataatcctatacttcccaatgattttgttcatttttttgttattttcatctgactgggttaatgcgaaatatctgtctcttaggtttgatgttctttcttctttttagtgtagcccattgtgaaagttttaaactattttttgtaattaaaattcaatgaagtctttactccctgaagctttatttttaaaatattaaagtcttaagtaaatcttgaattgttctgatttttttttttttttttttgacacggagtctcatactgtcacccaggctggagtgcagtggcgcgatcttggctcactgcaacctctgcctcccgggttcatgcaattctccttccttagcgtcccgagtagctgggactacaggcacacaccatcacacccagctaattttttgtatattgagtagagacagggtttcactatgttggccagactggtctccaactcctgacctcgtgatctccgctccttggcctcccgaagtgctgggattacaggcataagccaccacgcccggcctgagttattctgatttatttgtgttggttctcaaatttcttttggatttaattgagattccttgaggtcaacattttgaattatttatctgacatttcaaatatatcatgttgtgtaaattctatttctggagagttaaggtgatatccggcgtcttgtaattgtgttttttcatacttccacaattgcttacctgcttgcttttcattggctaaactatctcttactgtttttgaattcattttgattttcatgaaaatttcattccctttagaatgtgaatataacgtatattatgtgggtcttttgatttggttcttggtttactcattggcaaaggctctgtaagagtttcttgtatatagatagtcattatttagtggctttctgaaactatggttgtagtaataatctactgggcctgtgagcaggctcactgcctcctgcaggccctaaatagtggaggcctcagaaaccatttcttatttgcaatgcacttgtttcagcacattttatattgggatgttaagttcacctacacattagtatgtgtccttacagatttgagctgactgtggtagaagcagatgagtacatgcttgatatctgtacacagggagaagctctctgttgcctcaggcgatggactggtctatgaagtgcacagtgacttgagttctctgatcagcccctgagtgggggatgaagctggacagagatgagccaccgagcctggcaagcaaaagcgccagccttgatggaaatggcgagctgaggggcatctactcagtgtggtttcttttgttattaagagctttagtgtggtggctttttcaaattcccgttgtagtagtaacatactgagcatgtgagcaggcccgcggtcttttgcggggttggaatcacagaagtattgagaagctaatctcattttcaactgctgtacactggtggtattgagtttgtatgaggtcatgcagtttgaacgtcaggccagtaggtggtgctcgcaggtaagagccggctatggtggcagcagaagggtttatgctttaccggtggttaaagtgggaaatttgtcatgttccagatcttagagaaaagacttttagctatttctcattcattataatgctgcctgaaagtctctcgaacataactttttattatgtcgagatgtgttctttctatacccattttttacattttttttcctgaaaggatgttgagtttcatcaaatgatttttcagcatcaattgaaaaaaactatatgtcgattaaagatctaaatgtaaaatctaaaactataaaaactctggataataacctaggaaatacaatttaggacattagaactggcaaagacattatgaagaaaatgcaattttaacaaaatcaaaaaatggcaaatgagccctaagtaaactaaagagcttctgcatagcaaaagatactatcaacagagcaaacaggcaacctaaagaatggaaaataaaatatttgcaatctatacatctgacagggtctaatatttatagcatacatgcaattaaacaaacatacaagaaaaaaagtgcccaaaggacatgaaaagacacttataaaaagacctacatgtggccaacaagcataggaaaaaatgctgactatcactatcattagagaaatacatattaaaaccacaatgaggtaccatctcacatcagtcagaatggctaatcttaaaaaaataataacagatgctgctaaggttgcaggaaaaagggaacatttatacacttctagtgcaagtataaattagttcaaccattgtggaaagcagtgccatgatccctccaataacctaaaacagaagtttcatttgacccaacaatcctacaactggacatatacctaaaggagtataaacgtataggttcattccagcactattcacaatagcatagacatggaatttacctaaatgcctgtcactggcataatggatagagaaaaatgtgatacatataaccatggaatactatgcagctaagaaaagaatgaaatcatgttctttgtaggaatatgatggaactggtagtcattactcttagaaaactaattcaggaacagaaaaccagatactatatgttctcacttattttttggagataaataatgagaaatattctctcagggcctgagtcttccatattcaaaaaaaaattctaaaataagtgttcaacaagttgccgacatgcctttaaatatcctgtttcatctggaccccttatatcactcaataaagccatgagaactatatttaaaagtgggattctatgataataaataacttaacagtaagaataggaaggatatggatggttttactaatttaatgggtacataactgtggtatacactatattcctatgaataagatattctgatttcagagctaagtattgtttcctacgttgtgtgtgtgacttggttgtgttggatttgagagtgtagcacgtgcacagaccatgtggatcagaaatccacatgtaaagatgacaatctatggatgtgaactacaagtatgtaagtacttcaagtaattctatttaatggagtttgaaataaaactcaaacttattcaaaacactaattacttggtatttattttgagatctatgagtttatcaagaaattcaaattcctatttctatttaaactcccgattcctactctcagtgggagggaaaactcacagccaatcacacatcacaggacaaatctgtaaacgaagagtcattcctctgaaggtcctgggtgttcaggactctcaggcaggtgctgaggaccctgtcttgggagtgcccagcagatctcagaaccctacatggggcctgctggacactcatgtgggataactagtcgccacttattcagagttaccagtgagctttgactgttccgaatgggaccagcatggagtcaaggtgcctgctcaatgtcagagacagcgatggtctcagaaacaatccaggtaatctctaggccaataaaatgtggattcacagtgagaagtacatcctggaggtggagcttgttcttcagtgggaagagtgctgtgcacagaaagcttagaaatggggaagggggtgcgtttcctcaggcaggattagggcttcgtccctcagcgtcccactcttgtatggctgatgtggcatctgtgttttctttctcatactagataaggctttgagctgtgaaataccctgcctcatgaatatgcaaataacctgagctcttctgaggtaaatataggtatattggtgccctgagagcatcactcaacaaccacatctgtcctctagagaaaaccctgtgagcacagctcctcaccatggactggacctggaggatcctcttcttggtggcagcagctacaagtaaggggcttcctagtctcaaagctgaggaacggatcctggttcagtcaaagaggattttattctctcctgtgttctctccacaggtgcccactcccaggtgcagctggtgcagtctggggctgaggtgaagaagcctggggcctcagtgaaggtctcctgcaaggcttctggatacaccttcaccagttatgatatcaactgggtgcgacaggccactggacaagggcttgagtggatgggatggatgaaccctaacagtggtaacacaggctatgcacagaagttccagggcagagtcaccatgaccaggaacacctccataagcacagcctacatggagctgagcagcctgagatctgaggacacggccgtgtattactgtgcgagaggcacagtgtgaaaaaccacatcctcagagagtcagaaaccctaggggagaaggcagctgtgctgggctgaggagatgacaggggttatcaggtttaaggcttttttgaaaatgggttatatatttgagaaaaaaataacaatagaaacaagtacacactctaattttaagagatatattcaattcaagaattgtagaagccgaattcacagtgggaaaggccacactcaataaagttgataaaaacattccaggaaggtgctactgtgaacaagttttcaaattagatgaataaataatttggagcaatgttatttgatcatgaggtgagacagtatgattcttaaaaagtggaaaaaattctttcaaatgtttctgccactctttatcataaaattaattttagagcagttttaggattacaatgaaattgcacagaaggcatgagaattcccatgactccctgccctacacaggcagagcctcctccactatgaccatccagcaccacagtcacaaatcagttacaatggaggaatctccaaggacatttgattctttcttttttggtgatgccctaatataacaagcctaatttatctcggaataccacaagttttgttcagtggatttctaggaatcatattagttagagggaaagttggtgaggctcttactatttgaactcattcttccaaaatccacaaaacatatattaatttaaagcttatcttacttctggtttacaggatccttcccagagagtaagatttttaagattttagaggcaggttcatgtctctaaaaggccagcaagttctggggaatcccataatgaacatcctttcatgggaattggagaccctggcaatgagagactccatgtataatgccctagagttggattagatgcactgtgagctcttgggtggtggttctgaaaaaggtggtctgtgcagtaaatgcaaacacatgcacgggacacaggaaggagcaaaagcttccctttacaaagtgtgtgggcacctggaagaaaccctcacaagggcacgtctcacccttaatgactgcacattagccaggggcatgatcatgattggtcttacaaggaaagagcaccactgaggtcataggttatgaaaatgtcatcctccagctgagaaattccatctgctggcatgtgcgtgtcaaccccgtggagggtgcactctgggagttgacgagatgcatagaaacctcctgtcatgaattatcgtctaccacacagtcagaatcaacctgtgctccagaaagagatacatgcctgtagaaataaacagagcttaaggattttcttacctgctgaatatagtgcccaaaaccacactttcaggaagattagctcagaaatgtttacaaagtgactgaagggcagtggcgggtgaggtgatgggacagcctcagggctgcacttgaggagggctccctctcccatgcaggcttttcctccaggagctgcatcaggaactcacagaggataagggagaattctgagaacatgctactgtggtactgcctagagaggaaggataaatgatgacaaatacatctctgagtaacatatgggcatttgttcatgaaaactgttttttctgaaagcttatgaaggtcttgaaatgcccctgattagctgaggacaaacatttaaaccctccttccacagggagttcaagcaggctggatgtgtcctgctatggatgatcttccccagccccttcctcttcccagctcatccctggctctctgtgtaaaaagttttcatcagtggaaggtggttgatgaagtgaggtcttcaatttcctcatcttctctgtggtcatgttattttcctcatctgaggtttaaaaactcacctgcatgcagcacatgacaggctaaaatctcttgtggacaaaacagtaacaaaggcacccaccatggttgagcacccgtgttgctgacagtgaccaccaagggtcaacgtcctcttcacaatcctgtgtcagagcagcacttgagtgatttcactagcaacttcccaggagaatcggcttaaaactacttgtcgcattttccatacagatataacacatctattttcctgaagaaatagaaagagctgaatgctgaatacactgtatgtctgctggttctgcaagtttgtgactatcactttctaatttctgatctgtgtggaccaccctccagatttttctcactggtgtgaccagccttctggatgtcaaatataattaactttttttcatataaaagtcaacacaagctcctcatggtttcggtgctcactgactactttaaacttacacaatatgtttctttattagttttgttttctggtatctctactcagcatcttcaacacacccatgttaagatgcttgtacaggtaattgttaattttaaatttactggtgtttagtttaattaaataggcaggcaatagcttagaatttagaaacaacaatgtaaaggaaaagtaaatgcaataaaatttaacataagaaaaccagcagctgaaaggaagggaaatctattctgccacctaagagggtatggtgacctcatagtacaacgaacttctgcagtttaatcgatactgctcacaagtgatagcattctctctctttatatcagagcattccctaacatgtacaataaagagtgagcagatacctccaaccagactgaccagtacctctccctgagtgcctcagctgatagagatagacatcacatttgtctaacaaaataattacaggctgtaaggatacccaccagtcatatggagataatttgaaaaacttagtcaaagcccaaaccttataggtagtcatttatacttagaagaattaactcttatcttcacatgtatttttcttaatcatagagaagctactagagtcactgtccaagttactgaatatcttattcctagaatgagacattgcacaatgtgttctgacatgagggaatgtagctatagttaaaggataggagatgtgatcacggaaacacgagtctgcgatccagcagttctttctccctcacatttgcccagaaacaaagaccccagcagaaaaatggaagggttgacttcagtctccaaagtatgatgtgagatatacgtcaggtatttcatgccattgttttatagtaggaaatttaatctctaaagaaggtcattttcaggataatactattctccaggatacttaaatgcccgaaaacagagagcgctacagtgcccagtgtccaggagctacctggcacgggtctggaaaccagtggacagaaatatcagtttctcttaccacatgtatgttggaaatttgaagaatgtttctttccttcttcgtaatcataggctgcaatggactggaggtcccagtacataagaggaaatgtgtctccagtaggaacacaattagtcccataaaataattgtgctcacactgtggtgcccacactgttggaccagctgactgagaaagtgttgtaagagctgcagtgtctactgattcctatcatatttggggctacattcgcagctaccaacggaaagagagagaagtaaaactggcttaggtagagtctatggatttgctttctttccttcaaactgaagtaaaaaaaaaaatcacatcaactaaaatggggacgatgatgaagtgatcaaggacaagagccactcagtgttttaggtgggttttaacctaaagtcccacaacatgtgagaacctgaactctggagtccggggcatctctggggagaatgtggaaggtgggcgggaggaaacagtgattcatgtctagggaaatttcagggctacctgctctgggggaaaggaaagcctgagcctctccgacagtgtcctctgttaaaattgttggctgacttattgtattcttcaacaccaatatttttttagtcctcttttaattttgtttttattattatactttaagttctagggtacatgtgcacaatgtgcaggttagttacatatgtatacatgtgccatgttggtgtgccgcacccattaactcgtcatttaacattaggtatatctcctaatgctatccctcccccctccccccacaccacaacagaccccagtgtgtgatgttccccttcctgtgtccatgtgttctcattgttcaattcccacctatgagtgagaacatgtggtgtttggttttttgtccttgcgatagtttgctgagaatgatggtttccagcttcatccatgtccctacaaaggacatgaactcatcattttttatggctgcataggattccatggtgcatatgtgccacattttcttaatccagtctatcattgttggacgtttggcttggttccaagtctttgctattgtgaatagtgacacaataaacatacatgtgcatgtgcctttatagcagcatgatttataatcctttgggtatatacccagtaatgggatggctgggtcaaatggtatttctagttctagatccctgaggaatcgccacactgtcttccacaatggttgaactaatttacagtcccaccaacagtgtaaaagtgttcctatttctccacatcctctccagcacctgttgtttcctgactttttaatgatcgccactgtaactggtgtgaggtggtatctcattgtggttttgatttgcatttctctgatggccagtgatgatgagcattttttcatgtgtctgttggctgcataaatgtcttcttttgagacgtgtctgttcatatccttcacccactttttgatggggttgtttgttttgttcttgtaaatttgtttgagttcattgtagattctggatattagccctttgtcagatgagtagattgcaaaaattttctcccattctgttggttgcctggtcactctgacgatagtttcttttgctgtgcaaaagctctttcgtttaattagatcccatttgtcaattctggcttttgttgccattgcttttgctgttttagacatgaagtccttgctcatgcctatgtcctgaatggtattgcctaggttttcttctagggtttttatggttttaggtctaacatttaagtctttaatccatcttgaattaattttcgtataaggtgtaaggaagagatccagtttcagctttcctcatatggctagccagtttttccagcaccatttattaaatagggaatcgtttccccatttcttgtttttgtcaggtttgtcaaagatcacatgcttgtagatatgcggcattatttctgagggctctgttctgttccattggtctatatctctgttttggtaccagtaccatgctgttttggttactgtaacctcgtagtatagtttgaagtcaggtagcgtgatgcctccagctttgttcttttggcttaggattgacttgacattgcaggctcttttttggttccatatgaactttaaagtagtttttcccaattctgtgaagaaagtcattggtagcttgatggggatgtcattgaatctataaattaccttgggcagtatggccattttcacaatgttgattcttcctacccatgagcatggaatgttcttccatttgtttgtatcatcttttatttcattgagcagtggtttgtagttctccttgaagaggtccttcacatcccttgtaagttggattcctaggtattttattctctttgaagcaattgtgaatgggagttcactcatgatttggctctctgtctgttattggtgtataagaatgcttgtgattttttcacattgattttgtatcccgagactttgctgaagttgcttatcagcttaaggagattttgggctgagacgatggggttttctagatacacaatcatgtcatctgcaaacagggacaatttgacttcctcttttcctagttgaataccctttatttccttctcctgcctgattgccctggccagaacttccaacactatgttgaataggagtggtgagagagggcatccctgtcttgtttcaattttcaaagggaattcttccagtttttgcccattcaatatgttattggctgtgggtttgtcatagatagctcttattattttgagatatgtcccatcaatacctaatttattgaagagtttttagtatgaagggttgctgaattttgtcaaaggccttttctgcatctatcgagataatcatatggtttttgtcgttggttctgtttatatgctggattatgtttattgatttgcatatgttgaaccagccttgcatcctagggatgaagcccacttgattatggtggataagctttttgatgtgctgctggatttggtttgccagtattctattgaggatttttgcatcgatgttcatcagggatattggtttaaaattctctttttttgttgtgtctctgccaggctttggtatcaggatgatgctggcctcataaaatgagttggggaggattccctctttttctattgattggaatagtttcagaaggaatgctaccagctcctccttgcacctctggtagaatttggctgtgaatccgtctggtcctggacttttttaggcaggaatttccttgtcctaataagcccaggagtgctacaggagaccagggcttatttcatccctcagcggcgaccgtaaaagacagccatcccgaaagcagccatttcagaggcctcccctcagggatgcattctctttctcagggatgttccttgctgagaaaaagaattcagtgatatttctcccatttgcttttgaaagaacagaaatatggctctgttccacctggctcaccagcagtcagagtttagggttatctcccttgttgcctgaacattgctgttattctgttcttttttcaaagtgcccagatttcatattgttcaaacctacatgctctacaaacaatttgtgcagttaacgcaatcatcacagggtcctgaggctacatacgtcctcctcagtttacaaagattatgggattaagagactaaagtaaagacaggcataggaaatcacaagggcattgattggggaagtgataagtgtccatgaaatcttcacaatttatgttcagagattgcagtaaagacaggcataagaaattataaaaggattaatttggggaactaataaatgtccatgaaatcttcacaatttatgttcttctgccatggcttcagccagtccctccgtttggggtccctgacttcccacaacagtttattaactttgtatgactaataatgtaaaatgttccccatatttttagcaatgttttacttatttgtgaaaggtgtgtttattaatttttcattttaaggtgtcacatttatctttcttgtttctgggatttcattctagtagatatagctgaatgcattttaacaattattgtaatcatctcacattttatatttggatttgcatatacattttattaagattttgattttgatataaaatattttcttacaattgtctcttttctatttttatgagataaaattaatgtatgcataattgcatacatcttcaatgtacagtttcagggtttctgacatatgtgcacacatttgtctccagcacctaagttaggatgaggagcaggtcagtctccacaacaagtgtcctcttcagtgcttccagtcagctctcacataaggatttttatttaatttcaagttttcattttcactaatcatcagagaaatgcaaatagaaaaacgttctggtttctgtcactacagttcaattttttcctgttttgggcatcacataaatggaatcaaatgttatagttcattttttgtaaggggctacttttgctatttgtgaggttcattcatgtatttgcatctaccaaggttttgtcatcatatatatacacacacacacttatatatgtactaatgcacatataggtatttcatatctcaatcagtccattacgttaataaatgacagtttattaagtaaatccattcattaagtgaataagtgacaaaaaatatatctattttcctgttgatggaatttagtttccaaaataaatatcgtaaacacatctgttataaatatctttgtacaagttcttctgcttatatctcccatttttattgataaaatatgtataaatataagtatgcattataacttttcagctttatggagctataactgacaaataaaattgtatgaatttaaggtacaccacttgaggtattgatatacatggggaaatattcatcgtgatcaaagtaattggcatgcctatcatctcagagaatatcattttatgcctttaatttattgtgagtctgtgatgaaaacacctaagatctactcttctggaaacagataagtttataatataatattcattagtatagttacattgctgtatgtttcatctccagaactccttcaacctgtgtatcagtccattctcaaactactttagagaactacctgagactgggaaatacatgaagagaagggagttagttcactcacagttctgcaggcttagcaggaacttatagggaggcatcaggaaaattacgatgattgtggaaagtgaaggggaagcaaggaccgtcttcacatgctggcaggggagagagagaaagagcaaggggagatgcgccacacttttaaacctcaagatcttgtgagaactctaacacaagaagagcaaaggggaaagccgcctccatgattcagtcactccccatcagacccctcctacaacacttgaggatgaaaatttgacatgagatttgggtggaaacgctgagccaaacagtatcattatacccggccactcacaaatctcatatccctctcacattgcaaaatataattatcccttctcaacagtctcccagtcttcactcaattcagcattaacacaaacttctacagtccaaagtctcctctgagacaaggtaagtttcttggatgtataaccctgtaaaataaaaaacaagttagttacttccaagctaatatgagatgaatgcactgggtaaatgttcccattctaaatgggagaaattggccactacaaatgggctacaggccccatggctagtccaaacactagcagggcagtcatcaaatcttaaagctccaaaaaaatttccttttactccatgtctcacatccaggacacgttgatataagaggtgatctcccaaggcctttggaagctccacccttgtggctctgcatgttagactccccatagctgctttcataggctggcattgagttgctatgtcttttccaggcacaccatacaagctgctggtggttctaccattctggggtctgaaggacagtggtcctcttctcacagatccactagacagtgcccaagtggggactctgtgtgtggaatccaacaccatattttccttctacactggcctagtagaggtactccattagagctcagcccctgcatgagacttctgcctggatatccaggcattatcatacatcatctgaaatctaggaggaggttcccaaacctcaactcttgcctcatgtgcaccagcaggctcaacaccacgtggaagcaaccaaagcttagggcttgcaccctctggagcaatggcctgagctggaccttgaccccttttagccatggctggcacaggacagacagggatgcaaggcgccatgtcccgaggctgcacagagcagtggcgtcctgggcttggacaaagaaaccatttttctctcctgggcttctggacctgtgatgggaggggctgccacaaagatctctgaaatgccctgcggacattttttcccaccggggtccttgttacttatgcaaatttctgcagccagtttgaatttctccccataaaatgaggttttttgtctaccacatggtcaggctacaatgttttatcaaacttttatgctccgcttcccttttaaacgtaagttccaatttcagaccatctctttatgaatgcacatggcttatgttttcagaaacagccaggtcaactcttcaatgctttggtgcttagaaatttcttctgccagatataccttaaattatgtctctgtagctcaacatttcacagatctctagggtagggggaaaatgccactagtctttttgctaaagcatagcaagtgtgaccttcactccagttcgcaataagttcttcaccttcatctgacaccacctcagactggacttcattgcccatatcactatcagcattttggtaaaacccattcaacgagcctctaggcagtttcaaacttttccacatcttcctgtcttcttgtgagcactccaagcttttccaacctctgcccattacccagttacaaagtcacttccacattttcaggtatcttaatagcagtatcccactcctggtgcaagttttctgtattagtccattttcacattgctataaagactacctcagactgggtaatttatgaagagaagagttttagttaactctcagctctgcccgctaaacgggaagcattattgggaggcatcaggacgaacaatgatggtggaaggtgaacgggaagcaagaaccttcttcacatggtggcaggagagagagagcaagtgagcggggaggtgccacacttttaaaccatcagatctcttgagaactttatcacgagaacagcgaagaggaagacaatcccatgaccaaatcactttatcttaggcccttccttcaacatgcagggtctacaatctggcatgagatttgagtcggaacacggagccaaaccatatcaaccttcataacgggaagtttttaccctttgaccaacaatacccaattttttcctcctcccagcccctgcgacctactattctactctgcttccaagagcttgaatattttatactttagattctatatataaatgagatcatgcagcttttgtctttctgtgtctggcttattccacttagcataatgttttctatttgttgcaaatataagaatttctttgtttttaaaggctgaataatactcagttttatgtaggtataagccacattttatctgttcattcgtagatggacattgactcgttttccttatctagactattatgaataatctcacaatggacatagatttgtcacactcagtttattttctctagatgtatgctcagaagtggggatgctctatgtccagttcactgagtaatcttcatgttgtttttcatactggctgtaataattcacattttgttccaaaccatacatggatacctttgtaccacatattcaggtctttgtgtaactcttgaatccatttttagctgatttctgtgtattgtgtgaggtgagttctatctatttcttctgcatatggatgcccgtttttcacaccactcgttgaagagactgtcctttctctactgtgtgtcttgggaacttgacaaagatcagtttattaggaagaaatgggttggtttccaggttgtgtttaatgttccattggattatatgtctgtttaaatgccagcattataccattttgatttatatagatttgattttgaaattatagattatgatatattcagctttgttatttatgcccaaaattactttggctatttgaagtcttttatatttttatataaattggagctttttaaaaacattttgtaaaatcatgccatggagattatttatttattttattggcatatagtagatatacctattttatgggaacatgtaatatattgatacatttataaatgtgtaaagattagtgtaagatttacatatctgtcacattaaaaatgtaccctttccttgtgctgagcacatttgaatgactcctttcgctattttaatgttgtgcattagattattattaactatagtgaccttactgatctatcaaacatttaggtcttatttctcctctataaatgtatatttgtatacagtaatcaacctctccttatctccttctctcttctatccatccaggattctggtaagcaacagtctattctatcttcaggcgatccagtattttagttttgatgtaaaataagaagatgcaatatttgtctctcttttattggcttatttatcttaacataatgacttccagttccattcatattatagcaaatgacagaatattgggtttcatggctgaataatatcctatcgcatacatagattacatttactctatccatttgtccacctacagacactgaggtgctttcacatctgggctattgtgaaagagctgcaaagaacatgggaggggacatgccttcatgaggtggtggtggttttatcttctttagaacatacccagaagaggatttgccaagtcataaggtatttctgtttttaatttattttggaatcttcatactactttgcacatagtggaaacacaaatggagtaaacattaaaaaagcagtttcggttttgatgtataatccagaaacaaataatgtttgaccatgattctcattaggagtctctaatggatctggtggaaatgcaggaagttttctaaccttgttcaggaaattatgagtttgcacctttttctttttgaggcttgaaattggcatgattcatgatgcatactgttgggaggtttcagaatgatatggcaaaaatcataatgaaaaggcaagacagagagagagggagagagagagagtcaggcctagaaagagaaaaaataattttctcaacaggagaaagtgctggatatctgtatcagtgttgagttttgctcatagacacatctgtaccgagtgaggaaccatgaagtcaagggaggggtctagaacttgttcaagtgaagcatcagcatatttctcacaggcaccaatttccaccacatcacaagggtgatgcatttttgaatgccattaaatatgagttcacagtcagtaatcatgtttccatgaaattcagttaaaataccaagggtgtgtccagatcactcatgcacaaatacacaaaatttgctttttcatgtgtggctatctagagacaaagtgcactgaggagacttcagcaggttacagagatttgcttaagtttggaaaaccatagaagagtgcctttaagtgaaggttggtatataaattaaataggtcaaaatcccctctatggagtagcgttccaattgtgtggaatttttaattccttattcagttgtaaaacataatccctaggactgactccgtggagttttactgctgtgttgacaaaaatatctaacaagcttccttccagtgtttcaagggaagtttttctctaaattttttccaatgtataaattttcctggctaaagatagtaaaaggctgttaaaaacacaactggaatggcagctttaatcttttgctgattgataggagtgagcataatacatgaatctctttgagtgttctgcctcatccaaatacaataggtcaaaggctagtactggaggtaagatttccaaatgtgtttttttccagctaccaagtcataggaaaataacagatacatccttgagacagaggaccataatgccacaatgctggtaggagtacatgtagacaagggagttcaagggtttcttaaaactgataattttaatgtaagaataccattcttttaaacttatgtggaagactgtgggaggttataacaatgccatattttagtatcagccctgcctcacagaatcattttataacagttcctttcatgagtgtgcttcactcggttcatgcaaaaacctggcagatcacaggctaaaaacagaaaatatagaagcttttaatcaactgaaagagctgtagcctttgtcaaggaattattggaagacacagagaacacagatagatgataaataaaatacattcatatcccgttaagtgtggaaattgaggaaagtttacataaatgtgtccaagtggcaaactgtttatttaatctggtaaccaatttttctataaattgtagagttgaaatgcaacaaatacatatttgaaatgatctggcacaaattaagcaaatatggtaactatgtattttcactcatttttatttaagatcagcggctcagcattgatatttttgataatatctgtgactcagcagctttaccttttgaggatatgatctggtatggcagttttcttagcttcaatgttacctctttttgcattgacttccacctttatatctgccaggaatctggggaaaaggagtgcctgtaaacgttccctaacttgcccattttggtgggttttccagaatgtgtgagatgctttttttttttttttcaaagcatcctgaacccatgcactgccctgaaacatgtttatttcctagtttaacaaattggcacttctaataaatgcaatctcttctgccatctgtgctgattttacatcagatagaggactgtgttctaaaggaaatcttatattagtaagagcaattttgtcattaacctagagttttattattgaggtgtgattcataacatataatattaggtagaggttctcagtggcagtgtctaaatctcttgggtgtacagtgtcttccccgttaacatgaagcatttacgagcacagtcatagtttccagccatgcttctccctgtctcacaatcaccacaaactaactatgaccacaactggaacttggtgagttattctttaataagttttaagtttgtctttaatctttatgcctctagattattatgtgagacataatctttatgcctctagattattgtgtaaagctatttcagaagaaagttaaaaagaacattttaactgactaaacaacacaggaaatcattaataaaatgcaaagtgtagatgtgagaggctccaggcctggataatgcaagagttcatgtatgcaggcagtttctttgcccaattatactgatacaaccagcatgtcagcttcatgccccatttgactcctattatgcaagcgcatggaaatgacatgctcaagggtcacacacagatatgaaaactggtgggagcaggagaggagacgactctgcacttctcctctgaaggaccaggaaagcctggacagaccatctccccagcctccatgactgcgcgacgtgcccacatggacactcatctctgacaagataagaagactccattgatgaggctgaacattttatgatttaaattactagagacttacattgaggtttcaataactaatttttataacccaaatttacttacccccatgttgttacctctttcttcagtgaaaaattgcttttgctgtaattgagttttaggaagattcccagtgttcacaactgagcttccaagagagtgttgagaacaaaaactgaatgagggcagagaaacccatctttactgtgttcaccactaaactcaagtggactcggcactgcctttgatcactgttgcttctctgcagagttcaggtttgtatttctcacaattctaacacagactctccctctcctcaaaggtttggcctccactggctgtaaggtcacactgttctgaatttcttgtctgaaccgttttatgagggtggtgatgagccatttaatggaaattttatatcatctcagcatgaatcctatgggcggtcacgaattattattctgattatggtaattgatttttctcagcatattcattactagtgatattcaaaaaccctttttatttaaatctttgatgcttcatttttgttgctatgacactttttcttctactgagtcttcccactagcattataacatgacctaatatccagggctcagttgttatataacaaccacatatgtcaaaagctatgcattcttttcacagcagacataattttctcttttctggagatgaacacacactggctgagctacccccactcacaagaacatatggaaaatcatgacatttttatttacttgactaataaattatgtcattctctcttcaaattctttatcccccagaatgccatgacaaactcttctgcatctgttcaaaccataaactcagaaaccacatggtgagtaaaagctcacttgattcgggatattgggtcaagctcttcccctccaatgtcccacagcattgggacctcagcccacctgtccaggttctatcaagagagtttagctccttcacagtgaaggaaacaattgagttaagagggaacctgcagaagatagacaatattgaaaaccattcatatgacaagggattactatcaagcatataaaataaactcaacccaactgcaaataataatgtggctaataatggaggaataacattaatacatatttctcaaaagaagaaaagaaaaagggcagatagatgatagatagataaatagatatattagtatgtatacatacatatatcgctagaaaacactaatattcaggaaaatgcacattcacaatgagatgtcttttcatcctttatctttgcttgagagtcagaaaatctaaataaataaataaataaaacaggagctggccaggattcatagaaagggaaactcttatagaccattggtggaaatggaaattagtgaagccatcatgggaaaaaatagaactaccatataattcacaatccaactgctgagtatgtatctatttaaatcattaaagtaaaaaactaatattgaagagatacatgtacacccatgtttattgcagcactatccaccatagctaacatatgaaatcaacatatgtgtccatcaacagatgaatggataaataaaatgtgttatatttacacaatggaatattgttcagtcttaaaaatgaaattctgctgttagaagcaacatggatggaactggacaccatcatgttgagtgaaacaagacagacacagaaaaataaatacagcattttctcagtgttatgtggaaattttaaaaagttgatcttctagaagtaaataatagagtagtggttatgagatgccgggaatgggaggagactgagagacaataagaggtttgttaacaaacgtataatttacaggcagataggagggatgtgctccagtgatctacagtgcagtagggtgactgctgttaacaatatagtgcacattttatgtttacaagtagccagaagacagaaatttgtatgttaccaacaaaaagaaatgttagtgtctaagctgatgaatttgttcattgttctgatttaatcataccacatggcacacatgcatagaaatatcacactgtaccccatacagttattatgtgctaactttaaaaaatcctttaattaaaacagattttatttgcatacattacaaatgcttcaacacagagccaggaataaataccatttttctttgaaatgtgaatttcctaacaacgtagttacattcatttgaaccaaaccgtgtatttgatcatggtaagaatagacaggcttatgcatagaatgatatattttaattttagacttctacttaataccataaattcaaataattttaaaacaactaagtaaaaactataaagttgaggaaatgtgtacgtggtgtgtgatgtgtgactttttccttgcgcaccactctgtccatggtggatgtgtggtgtgggtgtctgtgtctatttctgtttactctgcttgaggttctctgtgattctaggatctgtagttcagtgtctttcacaaaactgggaacgttcttagccattatttctttcaaatactgtctctgtatctacaatttctcctttcagatttaaaatgtacatatacaatactttttaatattaatgtttactttcttcactctcttttccttgcactttactctgtaaaatttctagtggtattttaagtgagtggtttcatttaaaaggtgagccagctctactgaagggtgtgcccaaagcttactcaatgtttatactgcattgcttttgatttcttatgcatttccatttgattttttcttagtattttcaactctcagttccctatctagtccttcattatgtatacagtttccttaatagatttttacatatgaattatagttactttatatatcttgtttaattagatagttctaagatccatatcatatagaagtctcattctgatcatttgtttattatgactttggtatttctcattaatatatgtaatctttgttgatagccagatattttaggttggacagttgatattggcttattacttcattttatgcattttctgcctgtatttgaccatactttatttttgccaggcctttaatgtggaaatgtttgaatcttctcagagctacatttgacgtttacttttgcagtagacgtcatagttgaagtctgttcttctgtgtccaccagagacttcagatcctccagtgataccttgtttttctttcctgcttggctttgtctcttcaccctgttccttcctccagagaatctctttcagctccttcaggtggattaagatattatattgaactgacaattgtgaaattggtggaaggcaatagaataaagggagattttctgacctttcatgggtctatatttctacgaaggcattgtgaccctgagtctgggtgtgacattgccggtgtttctgaacttctgccagatgagatgttggtctgtgtgttcttgctgttttccctgctgtggagtcctcttgttttccccagttgttccctcccacagctccaatgttctcttttggtgttatcagcttccagagttgatgacctgacctagagattaaggctctgattaaataagaaggaggggagatacttctcaatggaacttaggtgaagacctctttttccatctcagttcctaagggatggccccagtgcccctaagatcctggctttggtggcttgctcctgcagagtaatttcttagttctgcaatggggattaaggaggtgggtctgaatgcatttcagagtgtgggctctttttctctcccagacagacacattgggacaaaagatttttgtgactgtccccatttttgggaaaaaggtttcaaggtataggaaagctcttcagtatgtggtccctgagaaattcacgctacaacacatttaccacacttgacttcaccaattcagtatgtatgtatttttttctcttataatagcctacatttttatatgccagactctgcctcagttcaactcatacccatgcctttttactctctgcaagaacttgtctctccctaaatttcggatttgatgattatcttaaaacctccagtatttaaagtatattttaaaattggcaaaattccatctcctgtgtttatctgttatgttgatgctgtaaaacagtaagtaaaatatactcctcatctatgtacattttgaagctgagttgcaggttttttggtaagacccagagtcacagagaattcaaatattgttaagctgcttaatagaaaaacaaattatggtaaatgtgttcactggaatactacccatgatttataataaataaatgcctgacacacagaacagcagcaaaaccacacatgctcttattacagaaagtggcttctgaaaaccacaccgggcacgtacagctttgtcctggagttggtttagggggatgtcagagccagtgacgagaagcacagggccagatggcagcgttcactcatcccagacatgagctcctggatgcatacagagcccccccatgtgtgggtttacttccacttctgtaaaaggagaaaatactgactcctacagagcataatttacacattttttaaaaaatgtaatagggtgatcagggcaaagtgtttatcacagcacaatttcataagacagcatattttccaaataccatcattgtcagcaaacttctgcagagcaccgtcttcttatatgggtacagcctattcctccagcatcccactagagcttcttatatagtaggagacatgcaaatagggccctccctctactgatgaaaaccaacccaaccctgaccctgcaggtctcagagaggagccttagccctggactccaaggcctttccacttggtgatcagcactgagcacagaggactcaccatggaattggggctgagctgggttttccttgttgctattttagaaggtgattcatggaaaactaggaagattgagtgtgtgtggatatgagtgtgagaaacagtggatttgtgtggcagtttctgaccttggtgtctctttgtttgcaggtgtccagtgtgaggtgcagctggtggagtctgggggaggcttggtccagcctggggggtccctgagactctcctgtgcagcctctggattcacctttagtagctattggatgagctgggtccgccaggctccagggaaggggctggagtgggtggccaacataaagcaagatggaagtgagaaatactatgtggactctgtgaagggccgattcaccatctccagagacaacgccaagaactcactgtatctgcaaatgaacagcctgagagccgaggacacggctgtgtattactgtgcgagagacacagtgaggggaagtcagtgtgagcccagacacaaacctccctgcaggggtcccttgggaccaccagggggcgacagggcattgagcactgggctgtctccagggcaggtgcaggtgctgctgagggctggcttcctgtcgcggtctggggctgcctcgtcgtcaaatttccccaggaacttctccagatttacaattctgtactgacatttcatgtctctaaatgcaatactttttttgtcctttttgtttctttgtttttttgcaacaggagtacatatcctcagctccacagaagccagggtgtcactttgggggcagaaataatcgtttcgtggtcaacaggatgagagtcctgaggaatcccagggaaacctggagagtgttttccaattagactcagggcagagacctccatgggaatttctgattagaacgggctttgagctctgatgggagccaagagacaggctcacccagggtcggggtccttaaagcctgatggttttcacagctatcccccctcgtcttgtaaactcagactgattcagttgaccctttttctgctaatccattttgcttctctgtaggtttgattctcacagttcgctttcttcttctcttccctgagaacaaacgatgtgttttctgttttcagggaaaatcccagggctcaggtctgcaggacctgggtaggctgaggagactttctcactcaccattgtctggacactcctgttgtcttctgtgcatggaggcatttgggaaatgaagtggacattagtcattaagggaataatactagttttctccaattggatattgatgtagagctgaacttgtgcttctcacactgtcacagagtttggaccctcacctataactttgaggagagttgatgatggatagtccattgtgggtgagctctgggtaacagtaattgtagggtctggctaggcagcctaaggtcaatacttctggacctcaggaaagacaggctggaattcctgggaagacctgcatctgccatccaccgtggagtcccatcatcttctgttatgctgtgattgaatcagccccacctagtttatctagaacactcttcatgacttaggaaaacataatggcaagctctcctaacacctgtatcatgccatgggagcaacacctaagctagtgtgtgattgagtagatgagactgtgatctagtcaagacgacaggtaaaattgattgttgtcattatgatattttatatttggcaatataatcatgctcatattataaatacttttgctacattttttgagtgtgtcagaggctttggaactggaacaacttcatcttgaataggggctaggaaaaataagaccgagacctgctgggctggattcctagtaagttgatgcagtaagttagtcacaggatgagataggaggtctgcacaagatccaggtcataaaggccttgcagataaatcttacagtaaagaagctgggcaaagccctccaaaaccgagacagtggctaaaatgacctcagtttgtcctcactgttcattatactctaattataatgcattaacatgctaaaaaacactcccttccagcccccaagacagtttacagttgtcaaggcaacatcatgaagtttccttgtgtggtttaaaaaggaggggaggaacactcaacttcaggaattgcctggaggactcatgaataatccatccattgtttaacatataatcaagaaataaccataaaatggacaaccagcagcccatactgctgctccacctctggtgtagccagtctcattattttacttgcataagaaacttgttttcattttaatctgtggattttccccaaattgggacccctttctcctaatatttgtgctattattcgtgttctgagcagaaaaccccaagatggaatgaagtttccctacatttttataagaagtacattcacccctttgagcgaaaatgcacagggagtggaatgaggctgggaagctaatggcgtatgatggaagcttgtccctgactggaggagagagggagggaggattgggaggaaggttcctatatttttgtgctatgcaaggaagctgcaaaagataactgagtctcgtgtaagtcagtgctacctctcaggggatccctgtgactccaagaaagggctcttcttaggaatcactgtggagtcagtcctttcattagagtagaccacaggacatgggcctcagcacacgccatgccacagatgtcagaaagcagctgctgggaacctgatccacctgcattttgctgcctgtaggaggagggagggaggtgcattctcagggtcagcacactgtttgtgaatttttatagagaacccctgcttttgctgtatttttattggaaaatatatgaacaagtgtgcacctgcaaacaactgtaattttcacatttccttcagttgcattatttcttaatcctgaatgacgtcctgacacagagttgagtttttcacaggcattgttcgaaggatcgagatgatggcattttccacattcactggtttttctccatgtggcagagaccttgagtagagcacatctggcccttatccacactatctcttgtgtcccctgggaaagagcagagatttgcctgactgcagaatctggggtaggagtctgcacacctctgagcctgcagagaagctcagcgaagttttgtggagtcagagagctttccgtgtggggaacctctagcttcctcactctcggagattaatggtcagctgtacttgaggggttaagaattagagcaccttgggagcctgtctcatcacagttccattatgtaacttaccaccattagactgcgggtaataactcaatcttgatttttctgacccgattttttcatcttattcattactaattttgtttatggaaaatgttatgtttagtttatgattaaaacctcagaactttctgaacttatcaggaataatacaaatgtgtccagtttgggggaaatgtaaatgaatgtccatgcagtttgggtgtgtgtgtgtgcgtgtgtgtgtgcatgtgtgtttgtttgtgtgtgtgtggatatgtcagtcacttacaccacaatgaacatgattgctgaattacatagtcaaactaaaattagatttgctgaaaattgcctgcagcgatgtctgtgaagctgaccctgtcactttgctgtgaagaaactcagtgtacaggcgaggttgcacgggagagctaaaagcttctgcacacaggacaggctgagctcctgaactggagccaggcacaggactgagcacctgagaaacagaacccccagccctcctttatctgggctggatgggcaccagaggacccgcaggagatgctcagaactcacacaagacagagcctcagtgaggagcagaggcagcgaggaaccagtccagggagccctgtgaccgccacctcgggttgtcttattttgcttaacagcatccaaacctcaggagaccatttattacgttatttagacttccatgccctttctgtcccgaagtaaaacaaacataaatatgactctgcagttagctctttgaacctgggttatttttctgagaatgtcatcttcgtcatcaacatcatggtcatcatgtcaaaatcaacaggcaaatccagtcaccgtgaagacagtttcatggcatgattcatacacaatcattccattccacagagaatctctttcagattcttaaggtggattaaagtgttatatttaattgccaattgtgaaattggtggaagacattatactaaaggaattgtctctgacctctcatggggtcatatttccagaaaatcattgtgatcctgagtgtgagctgactttccaagtgttcccaaccctcctccagatgagatgctggtctgtgtgttcttgctgcttcccctggggcagattcctcttgttttccccagttgttccctcccacagctctcataatctctgttggtgtccccaacttccagatctgctgccatgacctgcagattaaagctctgattccgtaagaaagtgaggggagctgcttctcaatagagctttgatgggaacctctgttcatacctcaattcttaaggggctgcaccagtgccctaggatgctgattttcatggcttgctcctgcagggtaatatcttagttttgtagtggggatcagagaactgggtctggatgcatttcagaagtgtgagctcattctctcccagacagatactatgggaaaggaagatgttttgcaggggtaaatgattcaagagattagggcaactctccagtatgaggtcccttagaatttctcactataacatgcctaacacactcgacttcaagcaatccagtgtatatttgttcttcatcttgtaatagcctacattttatatgacagcctctgcctcagggaatttcatactctggcttcattactctctacaggaacttgcctctccctagatttcaaatattttgtttgttttcaaccctcaattatctgaagcattaagtaaaatttgcaaacttccatcttttctgtttatctgttattgttgatactattgttgtaagaatgaatatatgggcccggcgcggtggctcatgcctgtaatcccagcactttgtgaggccgaggtgggtggatcacgaggtcaggagatcaagaccatcttggctaacacggtgaaaccccgtctctactaaaaatacaaaaaattagccaggtgtggtggtgcgcaccagtagtcccagctacttgggaggctgaggcaggagaatggcgtgaacccgggaggtggagcttgtagtgagctgagatcgcgccactgcactccagcctgggtgacagagtgagactctgtctctaaaaataaataaataaataaataaataaataaataaatatgtgtgtatatatatatatatttctcatctatgtacatttttaagcttagcagcatattttttagtgagatccagaataataaaagaatccaaacatttttcagctgcctaatagagaaacaaattctggtaaattttttcactggaatactactcaacatttataataaatatatttctggtacacagaacagcaaggaaaagtatctaagtatttatgctgagtaaaataagccagacaaataagaatatgtactatattactccatttatgtaatttatttcaaatgaaaaaaatctaaagtaatatacaaaagatgagtagttacctgggaaaagggtagaataaaggaaggggaaatgtggaaacatacagaagaacaagagaaaatgttgaggggaactcacttgtccacctcagtaatgatgacgcttacatcatgttttcaattctacactttaaatacgtgaagtgtattatctgccaattaacactcacaaaatttattgcaagcaaacaaatgaaaaattagaccaaaagcggtggtataaagatacaaaatatccattaaaagtcagaaatatatgagaatttgcctcctgaaccctagttctctccttatttttaggtgaatgctagagtgccacaaaaatcactcaagttctcaatacaggaagtgggttccacaaagcacactaggcatgtccaattcttacctggagttggttcagggagtaactggggccactgatgtggagcacaggccaagctaccagggctcattcatctcagacatgagacacacacagcccctcctccgtgtgtgggtttatttcacatctgtaaatggagaaaccattgacttctacagaacataatttacacaaatatgtaaaaatataatagtgcaaaatgtttatcacaacacattttcataataagacagtgtattttccaaataccataattgtcacccaattcctgcggggccctgtcattttatctggggtctgccatctcctcagggttcccaccccagagctctctgtgtagcaggagacacgcaaatagggccctccccatgctgatgaaaaccagctaaaccctgaccctgcagctctggcagaggagcctcagccccgggattcccaggtgtttctgcttggtcaacactgaacatacaggattcaccatggagttggggctgaggtgggttttccttgctgctattttaaaaggtgatttatggagaactagagctattgagtgtgaatggacataagtgagcgaaacagtggatatgtgtggcagtttcttaccaggatgtctctgtgtttgcaggtgtccagtgtgagatgcagctggtagagtctggagcaaacttgacaaagcctgggtgtccctgagactctcctgtgcagcctctggattcaccttcagtagccatagcacgcactgggtcccccaggctccagggaagggtctgcagtgggtcccagttattagtggtagtggtagtaccatgtactacgcagactctgtgaagggccgattcaccatttccagagacaataccaaaaactcactgtatctgcaaatgaacagactgagggcagaggatgcagctgcatatgactctgtgagagatacggtaaggagaagtcagtgtgagcccagacacaaacctcccttcagggtacctgggacaaccagggaaagcctgggacactgtgcactgtgctgaccccaggggcaagtgcaggtgctacaagggctgggtttcctgtcttgatctggggctgccttgttaccaaattacccgagggaacttctctagatttgcaattctgtactaacatttgatgtctgtgactgctaaacttccctcacatatttgttttttgtttgtttgttttgttttgttttttgtaacaggaagacccatcctcacccctacagaagcccgagtgtcaccttgggggcagaaatgaccctgccttggtcacattgatcagtgtcctgaggaagcccagtggaacctggggagtgttttccagtcaggctcagggcagagacctccgtggaaatctctgattagaataggtttgggattcagacttgggccaagagggagtctcacccatgggagggtccttaaatcctgacagtttttacagctgttctccctcctctggcaaaactgtgcacatctgactcagaactgatccagctggcccttacttgctaatcaatttttcttctctctacacttcattctcatagttcccttttcttcccttcccagaaaacagagagtgtgttttctgtggtctaaatctcagggctcaggcctgttacctggaactcaggtgtggcccaggctgtggctcctgtgagacctggggaggctgaggggactttcccactcaccattgcctggacccgcctgctgtcttctgtgcatggaggcatttgggaaatgaagtggacattagtcactgaggggataatggtagctttctcaaatgagatactgatgtagagctgatcttctgtttctcacactgtcacagaatttcctccttcatctgtgactttggggaaagctaaggatggacactctattgtgctgtgagctctgggtgacagcaattggagggtctggctaggcaaatcctacagggtttcaggtcaatggagttggaatttctgggaagacctacactgtcatcctccatggagtcccatcatcatctcttatgctctgatggaatcagccccacctaggttatctaggacaatcttcctgacttaggaaaaaaatgatggcaggctttactaacacttatattataggatcagtacaacacctaggttagtgtgtaactgaataaatgactctatgagtcaaggggacacataaaattgattgttgccatgacatttatttatttatttatttatttatttattggaaaccagagttttattgttactgaaatgagtctcgccaagcattcaagaatgggattttttaaggatagcttggtgggttgggggcagccagtgagtcatgagtactgattgatcaggtcagagataaaatcatagggagctgaaggtgtcttgtgctgagtcagttcctaggagggggccacaagatcggatgagccagtttattgatctgggtgatgccagctgatccatcaagtgcagagtctgtaaaatatctaaagcattgatcttaggctttataatagtcattttatccccaggagcaaactaggaagggttagaatttgtagccaccagctgcatgactcttaaaacataatttctaatattttggctaattcgttagtcccccaaaggcagtctagtccccaggacgaaggagatttgttttgggaaagggcagttattgtctctgttttaaactataaactaaactaagttcctcccaatgttaggtaagcctacacccaggaatgcacaaggacaacctggaggtttgaggcaagatggagcaggttaggtcacagctctttcactgtttcagttgcagctttgcagtggtggcttcaattcctccctttgagttttgaccttatcgacttgttttgtttctctttaagtgatggttttataaccatctatgaaactctaacaggtgctctcacatgcagatttctgattaaaaactctgaagatggttacaatagtatagagataaaactatcaaatagaagactatcttttttgacttttcacttaaaatgttgcccaagaaaacttttcttttgagctatttatagctttcaacaattgagtatagtcctgtacataaaatttggagaatatttgtttctctctgtccactttctccagaatttggaaactctttgtgaatatccttaacttatggcaatatgatttttcataagtgcagtaagattttttttttttttgcaacaggacacaattggagaaactggttattttaccaaggctttgactgtaatggcgtgcttcaccttaagcaatcgaacttgacttatacagccaataagagccccttgggaaaactggcctgtaccttgtccacacagtctttgtacaaggttcctgaccagtggtaagtaaagaatgtcactttctaacaggcccaagaaccccatgttttcctgggaccccagaggaaaaataatttaccagacttacaggtatttgatggtaaaaactcatggctgggcttggctttaaaaaagtcttatctgagattccttatggaacagagttccaccaaagccaattttaaaagcctgtgtaaacaataattatttgtattgtgctttatgcaaataataaggccatgaataataagactaaagtttattttgcaaataaatcagtcctatcttgatttgttttaaataaaaatggggacaagagagaaaaaaattatgctttaaaaatatagtacacctgttgtttgctgttcttgtttttttttcttcagcagtttggacgaaattctaaattatttgtaggctacaaagccataaactaatgcgttcaaatctttacttttaaaactgcgaattgcactccttaccccagttctcattatgtactttatagtatgttgttccctccaatgtggtgctggaattatagatgacagcactgacagctttgccatgcaagccttggaaccccacgcaggcctgcgtgagtacactcagacagttgcaatgaggttccagtcctcttatcttgaggtcagcacctacccctactacgccccaggtcatcaataaaaagttgtaacagtcttggcccttcttacatcttcattatccaacaccatgatttttgttttttgccaaaacaattgccaaatatagtcataatcataggataaataattttgctgaaatatatgtgttattattggtcttttgagatggaaagtccaagactggattatgctttcatgcatttttcataagaagtacttccactcttttgacaggaaacgcacagggggtgacatgtggctgcagaagctgatggcatatggtagaaatctgtccctgagtaaaggagagatggacggaggattgggtgaaacattcttaggtttctgtgctgtgcaaggaaggtgtaaaacatatttgagtctactacaagtcaacattacccaagggggaacccctgtgactccagcaatgactctgcctcagaatcactaaagagtccttcctttcattagagtggaccacaggatctgggccatagcatagacgtcagaaagcagcagcttgacacctgatccatgtgcattttcctgcctttaaagggagggagagaggtgtattctcagggtcaacacactctttgttgatttttacacagaacactggcatttactttatttcattgaaagatatatgaacagatgtgtgtctgcaaatgattgtaattttcacatttattccaattgcataatttttaaattctgcttgatgtcctggcacacagttgtgttttctataggtatttttcaataaatcaagaaaatacattttccactttcactggcttttctccatgtgcagaggccttgagtagatcatgtctgactattagtctgttttcatgctgctgataaagacataccagagacttggaagtttacaatagaaagagttttattggacttacacttccacatgactggaaaggcctcacaatcatggtggaaggtgaaaggcacatctgacatggtggcagacaagagaagagagcttgtgcagggatctccctttttacaatcatcagatctcgtgaaactcatgcagtattacatgaacagtgctggagaaacccgcagccataattcaatgacctaccactgggtccctaccatgacactgggaattatgggagttaaattcaagatgtgatttgagtggggacacagccaaaccatattattttgccccatggcccctcccaaatctcatgtcctcacattgcaaaaccaatcatgcctttcctacagtcccccagagtcaacttgtttcagcgttaactcaaaaatccacagtctaacatctcatctgagacaaggcaagtcccttccacctataaacctgtaaagtcaaaagcaagttacttcctagaaacaatgggggtactggcattggataaacacacccatccaaatgacagaaattgcccaaaacaaaggggccctctgcaagtccaaaatccagcagagcagtcaaatattaaagctccaaaatgatcccctatgactccatttcccaaatccaggtcatgctgatgcaacagatggtttcccttggtcttgggcagctccacccctgtggctttgcagggtacagcctccctcctggctgctttcacaggctggtgttgagtgaatgtgccttttccaggcacatggtgcaagctgtcagtggatctaccacactgggatctggaggatggcggccctcttctcacagctgcactatgcaataccccaatagggactctgtgttggagctctgaccccatatttacctttctcactggcctagcagcggttctccatgagggtcccactgctgcagcaaacttctgcctggacacccaggtgttttcatacatcttctgatacccaggcagaggttctcaaggaccagttcttgacttctgtgtactcactggctctacaccatgtggaagctgccaaggcttggggtttgcaccatctgaagccatggcctgagccctacattggcgtctttcagccatagctggagtggctggacacagggcaccaactccttaggctgcacacagcacgggcaccctgggcctggaccacaaaaccacttttgcctcttaggcctccaggcctgtgatgggaggggctgccgtgaagacttctgacattcacaggagacattttccccattgtcttgaggattaacatttggctcctcattacttatgcaaatttctgcagctggcttgaatttcacctcagaaaataagatttcttttctactgccttgccaggttgtaaattttctgaacttttatgctgtttcccctttaaaactgaatgcctttaatagcactcaagtgggctttttgaattctttgctgcttagaaatttcttctgccagacaccctaaatcatctctctcaagttcaaaattccacaatttgctccagttcccaatgagttcctcatctccatctgagaccacctcaagctagaccttattgttcatataactatcagcatttttggcaaagcaattcaacaagtctctaggaagttacaaactatcccatattttctggtctttttctgagccctgcaaactcttccaatctctgcccgttacccagttaaaaagtcacttccatatttttggttatcttttcagcaatgtctcactctactggtaccaatttactgtattagtctgttatcacgctggtcccaagactggacaattcataaaagaaaggtttattggacttacagttccacatggcttgggaggcctcacaattatggtggaaggtggaaatcaggtctcacatggtggcagactagagaagagtgcacatgaaggaaaactcccctttttaatccatcagatctcatgaaactcattcactatcacacgaatagctcaggagagacccatgcccataattcagtcacctcccatcaggttccttccatgacatgtgggaattgtggaagttacaattcaagatgaaatttgggtggggacacaaacaaaccatatcactgaccttctccgcatcatctctcatgaccccagagaaagagcagagatttgtctggggtaggagctgctcctgtggaacttagaggctgcagacgaccccagtgcagttttatggagtaagagagttttcccatgtctgggaacttctagcatacccactgccagagattgctggttggctgttattgaggggttcagaattagatcacctggtagcctatctcactgcagccccattgtgtaacttaccaccaatggccttcacgtgaggactcaatgttaactgttctgacctcattttcttacctcctttatttgtaagtttggttacagatttttttttactttaatttcagggatatgtgtgctgaatgcgcaggttttagtttcttattcaagccttataattgctcaactgatcaggaataatacaacatgtatgcagttttggggaaatataaatgaacatccatgcaaaattttttgtttggatatgtccgtcagttacacccctatgaacataatagccggtcctcaccagaaattgctggtcctcaccgatctcaaaagcatctagatcttcaacttcctagccttgagaattcagaaaacaatgtttatgatatttctgagccacccatttaatggagttctgttatagcagctgaaacagactaaaccatttaccaagtctcagtaagggcagtgaggatccaccatgcttgagagacaagcattactctctcatttgcagctcaggatgacagaagcatgatcatgagctgatctgaaaagaagatgtggctttctctccctcggatctcagttgaagccatggtgtcacatctctatggtggagactaaattccagtctgtgatgtaatggatgcctgcctcctcccaccctcacttacgagacagagtttccatgccatgcgttattgaccaagaaccaagaaggactccaattattctcacccctgctcacttgtatggcagaggttctggggatattcctgggagaggcataatgagactatttaagtccacgattcccaaacagttttatgctcttaaagcaggagtatcactttgagatatatgaataatttcatgtgcactaaggtggaggctgttatatttttataggtaaagatgcatggcataaagacagagatacagcactctggaaattgtgtgactatgtttgcagttgactgtgaataatttttaccatgaagttatcctaaaacacataatatatttttactgtaagtaattaatgaaaagctgacagctccacaagagcaatatccacttggtttagcagagagaatgagaaatagcataatttaagaataatcagttagacactgtgccatgtgcctgtattttcaactagtgaggatgctaatgtgggaagatcacccaagcccaggatttcaaggccagcctgcaagatattgctagacccattttcttaaaaaaaaaaaaataacattctgggtcatgacaaacctcaaaaactgaccctctaaataggaacaaatttaattgcattaaaatgtggatgaatttttgacacaaaacagtgacagcatgccagcaatgagtacagaataacatccagttgttatgttaagagatacagactccgaaaaagagacatcaggtagaggctgtcaaaggcctcactgcctaatgactgcttttccattgatactgtgtgtatatcccggaatgcacctgtgaatgaggacatcatgtctttcatagtgtgagagaaagagacattactacccatctgacaaaggattgatcagaatataccaggatctcagacaactctataggaaaaatatctagtaatccgaataaaaagcaggcgatatttatttcttaaaataagactttcaaattgcaaacaggcatataaaatgtgctgtgtaacactgatcatcagaacaatgcaaaacaaaactacagtgaaatatcatctcatctgattttaaaatgatttcatccgaaagccagacagaaacaaatgctgggaaggatatggagaaatgagaacactcataacctgttggtgggcacttaagtttataaaaccactatggagaacagtttagagtttcctccaaacctaatagtagtgttgtcatataatccagcaatcctgctgctggcatgtactccctcccacaaaaaaaaaatgttgtttgcactaccatgtttgttatagcactgttcgtaatagccaaaatttgaaagcatcctaactgcccattaacagatgatggataaataaaatgtggtacatatagcatatggattaatattatgccataaagagaatgagattttttcatttgcaacaacgtggatgaaactggagttcattatattaattgaaataatcccagaaccgaaagacaaacttcacatattctcatatatttgtggaagttaaaaattaagacaactgaactcgtggagatagagagtgaaaggatggtcaccagaggctgggaaggtctatggtagatggggattattggggatgctcaatggatgaaaaaagtggttagaaataacaaataatacatagtatttgataacacaacagactaagtataatccttaataacataattatagattgtaaaataactaaaagtgtataaatggaatgttggtaactcaaagaattaatacttgaaaggatgtaggaaccattcatcataatgtgagtattatgcagttcatgctatatcaaagtcaggtaccccataaatatacacatataccatttacccacaaaaattcaaaattaaagtatttatgtatctcatcttctgtatctatattacattaaacctaagaagatactggtttcttcacactaccaagatccacatagacatccgtagcttctttctttgcctgtccataatctgacattgaaaaatgaggaaacctttcctatcatatgacattaatttacttagtgcacaatttcaaaatacacaaattgtgttagaattattaaactgacccttgttgaaaatatgtttatcgactagaataccgtgcttatatgcagcttatttatattttacaatcacaacatcaaattatttccaaagatacttgtttctgatattcatgcccccctttctgcagtgaaattagtacaaacctgtttatcattgttagatatttttatacagctttcattttattctgtgtttcatgaccagctaaatacttttgaagttgtatgcatttaggttaacactttgtctcaaaaaattatgagttttcacaaattatttatgccatgtgtttatcattgaacaccatgaaaatagtttcattgtgattaaaaagtgtgtgtttcacctaatccacacaccttttccccagattcctggaaaaccacaaaggtttactggatctatatttttgtctttggcaaaatagcctggctattctcttagcttcttctgcaaagcatcaagattcaccttcactgactgcagcatttattgggccctgatggctggaggagaggggctggagtgggtggtagccatgagtgacccaagtggaagttctcagtggtgctctgctccagcacaaagaagattcacagttcctggggacaacacttaacatcacaatctcccttaaaattatctactggaaagctgaggagtaggcagtgtattactgtgagagacacagtgagggacatatgggtgagtctagacgcaaacttccctgcaggaagacaagaggggactttgtggtaaatggtgctcagaaccactaggggacactcagaaccactaggagacactcaggatagcagaaggtgctcaggatgccgcagggtgctcaaaacactaggggtgctcaagaccagcagggggcactcaggacaccaggagacacttaggacatcagggggcgctcaggacaccagggggcgctcagcacaagcaggggccacagaatgacaagggtgcattccagaccaccaggaaacactcaggaccaacaagagattctcagaaaccaccaggtgtaacaggaccacctaaaggcccacaagacaaccaggagacactcatggccactgaagaacattgaggacaccaggggttcagggccaacagggagtgctcggggccaccatggggctttcagtaaccacgagggaatcaatcactcaggacaccacggttttcttaggaggcagctccacatcaggtgcctggggaaggtgacgtttgcttttagacctagctgattcctgagctggtcaagcaaaagtcttcccacgatctctcactatttcttccttgtaacccatggtttctttcacatacaaatcattaacttaggataggaattcaattcaacttttaaccttgcatatttttagaataataatagcaatagtaattcaatgtgttttgataataagaaattgtgtatgcctaattcaaactctggttccacgcatgggtttttgtttcttgtgctgtgccagtcacactacagtcaatgcttttctaataataactcaacaatgtcacggtgttaagtttcctttcattttgtctgccatttgtggagatgaaacaccactttcacgggtcagttcctccactttggttgggttctggtcttctgctcttcacactgtttctccaccttcccttctgtcaaatccttttgtcttcctcagtctcctggcaaagaagcaacaaatctatttattttgtctcctccacgtctggtgaatctgttcacttctcttcatgatcattgaacccaaccatgtttagaaggataacagttcaccttacaatatgctcatgtaggtcaggtgcagtggctcactcctgtaatcccagcactttgggaggccaagacgggtggatcatctgaggtcgagtttgagatcagcgtggccaacatggcaaaaccctgtctctactaaaaatagaaaaattagccaggcatggtgtcgggcacctgtaatcccagctactcgggaggctgaggcaggagaatcacttgaacccagggtgagaggctgcagtgagctgagataatgccacttaactccagcctgggcgacagagagaaactccatctcaaaaaaaaaagcatatgttcatctatccgcagactctctgacatcgtcacccttttctagggtcctgcagacatcaccccacaacatccagtccttttcctaagtaccacagagtgggctctgcagctcctgctgctctctgtgtgctcagcgctgaggctcaccagtgctttgatgatgaagttcaaatccctaatgtgtttgcaattctcagacaaccctctagcaagctgccattgtgagtgcattctggggatcctgggctgatttcaggtccatattgctggatgttctctagcatccaggcgtgttggcaaataaacatctagaatttgtattgaaaatttgtggaaaatcaatggtagaaaacaatcctaatttctaaataagaacattttatcctgactttataaaaacacaatgttaatttaaccaataatgtaataaaatgtgtttaaagtgatgtttatcttgttattagatgtattaataattggtattttaaagtatactaacagcataaatgacaaacaaaccaacacagcgattatacataaataccattgtacattaattaatttggcaagaatggcatttattttcatttctaccaaaccttgcctttaaatatgtttgttaattggcattaggatagtgaaacaatcacacagagcaacaacattttggaatattacattatactataaaatagtacattcgattcaattatataattaaaataacattaaataaattcatgttttggtttgatatttggatatgtgttcatttttgtattttctttttttgtatcttttgtagagatggggtttcaccatgttggacaggctggtctcgacttcctgacctcaggtgatttatcgggggaacccacccccaatatttcaatgtagggtctttctattttctgtaagtgtcggctggtctgagaaataaagagaaagagtacaaagaaaggaatgttacagctgggccaccgggggtgacatcacatattgataggtccgtgatgccccctgagccgcaacaccagcaagtttttattagggattttaaaaggagagggggtgtacgaacagggagtaggtcacaaagatcacatgctttaaggggcaaaaagcagggcaaagatcacatattccttccccagggtattaattactaatattccttgctgggaaagaatttagtgatatcttccctacttgcacatcagtttataagctctctgcaagaagaaaaatatggctctattctgcccgaccccgcaggcagtcagaccttatggttatcttcccttgtttcctaaaatcgctgttgttctgttctttttcaaggtgcactgatttcatattgttcaaacacacatgttttacaatcagatttcatattgttcaaacacacatgttttacaatcaatttgtacagttaatgcaatcatcacagggtcctgaggtgacttacatcctcagcttacaaagataacaggattatgagattaaagaaattatgaaagtattgattttgggaactgataaatgtccatattaaaatgaaatcttcacaatttatgtttagagattccagtaaagacaggtgtaagaaattataaaagtattaattttgggaactgataaatgtccatattaaaatgcaatgcctagggccaacaaaggagtcatattaatatgaaaaataatagctgaatattttggaaatgacacatgcagtaacaaatgtctatatgaaattaagaagatattgacacaaaattgagaaaaaattaacataattatgctcactactggtttataaaatgcctataataacactttttaaatcatattatagaaaataaaataactatataaatagcactctctttgcttgattttagtatttggtgcttcaaatgttttttatacaaataaacattggtcattttttgatggtaatttcaatattttcttccagaatacatgttcataaatgtaattgaaattgtataattttcagaaacttattttatcagttgtgacttgtatttttatgatagactttttacatttatatacttttgattcagaataattatagataaaaaaattataaagttaatacagtgtgttcccatctccaagtatctcctaagatgaatatcctctatcatcataagacatggtgttaacacatttacattgataagtgtaaatatattcaataccagaccttattttatttatcatttttccaataatttctattgtaaatgaaaaataaaattctaagcttcctcaagcaactaaatgaactcaaccctcagccaagggaatttcaaagtaaattctaaaacttgttccagcaatgatgggaaagtgagaggtcagacatgcctcattacatgctcctctctttggaattaaggcaccagtggccagcattagtactacaacaaagatcttaagacgggcaaaactatatttttgctgtaaacactttctatagcaaaaagacatcaaattacaacttgattctagtatagcatcacatgacaaatagcaaaacctaatgatttattctgtatgaaatctgctacctggaggcttcatctacataataagaactatgatctccaggaccccttatcttaatccagacactcagttgtaatgattgtattaccttacatttcaaccaattgccaatcagaaaatctttgaattctcctatgtcctggaaccctgtgcataaactttcctgcctttctagactgcataaatggtatagctcacatgtgttgattaatatctgcctgtaacttctgacccactaaagtatataaaatcaagctgtaatcaagccattttggacatgtgttctcaggaattcctggggtcgtgtcatgggccttggtaactcatatatatctcagaatgagccattttaaatatttcatagtttgtcccttttagtggatatcttcttttcttttttttgggacagaatctctctttgctgttgctttcgtatatttgtttgtttccagattccatcaaggccatcagtttgaattcagttgtcttgttcctttattctcttctggtaaatgacagtttgtatttctgaagttttctagttgaatattttatagataaaaatttatcaagtaggttgatagtgccatttgggactcttatatctttacctatttaatcattgcttgttttctcaatcacaatgagtgttgatttctccatgttctatacatgttagtctattttctgttccaaatccatttattaggtcttttaaaatggattttggaaaagttgatcctattattttatgcaatatttcacttgagttgcaaaggtattctttttatgattattttgtctgaaattaacatagctattcaagttttctttggtttatattttcatggtctatatttttccatcttatttcttctctttgtgaatatgttaagaagttttcttggagaaagataattgctgggtcttttttttttttagtcaactatgaggaattattttttaatgatattacccttttgtccaataatggttgttttgtctttttacaataatatgtattgtttctattaatttattatttaattattattgatgaatatcttattggttaccataaggataacaataagacatttctataattgaattctaattcaaaaatgtagtacttctttctctttcttatttctttgagacggagtctcactctgtcgcccaggctggagtgcagtgggacaatctcagatcactgtaagctctgcctcctgggttctcgccattctcctgcctcagcctcccaagtagctgggactacaggcacctgccaccatgcccggataattttttgtatctttagtagagacaggctttcaccgtgttagccaggatggtctctatcttctgacttgtgatctgcctgacctggcctcccaaagtactgggattacaggcatgagccaccgtgcccagcctacccctttatatatagaacagagatattataactatatatgtctaattcctcttttctatcccttttttattttatcagtttgtaattacataagctataaaaatgtaatattgacatttttataattgctttacacatttatgtaataaagaaaacacaaatgcaaaaactaaatttaaacctcatttttttcattgttgacaatctttatcttttggatacattcaggtattggatgtatatcatatggctgctcatctagaaactctgctaaaacgtctatggcaagattaatatgctgggaatagattttctcaggatttgtttgtccgacagagtatttatttgtctttgatttatcatctcaagagacaatgtcaagaagatgctgtttctgcaaatgggcaatctgcaaaccaaggacacgtcactacattactgtgcaagagaagcacatgaggaaaggccggtgtgagacacaaacctccaggaacacctgggctaatgagctgcagggggcgctcaggacccactgatcagtcaaccacagaggggagtgcaaaggttaggactgctttcctgcaagcattgaaaaaagaagaaaaaaactccgtctgacagtttctccaaggaacttctgtaattttagaattctgtgcctaccaatgacatctccaaatatttttttaaaatattgtgtttggaggacatactctcacatggacaaaacacaaattgacacagagatgaaaagccctcaaccatagtcaccaaaattggagacatgtagaagctcactgggacctgttgagtcttctccaatcacactcagaacagagaccttagtgggtctcccttagagtagtcattaaggatggtgataacagcctaaagatggtagaccatggtcagtgtcatatagaatatggggaccctcacaagttttttgtctgacccttctcctgacactaaattatgcaaattaataacactgatctggtgcttcttttgattctaatttattttatttttagttgtcgttctcacttttcctttggattttcctgctccctggaaaaggtaaatgtggtctccgtgacctcaattcaagggctgaagccctttccctgtagctcagctggggctcaggctgtggctactgcagccatgtggaagaggctgaagggactttcttcactctccttgctcaggaccatccactgtattgtgtataggcttctctggaaatgcaagtggccatttgtagtgaaagaaatatgtttgtctggttaaaatgggaggtggatgtagagttaattggctgctacataaactgtccttctccaccagtgcttttaggatgagattgtgaaatttgtaagaatcaaaatggagtcacatatgttaaaaccctgacaaatggattcaggaagtgtagggagaattcttacacacatatccctgacaacaagaactatcataaaatagttcttgcaaaaagaccaacatgacctcataatcatgacttctgcaaagacttctactcagaatctacttgcccagccttagattaatgccatctgaattacactgatcatgttactatcactggtcctcaccacagatgcaacaccctcctgagtcctgaaacctgactccatcccatagagtagggcacagatgaggggaatgcaaatctccaccagctccaccctcctctgggttgaaaaagccgagcacaggtcccagctcagtgactcctgtgccccaccatggacacactttgctccacgctcctgctgctgaccatcccttcatgtgagtgctgtggtcagggactccttcacgggtgaaacatcagttttcttgtttgtgggcttcatcttcttatgctttctccacaggggtcttgtcccagatcaccttgaaggagtctggtcctacgctggtgaaacccacacagaccctcacgctgacctgcaccttctctgggttctcactcagcactagtggagtgggtgtgggctggatccgtcagcccccaggaaaggccctggagtggcttgcactcatttattggaatgatgataagcgctacagcccatctctgaagagcaggctcaccatcaccaaggacacctccaaaaaccaggtggtccttacaatgaccaacatggaccctgtggacacagccacatattactgtgcacacagaccacaaagacacagcccagggcacctcctgtacaaaaacccaggctgcttctcattggtgctccctccccacctctgcagaacaggaaagtgcagctgagatacgttttcctgccagggcctgcatttcccatccccattagactcagagccctgtcttcctccttcttctttaataataaatggcatgactcctgttaatagttcatagaagcagaagctgagtcctgtttgtcaaacattcagcatgaaatgttcatgttacctgggccagatgcatcactggtatgtggccgccagtttaatgggctcatactactccaagcggccgaatacaaaacagcagaacatatgcctttattaaactgcaggaaatgacactggagaaaaatgtggggataagggagcaggaggaattgtgaaaattcagataatagcttttctcgtagagagaaaggtgcgttaataaaataattttataaaacaataaaacagatggaatgtgtccccatcacggagtgtctcacagtaacagtgcagaaataaatttctaaaaatgtcgtagggtaggtgtgatagacaaggcttatttccacacagggagcccataaatacccatgtaattaaaaatccagctcttagaaagggagtgcctcaacttgacatcagaaacccacgtcagtgagtctgaggagcaatgtggaaaagaaatggaaaattcaacaatacctttcttatgaaaatcctagctcacgtttcaacatgaaacataactgtctacaattttaggaaaaccatcccatggcaacaagtcactacactcaaaaggtactgagctaacagagttccagcagtgagcaggtcagtgctgaaatccccggagaatcaaggctctcaggtacgttgtacaaaacccagaactgagccacacaatctatggtcaagtgatctttgacaaagtcaacaaaaatatgcacggggaagaggccacgctcttcatgccatgttgctgggacaattggactgccatatgcagaagaatgaaactggacaccaacctgtcgacatatacataaccataagaaaatggactgaaggcttgattataggacttcaaaatataaatgtactcgaagaaaacaccaggagaactcctctggacattgggcttagtaaataatttaccacaaaaacctcaaaagcacaagcaataacatcaaaaatagatgaatggaatttagttaaactaaagagcttccacacagcaacagagtgaacagacaaattgcagaatgctaaaaaatatttgcacacattgcatctggcaggggactgataggcagaatttacacggaactgaaacaaccccaccacaacaacagctatgaaaaaacaaataacctcattaaaaattggcaaaggacacgagtaggaatttttttaaagaacacatataactggacaagtgctaaacatcactgattatcagggatatgcaaattaaaactgcaaagaggtatcttacaccagtcagaatggctactataaaagaagcaaaaatagcagacatcggtggcgatcaaaggcaaagggaagtctcagtcattgttggtgaggatgtagatgagcacagcctctatggaaaacaatgtggagatttttcaaagaaataaaagcagaactacctttgattcaatgaccccaccattgggtaactacccaaaggaaaaataaatcatcatatcagaatgataaccaaacttttgttttcctgcagaactattcacagtagcatagatatcaacctaaggaattaacctgtgtcttacaacagataattttatttaaaaagtcacatatatatacaattaaatactatccagccatattaaggaatggaatcatgtattttgcagctacatggatggaactctgggtcattattttaagtctaataaacgagaagtagaacagcacacaccacactttttcacttataaatgggagctaagtaatatgtgcacaggcccatagagaaaggaatgatggacattgcagactcagaaacatgggagagcagaagttgggagaatggtgagaaattacttaaagggtatgatgtacattatttggatcatggatacattaaagccaagacgactatgcaatatatatatgtaacaaaattgcagtcactccccgtaaatgtatacgaataaaataaaaaaaaatacaattgaaatgtgaaattattaacagttgatcaacaatcctgaaaattaaaacgtgtgatgcaataaatgaaaataattttagttgaacttcatcaaattttaaaacattttctattcaaccgactatcaagaaactgaaggacaagcttcaggggagaaagtatttgcaaatcatacatctaacaatgtaattataataagaaccctcaaaactcaacagtaaaaagaagcaatctgtttataaaataggcaaaggtttgtgcaaactttctatcaaagaagatgtacagatgacacatcagcatatgaatgtaattttccagtagagaaattcaaatcaagaccaaaaggagacacgactttaggctttagaatgaggaaaaataaagaagaaatactgacagtaccagtgtcagtgagcatgccaggccccgagagactaaaatattgctagtgcaaaatgaaagagtttctgggagaactgtttacagtttcttataaaattaaacatgtccttaatccatgacctagaactctcatccctgagtatgtcctacaaaggattaaaatcatgtgttcacacacacacgtattcagatgtttaacattgtgtgtgtgtgtgtgtggtgtgtgtgtgtgtgtgttagaaactaaaaacaacatgaacatctttgaaaatttgacacaaaccattacaggtgaactccagactttcttctgagtgacagaaggcctgcctgaaagatccccagagacacagtcatggatttcactgtcaccctcacatgtcactggcttgggctgggctctctctggctcttccctgaccaggaccagatgttgagctccactacctgcagttggaagtttatattttcaacaatgcactgagggctaagttgctctacagactgaaccaaacaaacatgggcgcctttgaacaaacagtgcctgacatttgtactgaccccaggagaactcttcccgctctctttcttcttggttctctcctgcaggccagcagccctgcagtttagcctggacctctcatgcatctacccatctcctcccaagtgcattttaccacagcctccactgtttttgtaattctccacactctgttgtaaatgaagtcaggtccttcgagaccagattcgggactctattttatgaccaaatttcagcctcacccccactcctgagacagagctcctaaataagattctgcaggtggagattaagagcgtttttcttcctcaatgtaggagatgagtgctcagtggagggatggggaggagctttccactttaccagcatgcagatcctgctggggtggaccctctgccataggagcagggctgggaaccaggcagccaatgtcctcctccttggtgctgcactcagggcagagcctgcatccatgagtggggctgtgtggaagaagtgagtctctggttctcagtaagtcttgtctagaactgagcctcagcagcatgacctgtgggcaaggtcggagggccaatgtcctggcccctggggaagagtgtgctctgctgggagctgggcagaaggaatcctgtctacttggctgcagccatctgtggtggaatttacatcatgctgagctcgggcatagaaggaaggaagagaatctttgatcaaatatcaatatcatgtctgaccttactgaggttttgtagattatctcgaataaatgttccttcactttctgtatgttgacagggcctttccagacccgttaatttttcaaaattaatctcaccagtttcatggaggcatggatatatcgagctccttataccgtcatgtgagatgtggaactgtttccttcactggttataaaataatgggttgacttttttcccaacactttacagataccatcaattgtcctattgcttatatggttataaccaaagcaatgctgatattattcatttctattctattgcaaggtatgccccctctactcgtctccaattgctggcatgtatttccatttgtctgtatgttttagtaatttgaatatgattcacctaagagtgtttgtgtgtgtgtgggtatgtgtgtgtcgtgtgtgtgtgtgttaagggcttatcctgctatttggtgttctctgacctgcactgatccatgacttacaatttctctaatttggaggaaaaaatagagggaaagtgagtttgagtccagacacaaacctcactgaagtgagcacaggattctaaccccaggggtgctcaggacacgctgatcacaagagccagcctcaggggcaggtgcagatggaggctgagctcttctttcccgtcagcactgtggcttcttctccataaaacatcttcccttgaggaatttatctgaattcatgattttttgcttatctccaaagtctctgaaatgaaaatgtttgttttaataaaagaaaaatcttctcacatgtgtaaaagacagtttcctacagtcgcttaatcttgtctttaaatgtcaattatcaatgcttctgaagtaaatcagctaaatctataaaagacactttgtttaactcaacactgcagcccagcatgacagcactgaaagggccagcaagcagcaggcaggatacggtgcatgccagacactggggcggaaggagttagtatccagtgcaagagaagaaagtgcccgtggtggtcactgtcaggacccaagctcacagctccaattgcaggtgaccccatgcaaaggaagagataccctcaccaatgtttagtgtggatgtcgagtctgatggtgccacattcacacaccacgtgaatatggaaagatttaccaactccattattgaggcgtctgctgagggctgcacaggcctctcaataaagtccaaactggctcaatagagcaggaaagaagctgcctcagggtttttatgatggtttggtgttgaaggaatggtggggcttcctactaaggggaaggagcttgtataatttgaacctaatactggcatccagtgaggacacttccatgattttctactaaatttcccatgtgtgggggacaaaagtgaaggaaaaggattaatcctgtcatcagtaatgaggcatcaaaatagagtctgatgacttattctacttagcaacttaagcaaatgagtgaaaaatgaggtaagtgttcactctgggtggacagcaaataggtctgcagaaaatagagtttttttaagtgtaagcacataacaaaaagaaagagaagaacaaattgaacagggatcttggaccaatgtcctgggtggaagctcttcactctgtgagatcatcagcttgctctgagggtctcgggtcaagtccttcttcaatatatctcaggccttacaggatacatgggaatgctcagcttggtgtccttcactagggaaaagaaagagaaatcagactgtcactgtgtctatatagaaagggaagacataagagactccattttgaaaaagacctgtactttaaacaattgctttgctgagatgttgttaatttgtagctttgccccagccattttgacccagccactttgagccaacctggagctcacaaaaacatgtgttgtataaaatcaaggtttaagggatctagggctgtgcaggacgtgccttgttaacaaaatgtttacaagcagtatacttgataaaggtcatccgcattgtctactctcaataaaccaggggcacagtgcactgtggaaagccgcagggacctctgcccttgaaggcggggtattgtccaaggtttctccccatgtgatagtctgagatatggcctcgtgggatgagaaagacctgaccgtcccccagcctgactcccgtaaagggtctgtgctgaggagggttagtaaaagaggaaagcctcttgcagttgagatagaggaaggccactgtctcctgcctgcccctgggaactgaatgtcttggtataaaacccgattgtacatttgttcaattttgagataggagaaaaaccaccttatggtgggaggcgagacatatttgcagtaatgctgccttgttattctttatgccgctgagatgtttgggcggagagaaacataaatctggcctacgtgcatgtccaggcatagtaccttcccttgaacttaattacgacatagattcttttgctcacatgttttttgctgaccttctccttattatcaccctggtctcctactacattcctttttgctgaaataatgaaaataataatcaataaaaactgagggaactcagagaccagtgctggtgcaggtccttggtatgctgagtgccggttccctgggcccactgttgtttctctatactttgtttctgtgtcttatttcttttctcagtctctcatcccacctgacgaggaatacccacaggtgtggaggggcaggtctccccttcgtacttgagcagccttacaactgggtgggtttatgaattaattcctcggttgcattacatgaaaaatcacacaatctacaaattttaaaaaataagcctttactttttataaaagattacagccatttcacaggctgggaagcacagccattggtgaagacgagagacaggcactcccaaggaggagcggtggggcagaaactttatgctgaacgtgttggctaaacagacataatcaacggattacaggaggggctatgcgtgttcataaaggtggtcatgacacatgaatatgggagcaaacatacacgtcacatgtgacccacttagcagtggggacttagcatttaaatgtgttacagttaggccctaagtgccaaaagctggagcaggggcacaaagaccctcagagcgcagcctccataaatggccagaaccaggccatggtcagtggtctctgatcaggagaaaattcctgaaatcaatctggtgtcccatccaagctggggttatggctgtggaatggggggtcagttagtcaggggatgagctgcagttggttaaatcgtgcttatctcaggatcagtgcttattttgctgctacagaagaaaataacagtttattctttaagagttggggtgagggatgtaacccctgcctggcatggccttaggtcttgtttataacggggcatcttattgccccggagaatctgttctgtcagtcttatgatctccattttaatgttagtgttggtccatgttgtctctgaaccacaaaagggagtgggtataatgaggtgtgtctgatctcttgttctgcccagctgggaactcagtttttaggtgtttttggtgcctccttggccaagagggggaaccactcaatctcatggggtgactgaaattttacttttagtttaaagtttataaatatggacctaagtattgacattctaaaagtcactcctttgttttggctaaaagtacttggcaagagtccttgaaatgaggttcaagagcagtattttctcatgactttatttgcaatagacacatgagagactgttgaaaagatgaagtaccaaagtagccttaatctgttggtgaatggagttggtataatacagaaatcactttcaatattttgtaacacatgcatgcatgcaataagacagcggtgagcactgagtgtaaagtctctaaaggtacgatctttcagccaccaaataatagtgtaataacggacatactctggaggagctgactataataccgtaacaccacggggagaaactttggccaaggaagtccaagattttcttttccttttcctttttttttttttttttttttttttttgttgttgttgtttgagacagagtctcactctgttgcccaggctagagtgcggtggtgcgatctcgactcactgtgacctctgtctccctgattcaagcgattcctgcctcggcctcccaaaagctgatattacaggcatgtgccaccacacccagctaagtttttcatatttttagtagagacggggttttgccatgctggccaggatgatctcgcactcctgacctcaagtggtcctcctgccttggcctcccgaagtgctggtattacagcgtgagccaccacacccagccgagattttcttaaagttttgaaaattttaatttaagggttacaattttttcaacatttccagaaagctgtagacagtattattctgtgttatatgagtgattgtagttccttccatttttagatagtattacaaacaattttagggctgcttgctttaaatagatagatgatagatggctacatacatacatacatacgtacctcgatagagatatagttgcaaacataaatacatagatagatagagttacagatgtattttagttattatgctacttttttctttgccttttcttcctatgttatgttagtcaggtctccaggacttaggagtgcatttacaatcccttcccttgtccattttgacgtgttctagacaatgcgagaatcctttgtgtgtggatcacttccaagtcatgcactacccttgcaataaatgtgtttgtgtatgtctttgccttactgacaagctctgctgagtgcagttatttctgccgtctgagctaactttacacttggtagagaaatatattctagatggaggcttccactattaatttaaattactaattcataacctccagcttaattattgaggtataatctatcagagatggtattagaacaaaggtttccaatgaaatctaacagaagggatgtcaaaaaattttcctaacttaggtaaaataaccctgagcccattcttagtatccagccatgtctcctatctatcacactgaatcccacactaactttgacctgacttgggacttgtaagcttcaaatatgaccttttgattgcaatgcctctaattcaggacgtgtggttattttagccaagagtaaagaaaaccaaatttaactcgctaaaaatgacaaagattaaaacctaatgaaatggaaactgggatatgagtggctccagacttggctattttaagagtctatgtgcccaggtgatttcttttctccattttacacacaggcaaacccaaaacgtcagcttcatctcccgttgactctcatcatctcgttcttcatcagcttgcttagaatgttgacttccagctgcatccatgttgccacaaaagacatgattttattctttttctgtgaatgcatagtgttccattgtatacatgtaccatattttcttgatcaaattcaccatgaatggacacataggttggatttatgtcttaggtattaagagtagcatagcaatgaacatgtaagtgggtgtattttttggtagactgatttattttcttttgtgcatatacccacatatgagatggccgggccaagtggcagctctgcttcaaatacttttcaaatctccagactgctttccacagtgcttggactaattcacattccacccaacactgtacaagtgtttcctgttctccgcagcctctctccagactgctttccaagattcctctcctccactttgacactttggtatatccatgtgtgtcctctctggttcagccagggacagagaaccaggaagacatcatgcattttctagagggagctggcttggggaatcaacgaccggagtagaaagtgcctttgtccatgcatcacaggcctgagggccctgggcaggaggtcaggaagagaggatgaccagacagctggggaaaccgggatgaataaagccagtttccttcctggtgaggaggggcaggtcgaagcctcgtgtccctgtagggatgaagcacactcacctgccactgctacctgccaatcaggtgacctgcagagcagcagctcctgagtcactgatggtgacttcctcctcctccaaaccctctaggatctgtgcttctcagagtgggaaccccagcaggtccccaagttttcaatggattcacctagctagtgtctctcctcagccccatccccaggctcctgccctggtgctgtgtacagtgtcacaacaggggtgacagtaacagctggtgcctgcactttccaggccaagaagtttgaaagaagcaagtcacagggccagccgggatatggggtaatcacacaaatttccttcttggaggaagtgctgggaaacatccttgagtcctcctcagctcacgtgcagctgctgctgttcatcccagtgcgggggacacatgagccctccccatgcccaggatggagctgtttcaatcacagcaggatgggaatgtgtcttctctatgggggcttttgaagcacagctctcctgttcctgagatttgagatttataaagacaagtcccacagagtggacctgcacaaataagacagtacaggatccccaggagagacatcccataagagaagggacaggcgggtcccatcacagacactcatcctcagaaaccctgaccggctactcaccttcacaggtccccagttcctgatcagtgcctgtgtctgctcctgagaagagatgaaaactcaagacaaatacttctcatgatcataggcttaaaaattctcaacgtaggaaatcaaatccagtagtttatcaaaaagttaacacactgcaatcaagtaggctacattctgcaaaagcaaggctgctttaactgctttccacagtgcttggactaattcacattccatccagcactgtacaagtgctttaacctatgcaaagcaataaatgtgatgctctactaaacagaatcaaaagcaaaaaccatgtgagtattccagcagatgcaggaaaaaagctttcaatagaatctaacaacgcttcatgataaaaaccctcaaaattatagacattgaaggagcacacctcaatctgatgagccgtctatgacaaacccatggccaacatcatactgaatgggcaaacactggaagcattttccttaagaacagaaacaagaaaaggatgcccgctctcaccacttctattcagcctagtactggaagtattcaccagatcaggcaagagaaagaaataaaaggcatccaaataaaagaaaaagaagaatgcaaaccctctgttttcactgataatatgattctatatgtagaaaatattgaaggctctgccaaaagtctcctagtattgatacattcgtttaggaatgtttcaggatataaaatcaatgtacgaaaatcacagtaacatttctagtcaccaacaacgttctggctgagagtggaatcaagaacatgctctcccaatagccaccaagacagtggaatacctaggaatagagttaagccaatgagatgaaatatctctaccagaaaaacagcaaaacacatgtgaaaaaaatcagagataaaacaaataaatggaaaaataaacattccatgcttatgaatttaaacaataaatatatgaaaaagttttaaaatttgtgattaattctacgtagcaatgccatttttttcaacatttacagaatattgttgctggtaatagcagtttagcatttgagtaatggaaacaccttacagaatcactttataacagttgcttcctgtagtgggttgcttcagttacctgatgaaaacatctgcatgtcacaggttgaaaacataaaatatgtctatcaactgagaaggttgtaggcttttgtcaaggaattacttcaagtcattcagaaaaacagcagacagtaaacgaaacttgttcaaattccatggagagtcaaagctgaagaaaatccaactagaagtgtccaaaggcccccaaggctcagttcctcggcaagtcccaccttctcaggttttccagaattttgtttttaactgatttacactgagtgaagtagattaccaggagttttccattattttaacataaaatcgggggctaagtgttgttattttataaagacatctttgaatctctcaggaaatttacctcctgagggttcagataagatcctactctaggttaagattacatgtttggcgcaatgaactggtacaaatcttactttagctttcatgttatctatttttccgcactgacttccacctttttattagtcaagtatatgggatggaagagtgcttctaagaggtccttaacttgcccatttcaatggattttcaagaagacatgagaaaccactttgtttgcaaagcatcccaaagccatgtcctgctccagaaacgtgatctcatttcctggtcgtttcttaactgacacgctctaatcagtgcatctgggccaatttgaaatgaggtgaagaaatgtgtcctaaagtaaagctaacattgtaataggaattcgtgtttaaaaacatttagttttattattgggcaggatccatcaacatataacagttgaagtttctcaacaggagtttaataaatataaggaatgtacagaagtgtttcctaatttaaataaaatgtagtgattacctaggctgtgagtgcaatcttggtaatcttctatgtccatgcccatcactctgtgcaccgcaaactaattttgacctcagcagaaacgggattaattttcaaattagtaatttttttccaatttaatttatttagatgattatgaatgactattttagcagaaagagaatcaaggaaacttgaactaaataaccagaatttaaaatgacaaacaattcaacaagatgccaggatgtgagtggctccaggcccaattaattcaaaactttatgtgcccaggttctgtattttcccaaaattacacatctccattccagcttcatgccacagttgactcccaccgtgtaagacatggcgacaccattcccaaaggtcgtgtgcaattctgaaaatggaataagcaaggagaggagatgatagtttatattctcctctgaggaggaagaattgcctcaacagaccacttctcctgcatctgtgactagaactatgtcacaggcacacatggagcaaaatccctcaaggggataatacggtaacattaatcagggtgatcatttttaatactataaaattcatagatgacactgcattccagcctgagggacagagcaagaccctgtctctaagaaaaaaagaacaaatcaatagatactgataccaacattttagataatgaaattttcataatgtaattttaaatacactcacatcattacataaatcttcccagaaatattcctagtcatgttgagtttcatcaacttttccagtgttcaaatctagaaatccaatagactcttgaggataaatcaaaatgagggcagtgaaactggtatctgctcagcacctgttaactcaggaggactcaatacacccttgcacactgctgcttctctgaatggctcacaaggactccagctcactctccatcctcctcaaacatctggcccccacttgccctaagttgactctctgctcttagtctgtgctctgaagtcttcccagaggtgaaagtgagctgtcagatggaacttccctctcacctcagcgtggaatttactgctacatttaactatcactctttccataatggttgatttcttggtctgttcattacagatcaaaggcatctgatttgaatctttatttctttgcatttgtctccatgacaattttgggaggttttaccgccagcactatgacacgatgtagtaacatgacacatttgtggttaacaacacctacaaattcagaagctcttcggttgtcttcccagcaaatatagctgcttcttttctgtgtatgaacacatcctggaaacacgtacacacccacatagatatatacatgcctatgacattttcttctctgtaagtgaaaattaacctcaatttcatacgaagttcatcatttccctgaaggtgaaggtaggtcgtttttcatctgttctaacaaatgctcagacaccagctagtaagtgaggagctaccctgcttctggatgttggatctgtctcttcccctttgctttaccacagaagattggccacttgtccaggtcccaagaagagagtccaggtttgtcctgataatatgactcatccaacttctgataactctactgttacacacattcatggaggtagcctattaattacataattcactaaacaaataccaaatacccacattgcaataccccatacccaagggtatgttcatgcattcagtgaaggaaaaggcttttcagagacagatagatcaggctagattggtcaatatatgggtgaaaacactggacttgaatgtatctgttttcccccatgtcacatgtgagacctgtcagacaggaccagggttccttgtgcactcagaggtgagggctcacagaattcctctctggtttccaggaaaggtaactgcagtaatcttggtaatgagaatatcctccagtgctgacctattatagagtttacatatgaaattttcactgcaattcacaatctactctttcacacagaagtgtacagaggtcaggacacatcctcagggtcacacattgagaatgatgaagatatgtcccacgagtttttcctaaggtctcagaaagaattccaggactcaaaaggtctcagagggcagctcccagtgccttagttaaaatggtggctcaggcctgtaatcccagcattttgggaggccaaggcaggtggatcacctgaggtcgggacattgagactagcttggccaacatggtgaaaccttatctctactaaaaatataaaaattagacggggggggttgtgcatgcctgtactcccagctactcgggaggctgaggcaggagaatcacttgaacccaggaggcggaggttgcggtgagccgagatcaggacactgcactctagcctgggcaaaggagcaaaagttcatctaaaaaatttattttaatttaaaaatttttaaaaaatggcccactccctagaacagagagattccctctaaacatgatggaggtcccgaactatacattaagtgaatcctggtgtgtctgaactcacatgattattacgttaagctgctgttccaatctacttcctcacctgggaaaagaggagccagggcatggctagttgaggccccaggaagagaactgagttctcaaagggcaaagcaagcatcctcatcccagggtgagcctaaaagactggggcctccctcatcccttttcacctctttatacaaaggcaccacctacatgcaaatcctcactcaggcacccacaggaaaccaccacacatttccttaaattcagggtccagctcacatgggaaatactttctgagactcatggacctcctgcacaagaacatgaaacacctgtggttcttcctcctgctggtggcagctcccagatgtgagtgtctcaaggctgcagacatggggatatgggaggtgcctctgatcccagggctcactgtgggtctctctgttcacaggggtcctgtcccaggtgcagctgcaggagtcgggcccaggactggtgaagccttcggagaccctgtccctcacctgcactgtctctggtggctccatcagtagttactactggagctggatccggcagcccgccgggaagggactggagtggattgggcgtatctataccagtgggagcaccaactacaacccctccctcaagagtcgagtcaccatgtcagtagacacgtccaagaaccagttctccctgaagctgagctctgtgaccgccgcggacacggccgtgtattactgtgcgagagacacagtgaggggaggtgagtgtgagcccagacacaaacctccctgcagggaggcggaggggaccggcgcaggtgctgctcaagaccagcagggggcgcgcggggcccacagagcaagaggccgggtcaggagcaggtgcagggagggcggggcttcctcatcagctcagtgctctccctcctcgccaggacctcagctgtccccaggcctcctctttctttattatctgtggttctgcttcctcacatcctcgctgcaggcaagaaagaagggagaaatttctctgtttaccattaaggttttaacagtcactggcacctttttttcaacaaattcccacaaggcccattttaccttcttgacaaagtatttcaaggcttctcaccatctcttgattggcgtcatcggctgcatcgtgtcctgctcttaaattcatgtgatgaaaccccaatcccagtggctctgtatttggagagagggattttaagaaggcaaataagttaactgtggccataaatgtgggaccctaatccactaggactcttgtccttatgggaagtggaagacatcagaggcctctctctccacatgcacacagaggagaggccatgtggggacgcgctgcatgagaaggtggccctttgcaagcctggaagtggcctctcaaaaaactaaccctttcttcacccagatcttggacgtcaaggctccagaacaataagaaaattaatatttgttatttgaaacaacctagtctgtggtatcttctgatggaaagccaagcagattcacagatacaattgtgttagctccgtctcctggagggagaagcagcccaccgaggctgacacatctctcagattatttttataaagaaaaatagatccaagatgaaaaccccaccacatttctgctgagtcattcacttagcaggcttctctgagatcagccctggggggctgtgttctaggtcatgtctctcactttccactatgagaatccatgtagatcatgagaaccagccagatggagtcctgatcccggcccaccttctgctgctccccaagtatcccaaagaaaaccactccagcgtcacccctgtgtcttctactctctaaaatcccactaaagctgaccttaaaccaggagatatttggggccgggctcttgttctcttcttcttagtcttccataaggtccaggtgctgagtaaagcctcagtaaagattgagcttcagttcccctaacccacatcattcccttacatccttgtcatgcatctgtcctctgtgggcactcagggcaggttacacaggaattgcctgaagctggcctcaactgatgtgctgagaccacgggtcatgcacatgtatgattccgggtcatgcacatgtatgattccaggtcatgcaggctctactgcaggacagacctgtgtcctgtggggcacagacagctgctgaccccgggtctcctctaataactcacacacctggtgtttgtgtgtgtccagatggccccatgagcacagcacactagggtggccaaccttacaggtggggccgtcagatggaatggacaggctggtcactcccatcatcagtgatttcccagtgaattttaaataaattaaacaaaattaacaacaaaggggaaggatatgtacctgtctctgggaggtatacagggtcccagaactgtgctgggagtgggtgtgaaacgcccttttgtgtggaaagccctccagcatgagtgaaagctgaaggaatgatcactgtgcaggtggaggatgataggcagctggcagggtacatttcctgaagctgttcctgggtgcatgatggttggatggcccatggtgttgagggctggactcacataggaacaaggaaattatcccatgggaatggcagaaaagaaaatggagatggacacccctggagacagcttattagatttggtggaggaaaaatagaaatttattccaatgaccccagcattttcagctaaataagagttgcattaatagacagaattatgaaaggaagggagaaggagtttatggagggaaaaaaaaagaagataaattaaaatttaaaactatgcaaatctatcaattggcagataacagagtggagctgatgcagctacttccttgttctggaaacctgccagagacacttagcattcctgtaaggccagtctagtggtgatgaacttgtccactttttacttttttggggaacttctcaaacctcctgcattattgaagaaaagctttaatccatgtaacgtatttatttggaagtttcttggctttgtttttattttcagcaacttgaacagaatcatgcacatcatgatatttcggtgaacaacaggccacctacaggacaaaggtctcattagattataatactgtattttcaccgcatttttccatgcttagatatgttcatctgtataaacatctaccatggtgattcagctgcccacagtattcactacacttacatgacatacagatttgttacctaggagcactatgctatcccacgcagcctgggtgtagcaaggtatttcatgtaggtttgtgtaaacacactctatgatccttgcacaatgacaaattgcctaaggacacattgttcagatgtattcctactgtttttcatttttttttagatggagtctcactctgtcacccaggctggagtgcagtggcacaatcttggctcactgcaacctccgcctcccaggctcaagcgattctcctgcctcagccttccgagtagctgggattacaggcatgaaccaccacgcccagctaattctttttttctattttttagtagagatgggatttcaccatgttgccctggctggtcttgagctcgtgacctacatgatccacccactttgccctcccaaagtgctgggattacaagcgtgagccactgcgcctggccaatgtatccctactgttaagccacaaatcatcgtatctcatttctctcccttttttgtccctgttaatattttcatgttgtgcgtgcattcttctcctagctcagtgaacatatttataaggtttactttgaattttctgctaggtaatcaatgtatctccttttaatttgtgtcagtttctagtgctttttttgttaaataatttggaccacttttttctgttttgtgattattgttattattattattttttactttctctgttgctttctcctcattagaagaaaaagctaccgtaatcactcttcacagaatatgcccagggaaaatgccatcacctatcaacccaggctgtcattgtggcatctcttaaaacttcataatggttgaaattttttgttgttgttgttattagtggcactcagacctacagaggattttaagttttgctcctactctaaattaggtggcattgaaattcatcctgcaggcagtctctgataaagtggaggaattgggcagttttgttatgcatatggttcataaaaataatatgagtttaaggttttctcagccaagtgctatatcctgatattttataatcacttctttgaatctctcttgggtttatcttttgaaaatttagatcagaatataaaccaggtttgaggctttttgtttggtgtaaacatctcctataggtcattgcgtgaaaaggcacagagtctatctgaggaggagaactcagggaagcctcacaacaacaggggagacaaaaccgaggtcactaaaaaaatatgaagcttctggctcctgcagcctccagacatgccccacaccctctcattgcacagaaatgaattcctttctctttcctgagtgatctttgccaagattcctctcctccactttgacactttggtatatccatgtgtgtccattctggttcagccagggacacagaaccaggaagacatcgtggcttttctagagggagctggcttggggaatcaatggttggagtagaaagtgtctttgtccatgtgtcacagccctgagggacacgggaagaaggtcaggaagacaggatgaccagacggctggagcaaccagtatgaacaaagccactttctttcctggtgaagaggggcatttggaagcctggtgtccctgtaggggatgaaccacactcacctgcccactgttacttgccaacgaggtgacccgcagagcagcagatcctgagtcaccgacagtggctgcttcctcctccaaaccctccaagatctgtccttccaggagtgtgaacctcagcagatccgcacgttttcaatgggtccacttagctagtgtctgtcctcagccccatccctgggatcctgtcctggtgctgtgtacactgtcacaatagtggtgacagtgacagctggtgcctgcactttccaggccaagaagtttgaaagaagcaagtcacagggccagcctggatttggggcaaacacacaaatttcactctgtggggaagtgctgggaagcagccttgagtcctcctcagctcacgtgtggctgctgctgctcatcccaggtgggacacatgagccctccccatgcccaggatggagctgtttcagtcacagcaggatgggaatgtgtcttctctatgggggcttttgaagcacagctctcctgttcctgagatttgagatttataaagacaagtcccacagagtgaacctgcacaaataagacagtgcaggatccccaggagagacatcccatatgagaagggacaggcaggtcccatcactgacgctggtcctcagaaaccctgaccagctactgaccttcccaggtcccctgttcctggaacagttcgtgtgtctgctcctgaaaagatgcccatcaagagtccccagggttctgcccccttccttgatgtgcctctgggagtggggctggctgggctgtgggtctggcgtgaccctctccacaggtcagcggctcagtgcaggctgcaccgactcggtggggctgggctgtggctgaccctcccagggggagcctggactcttcttaggggtatctgcaggatcccaggttctgggagaacagggaagccacagtgtgtgcagggccccatctccagtaaagtgtttgctgtcgctctgttgacaagggcatatccccaggcctaggggcactgtgggcgcacgaccaatgcgcgagacacagggagtaaggcacagttccctcccattactgtgaggacactagacacagtgtgtgtgtgtgtgtgtgtgtgtgtgtgtgtgtgtgtgtgtgtgtgtccattactgtggggactctaaccaccgtgtgtgtgtgtgtgtgtgtgtgtgtgtgtgtgtgtgtattaggagttttgcagtggcctctgagacccatgatcttgcaggtttagaaattatctgatgagatgttcatccacaggaaccgacaagagattaggtgttctcccaaagcccctggaagctcctggactcactgtgagtgtggactgatccagtgcttccagagctccacagaaggggctccctggtggtttcatagaatccttgcttggggtgtttctgcagagttcactggctttcctacgaccaatttaccattgcaagcgatggcgtcagcagcacatggtgtcacgtgtcactaaaggagcattctgagccaggacacagccacttcatactggggggaaaatgctctgggagcccagacaggagcctctctgcagtgcaagggctgggctgcagggggcgctcaaggcccacccagcacaggctccagccccagagcaggtgcacaggaggctgcggatggagtccccttaagatctgtgtcattcttctaaaaaaatctaaaataagtatttgacaaaaactgctgaagagtccataaatatcctattcaactgcaagaatttatcaatttacactggagatttctaaccctgctacatatcttaatagtaagcatctggaggtcaattaagcttttattttatataaataagtgcaacttttggagaaacacactcatcccccaaataacacattcatgtattaaagcctagaaatattttaaattacctctgagctattcaagtgtgggttcccagtgaagtcctgttctagggaaaattgttctccagtgggagaagctctgtcaacatacagtttagggatatggcagggcacacatggcctctaaggggattatagcttgaacccttagcatcctcctgttgggtaatccatgtgtcatctctccactctttctcatgctgtgttaggtatgaaatagcatcgctcatgaatatgcaaataactgagatgactatagatatctttgtgccctgagagcatcacccaacaaccacatccctcctcagaagcccccagagcacaactcctcaccatggactggacctggaggatcctctttttggtggcagcagccacaggtaaggggctgccaaatcccagtgaggaggaagggatcgaagccagtcaagggggcttccatccactcctgtgtcttctctacaggtgtccactcccaggttcagctggtgcagtctggggctgaggtgaagaagcctggggcctcagtgaaggtttcctgcaaggcttctggatacaccttcactagctatgctatgcattgggtgcgccaggcccccggacaaaggcttgagtggatgggatggagcaacgctggcaatggtaacacaaaatattcacaggagttccagggcagagtcaccattaccagggacacatccgcgagcacagcctacatggagctgagcagcctgagatctgaggacatggctgtgtattactgtgcgagagacacagtgtgaaaacccacatcctgagagtgtcagaaaccccaggggggaagcagctgtgctggcatggaggaaatgacaaagattattagattgaagactttctcagaaaatgatattaagtcattaaggaaaaggaacaatataaacgtgtatttgagaaattttaattatttgagagatttttcatacaatatttattctgcaagcaaatttcagggattgaattaataaaactgatacagaacttcctctgtaggtatctgtgtaaacatcaatttctgaatcagtgttgtaaatattttggaacacacacacaaatcacattttatctctacttttatctctatttttaaaaatgccaaaaaaactcattttgtgcatgtagcattttgaattcccaccatcaatgcatgatagttcttggttttccacattcatattgccatttatcattatgagaattgtgtgttttaaccattctaataggtgagtaatggtatctaatttttagttaaatgcacatttccctaataaaaattcacatttaacaattttcatataatttttgccaagatgcctcttctcatatttggttcatttttaactgcattgttttcttttgattagttgtaagtttacttgcatattgattataaaatcatttaacaaattaaaagaattcatttaacaaatatgtgacttggaagtattttctccaagtctgcggctgtcttttactcccttatcagtatgtattgcagaaaagtgtgtgtgtgtgtgtgtgtgtgtgtttatacaaatttagatttaaaaaatgtaaaatgttattcatccacagatcatgtctttggtattatatctgaaatctcattataaaatacagtaatagcaattactttttccacgtctctaatctcaggctacaatcaactcatgagtgtttaagcttcacctacttgattagaggactatcaacctaacatatttggaatacttctgtaaaaagatgtgttcctcttcctattatttctttatttgatcacttattaatatgtgtattggtttatggatgtctatttcatactctgaagaagatccatgctacattattcattttatttttcaaaccaccacggctttattatgtgctgggagctcattgagtttggatcctgcatccttacagctcacctcatgcttttgtttttgaacacttccctgtttcctgctattataataaattctaaactcattttctatattatctttttcatacatagaatcagccatttttctaaagattgcttgcttctgatgttaaagaatagtatttaaaaaattgtaatactgggtatgtgcattgttaatgtggtataagtacttgcaggacctctcaaccaactggcctagtaaactatgtatctaaccttctgtaatgtgattacattaaaaatgagaacacactggtctctctacccaattatgctaccacatggatctttctagccttccttccttgactgtctataacctctcactgcaaaatgaggaaccccatccaaccatatgccattttattacttagctgcacaatttcaggacacatgcatagcagtatcagaaatgtaaagctgtacccttgtaggaaacatgtttatctactagaatagagtgcttatgttcagtttctttacactttaaacttacagagtttcctcattttcaaagttccttaggtcagcaacttcattttccactttcttcagtgaggtcatttcaatgacactgtataatttgatttatttgaaattctataaaagccaaaactgtagtcaagtgaacaacaacatatagaggatattcgaggagtttagagactggtataaaataagttaaaaagacactgtttaagaagattaaaattatttttagtgatatgcaatggttcagatatgacacaattaatttgtctaagcacatagttttgtgatggaaaatataaacctaaatatatacaattaaaaaaaaatttagcagttcattaacccaaggatcaaatgcagattgtataaaattatctcattacttattttgtgagggtggagatttcatgagatgtatgcaacaaagaatgaggtaattttcctgatttgcatataagatgttgccattcactaaagacctttaattttttaaattgttttttttttaaatcaattttctatgtgacccaggtttttttctcttgacaagcaaataacccacaggattattttctttccttggttgagaaatatttccccaaacttcagctcagttcaggcatacactgtccctgaatgggcatttaccctcagatgggtacacacacctgtcaacatgtggactcttctgtcagacaaacgcacctttactcacgtggattcttctctcagacaaacacacatgtccccacgtggactctttcctcagactaccacatatgttcttacatttactctttcctcagaaaacagacatttcctcatgtggactcttgtctcagacaagcaaacatgtctccatgtgaactcttcactcacataagtacacatatgtccacattgactgtttccttacacaagtacatatatccaatgtcgaattgttctgtggcaaaatgatctcaagataatgataatcataaaccccctccctgacaaggcatagatctgtatttttttcattgcaacctaactttgccttattgtcaagaacagtagtttgcagctctaaatataccaattagagacaggtgtccattttctctggaaacgtatttttatgttcttactggacatatttgttgataatgtttgctattatgaagataccccaacagtgtccacattagagaataaaaaatagtaatgggcagattaactctgtgcatccagacccagaaatcctttgaccttgacttccctgaaatgtagacacagaggatggatgagcaatgctgagcagtgcacccatgaccacaaaaagaaagacgtggaaatgtgtcccctccacttctcatgaaaggcagctcatcccctgttccctcaggccctggcgaggagccaccccatgtctgtgcccttcctcagtgtccacaccgtggggtctgcattgatctggattctcttctcatccccgtcaatattagtgtccttcgtaaatcaggtccagctgtggcttctcctcacggggctgttctcagtctgtttgctgtgttcacggaagtcctgtgtgaagtttactgatggagtcagagggggaaaaaatttacagcccagtggtgagactctcctgcaaagcctctggtttcacctttactggttacagcatgagcttggtccagcacgcttcacaacagggataggtgtgggtgccaacagtgagtgatcaagtatgaattctcagggttactttccatgagtacaaataaattaacaatctcaagcaacacccttttaagtgcagtctgccttacaatgaccaatctgaaagccaaggacaaggtcatgtattactgtgagtgacacagtgagggaaaccctgtgtgagcccagacacaaagctcaccgcagggagacaggaggggactatgtggtagatgctgctcagaaccaccagggggcatcaggaccatcagggagggtgcacagaaccaccaggaggggctcaggacaccagggggcgctcagaaccaccagggggccctcaggacaccagagggtgctcagaaccaccaggaggcgctcaggacaccagggggcgctcagaacactaggaggtgctatgaatcactagggggcgctcaggacacaagggagcactcagaaccaccagggatagctcaggataccagggggcactcggaaccgccagggggcgctcaggacactagggggcgctcagaaccaccagggggcactcaggaccatcagggagggtgcacagaaccaccaggaggggctcaggacaccagggggcgctcaggaccacaagggggccctcaggacaccagggggcactcggaaccaccagggggcactcagaaccatcagggagggtgcacagaaccaccaggaggggctcaggaccaccaggaggtgctcaggacaccagggggcgctcagaacactaggaggtgctatgaatcactagggggcgctcaggacacaagggagcactcagaaccaccagggatagctcaggacaccagggggcactcggaaccgccagggggcgctcaggacactagggggcgctcagaaccaccaggaggcactcaggaccatcagggagggtgcacagaaccaccaggaggtgctcaggacaccagggggcgctcagaacactaggaggtgctatgaatcactagggggcgctcaggacacaagggagcactcagaaccaccagggatagctcaggataccagggggcactcggaaccgccagggggcgctcaggacactagggggcgctcagaaccaccagggggcactcaggaccatcagggagggtgcacagaaccaccaggaggggctcaggacaccagggggcgctcaggaccacaagggggccctcaggacaccagggggcactcggaaccaccagggggcactcagaaccatcagggagggtgcacagaaccaccaggaggggctcaggaccaccaggaggtgctcaggacaccagggggcgctcagaacactaggaggtgctatgaatcactagggggcgctcaggacacaagggagcactcagaaccaccagggatagctcaggacaccagggggcactcggaaccgccagggggcactcaggacactagggggcactcagaaccgccaaggggcgctcagaagaagcagggggtgctcagaacaccagagggtgctcagaagcaccagggggcgctcaggacaccaaagggcactcatgagactgtggcaagggggtgctgagaaccacaggatgtgaccaagacaccaaggggcactcagaactgccagggggtgctcaggacaccagaggattctcagaaccaccaggggatgctcaggaaactagcgggtgctcagaaccaccggaggacactcagaaaaccaggggatgctcaggaaccaccagggggcgcccacgacaccagagggcagtcagaaccaccggggcatgctcagaaccaccagggggcgctcaggacaccaggggatgctcaggacactaggggcgctcaggaaccaccaggggacgctcaggacactagtagggtctcagaaccaccaggggatgctcaggacactagggggcgctcaggaaccaccaggggtcacccaggacaccaggggtcgctcaggaaaccagagggtgcccaggaaaccaggggaggttcaggaaccaccagggggcactgaggacaccaaggggtgctcagaaccaccagggggcgctcaggaaccaccagggggcgctcaggacactagtaggcactgaggaaccaccagggggcgctcaggacactagtaggcactgaggaaccaccagggggggctcaggacactagtaggcactgaggaaccaccagggggcgctcaggacactagtaggcactgaggaaccaccagggggggctcaggacaccagaggtcgctcagaaaaccagggggtgctcagaaccaccagggggcactcaggaaccaccagtgggtgttcaggacagcaagaatggctcaggacaccagggagcactcaggacctccaaggggctctttggaggcagctccatatcaggtacctggggaggatgaggtttccttttccaccttggtgattcctgacctggtcaagcaaaagtcttccccaggatctcttacgatgtcttccttgtaactcatggtttctttcacctataaaacattaacttagaacaggggttcaattcaacttttaactctgcctattttcagagttatactagcaatgatatatctcagtatattttttttaattgtgtatattcaatccaaagtctggctctatgcacaatttttttgttttctgtgctgtcagacacactattgtaaatgcttttctaacaactcagcatatgcatggggtccagtttcttttcctttcatcggctgtttgtgcagatgaaacaccactttaagggctcctgtcctccactttggcccctggtgttctgcttctcaaactttctccatcttctctttttctgtcaaaatattttatcttcctcagtctccatgcaggaaacaggaagtccttttacttcctgtcctccatgtctggtaaatcagttcacttcttttcatgatcactgaagccaaccaagtttaggagagtaacagttctccttagaatacactctacctgcagaccctctgccctcatcacacttttctagggtcctgcagacataacccccacccattcctctttttccctaagtaccacagactaggctctgcaacttatgctaccctctgtgtgctcagcccaggggctcagtagtgctttcatgaagtccaaatccctaatgtgtttgcccactctcagaccaccctccagcaagctgccattgtgattgaatcctgcaaagcatgggctgctttcagtttcctattgctggatgttctttattataaaggcatattggcaaataacgactagagtttgtattgaaaattaacgccaaaaagttttttaaaaagtttttcaaatagaaaagttctatcctgcctagtttaaaaaaatacaatgttactttaatcaatgatttaataaaaatttaagtgatgtttgtcttattagttattcaatttattaataactgactgatatttaaaaagtaaatactggctgggcgcagtggctcacgcctgtaatctcagcactttgggagggtgaggtgggtggatcacctgaggtcgggaattcgagaccagcctgaccaacatggagaaaccccctctctactaaaaatacaaaattagctgggcgtggcggggaagctgaggcaggagaatcgcttgaacctgggaggcggaggttgcggtgagccgagaacacgccattgcactccagcctgggcgacaagaccaaaactctgtctcaaaaaaaaaaaaaagtaaataccattgtacacttaagtaatatatttggcaagaatggcatttacattcattcaaaaatgaaactgcaaatacgagttacattcaattaaataattaaaataatatagaaaaaaatgggtgtgttgttttggtgtttaatatacattcatttttgcatggacgggtatatgtgtcattgctgggctgttgtgtatgtgtgcgtgtgtgtgtgtgtctgtgtgtacaactatgaagtttaaaatatattattaaattacgtagttatattaatccaaatttatcatgttaaaatattaggaaaaaaacaccagtagagaaattacagagaacatcagcaatgcctacagcatttacaagagtcacattaataacaaacaaactagttcaaatgtttagatatgacacatgcagtagaaaacgttcacatggtattaacacaaaaatggtgcacaactgaggaaattataatacgttcatgatattggctacataaatgcttatgatagtaatgcttttcatccatcaaatgcttatgataatgcttttcatccatcatattatagatgataaaacaactctataaacacttccatcactagcgtttaatatgagatgcctcacatctttttctgaaataaataaacatctgtccaccacttcgatgatcatttcaggattatcctctgaaataattatccataataattttagtaacaatattattttcagaagcctattttataaggtctttgaactattatttttatgattgttactttatattttacacactttttatttggaataattataggttatcagaacaattgtaaggaaaatacagtgtgttcacatccatctccaagttttcactaaagttaatatgtcaaaaaaaacatgggacatgggactaatatatttacattgataagtttctgtttattcagctctgggatttatttgaattttgccaatttttaacagtttccttttttcctttttcttttctttttgagataaggtgtcactttcctattgctttttgtttgtttctttgttcaacccacgtaaccacatcaaattcagtcaccatgttcctctcatatcttctggttaatcacagtttgggttcctgctgtcttcccattgaatattctataaatgaaactagtcaaataagttgattctggtcacttatatatttacctattttatcacgtttgttttgtcaatcacagtaagtgtcgaattcgctatctgttatagatgttagcctattttctatcccagatccattggttaaatctttggtgatgccttttagaaaactgatccctttaccctatgtaatatgccccttgattcctgaaagtcttatgtctaccttgtctgaatttaacatagctaagcacgctttcttttcgttcatattttcatggtccatgttttcctgtatttaacttttctatgtagagcaaatttctgtacagagctagtagttgggtcttgctttttaaatcaactataataattctattttaaaactggtattactatttttctgttaatttctgttttaatttggcattttatgatcatgtttatttctctattaacttattgtttagttcatcttttatgaatattgtattggccctaagatatacaataagaattgtgtataatcagattctaattcaaataacgtaaaacctcttcataggttgtagagctattataacttattcttctaaacactctttctcatccgttgtcttagtttattctcagtttgcacttatatgtgctataaaatataatatgtgcatttttatcattacatagacatatattagaacaattaaaaatataaaaactacatttcaacttcattttttcattcttgaccacatgttttatttggatagattcatgtttcggatgtatatcatatggctactcaccctggcagaaaatttgccaaagcacctactgaaggatgaatgcactagcaataaattttctcagaatcgatttgtcttacagggtattcatttgactttcgctttaaatgaaatttttaatatatatagaattccagtttgactttaatttgtaatttattttcttgtactcatgtattcattattttcttcctgaagatggtcacacattccattctgctgggccttcattatagatatttgtgtgtatctattcagggctatatttgcaatttatggatgccacaattatcagagttgaagtcagcttctgctgtccacagagatttcaagttcctcccatgatacttgcttttgtgtccctgtttgatcctgggtctttatatttagttttccccagggaggctgtctgtttcagctgtggaaagtgcaccctactgacagtttaaattgatgactgtgtggtgaaggaggttggacaaagcgggacttcctccaaccttctgactgagtctccttcttatgcaggagtagtaagcatagttctggggagtggccttccacattgtcctgtccttaactctttccccagggctggaacgtcttttcccagacacaactgtttttcaccagtgtccccagctttttacccactatccttaccctaaagagtaaggatttctttcctgaggaaggagatgggaggtgtttctggatcaagtttccttggtgtcgtctgtttccttttgtttctgttgacttcaccacagctcatatgacacatgctttggtggatttcccctggaggtagtggaggtgcattcaggcattccacaggagctgctgttcttttccccagtcaacaccacaagacaccagatgaggaagttgtccgtggatttttcaagttctctaggaaaagcttgcaagcactaggccaatctaacaccattagtacatgcatactaaaaaaaaaaaagtcattaagtatttctaggttagtctgtttctatctcaaatgccatccagtggcacctgccctacgtacactagcaggtaggtcctggttctctctgcaggctcctatcttctcagatttcagttttcttgtttgcttggtgaaatcaactcagatatgttgaatgttttttctctcttttatttgtagctgttcagcttcgttgttaatgaggtcagaataaaatcacagttttctcatttttttcacattcccacactgaatagctgctttccgtataaaagccagaaactgagagaacacattgaatatccattacaggtgaatgttaaacaatttgagatatgtttgtgtactggaataaaatgctgcattacaatcaagtcatcactcattcacataaaacatggccacattctcaaataatgtagggacctgagtgcccctccatctactggcctctcctggggccctagcctggccacaccttcttgcagggcagtcttggacgccctgggatcccgcaccaaaatttctgccctggcagaacatgcctgactggtggagagctccaatcgggcagccctcatgtgcacacaccagcttacacacttcctccgaatactgtaggttcacccaggcccacgtaacttcccacatcactttgcagtcacatgtctgtataggtgggttttgcttttcttgtcccaccattgcgtggagtgcagtcccctccccccaccccaaccaccatggcagaggaagctttggtggggaaaaagccagggccgctcctgtcagcgtcccgcacttgcgctaattctgcacagagaatagcagatcatctcacacattcagaaatcactcctgcttgtggggcatgaatacggcacccgggcctgtgcccacaagtgtcccatccctgagccaacacctcctccagtgtgaccttgaacacagtcaccaacagggccccacagacgcaatgcctctgccactgtggcgaacacctgcagggaggcaggcacccagacacccactagcactctgccacagctgccacacctccaacagcccaggacagtggattcctaaccttaaggagccggagaaccaagtcagggactagtataacttcccccagagtcagagcacacagtctaggtgttgggagctgagcactggccacctaaatttttccagaaatgaagccagttggctgaatccaccttataccacaatcaaaccctcaaggtcatccaatagggtaaaagaaaataaaaatgtatccaaaggtcagcaacttcaaagattgaaggtggataagcccacaaagatgagaaagaaccagtgcaaaagtcctgaaaacaaaaagggcgccctctttcctccaaacaaccacagcacctcttcaacagcagttctgaatggggctgagatggctgaaatgacagaaacagaactcagaatatggagagtgaaaatgtagatgaatacagctatttatggagaatactataaatgttcctcaaaaaataaagaaacaaaatctactgtagaatccagcagtctcactgctggctatgtatccaaaggaaatgaaatcaacatgtcaaagagatatctgcactccatgttcacgttcattgcagcattatttaaaatagtaaagatatggaaacatcctaaattcccatgaatggatgaatgaataaagaaaatgcatacagacacaacagagtaatgttcatccttaaataagaaggaaaccctgcctctgtgacagcatgcatgaatctagaggaccttatgccaagtgaaacaagccaggaacagaggaagagtcattcatgatttcactgtatatattaaagcagtagacttgcagaggtagagtagaatgttggttaccagggcctagaggggtggactgggaaagggagatgtgggttaaagtgcacaacgttccagttagaccggaggtataagttatgcctttctaatgcacagcatgtcaactatagctgataaggtagtatatatttcaaaattactaaaaaaataaacattagaatttccccactaagaaatgataaatttgtgaggtgatgaatataagcggcttgagttacccagttcataatgtatacatgtatcataactaaacaacatatgtcataaatatatgcaaaaattatttgtaatttataataaaataagtttcatatttaaataattacattaagaaaatgaacagaaactttcagatttcaagaatattttatatatatatatatatatcttaaaacaaacttgcaacagaatatagaaataagttttacgactcaatggaaaagaacagaattcaataaaaactggctaaaagaaacaacagctgcatcattatagaaaattctggaataatcagccatataaagattctcactctcttagaactagaattccgtaggacttgtaattcctcctgacctgggtgggaggcaaaaggaagaacagctaatggtgattcagtgagttttatacctgtgtgtacttctgtgctcactcagcagaaagaaaagaagaaaagaaagaaagagagaaagaaagaaacagaaagaaagaaagaaagaagaaagaaagaaagaaagaaagaaagaaagaaagaaagaaagaaagaaagagaaagaaagaagaaggaagaaggaaggaaagaaaagaaagaaagaaagagagagagggagagagggaaggaagggacagcagaagtcattgtggtgtgtgtgaaagcacaatccttgggctcccccacatccatctctactccagtcccatcaatgtccagcaaatacattttctaagatgaagtattttaaactttctaaatcctgctagaaaacccctcagctctttcagttttgctctatcacttgaattattgaattaaatctagtttttgtgggcctatcaataccataagccaaaataacacatgaagaaattgcactgagacacatgaaaaccttctgaaagctccataatttcagatctgcattcttatttccccgaacctaaatcactgaatagagactcagaacgagttgatcttgttcctgaacgtgcacagagccaaggacatcctgtctgtctggaacagctcaggtttgttcctgtttctcctagaggatataaaatcttgagttagggaaaaacagccagggacaccctgggctttgttcttctctcccctggaggcaggatgtccttcagagctttgtcccagtgggtaacacagctgctgaggtgtacaacccacgtggcctcgttttggtcacttttgcatggtgagcctgctttgcaccatggcctacaatatgcgtgtgtaactaatctgtctccatcttcaaaatgacattattccacatcaaatctagtgcaggtgcctcacacagaacattctcaattacctccatcattcataaaattgatgccattaatttcaagtatacatacatcagactcatttaacgtattgttattctcattgtttgaaacataacttttagatcaaataattaacaataataaaaatataaattttgaagtcaggtaatgtgatttctctagttgtgttctctttgctcagaatggcttgggctgttctgcatcttttgtttttccacatatattttaggattttttaaaaatttctgtgaagaatatcattgttgttttcatagggattgtactgagtctgtagattgctttaagtattatggacattttaacaatattgaatctttgaattcataaacatggaatattgttccatcttgtgtcctctttatttcctcaatgttttatagatttattgtagtttttttttactttgttcattacacattgtatgcctgtaccaaaacatcacatatacccaacaaatagaaatatatatactattatgtgcttataacaattaaaaattatgtatgtatattgaatctattcaaaatcagaaactatttctttttactgtttgtaaggtcttgtctctaggctataaaaagaatttgtaaaactcaacagaaagcataatataaacagaattctaaaatgagtgaaaatctgaacaaacacctcaccaagaaaaaatgttatctgaaaataagaatatataaaattgttcagtatcaattgtcataaactgatactcatatttaccaaatacaaaagtaaacatgatgtatttcaacagaattgattctcaaatatttgtatactcatacagtggaatactatcagtcataaaaactatgggttattaattcagaagacaacattttaacattttttctaagtgaaggaagatggacaaaagagactaagtattgtacaattccattcatgagacctgctaaatacagtaaaattaaaaggattttaaaaacaggtttgtgataggcagggcttttggggaaagacaagagactgacttggcaaagctcaggggatatttttagggtaaaacaaactgtgtgccattgtgatatgcctaatttcttattatatttgttcagagttaatagtgtacgtttcaaccaactcggtgattttatattttctatttgctgatagagacatgttcatttttgtcaatcactttgctaaatgtggctgagaggctgttgaaatgaacgctgagcaaatgtattcaccaaatctacaagagcaaattatttgccaattgctgattgagtggggtctataatgtatttgagattgggtgtggggatgttattgtgtgagatcatgatgtttagaccatgacactctctggtgagggatcactcattcattgcacatttaatgaaaggcaggtaggaggagcagaaggggatgagtcacactcctgaccacagccacaggttattgaaggcagaactgatgtaatcccctaaggtagaccactgcccctccaaggtgaccttatcctagagttgacacacatcctgggacaccagagacaactccttctctcccctttctctgcacttcagctggaagcaactgtctcaccgagcaccttgtgttaaggaatgagagttcctgttccaggtgtgagggcccaggtgcatccacttgatccagcacaagagcaagaacagccttccagaaaatgacatcgcctgaggtataaccagctctcacctgctgcagcttcctctgaataaaaaggaaactgttgaaacttcctcataagtgtcctgctgtgccattccctttgtccccacatgttcagttgtgtctgtccagatgtcacttttgtgtagggagattagggttctgcttccagtaccagaacacacatgacctcttaggggacttcagggttttgctgacatatgtgatgatcttaaaagtcattagctccatttctacatcaaaaaacatctgaaccaaaggagcacataggctcaggcctgtaatcccagcactttgggaagccaaggcagaggaatcacttgaggtcaggaatttgagaccagcctggtgaacatggtgaaaccccgtctctactaaaaaatatatacaaaaattagccaggcgtggtggcactagcctgtaatcccagctacttgaaaggctgaggcaggagaattgcttgaacccaggaggtggagattgaagtgagctgagatcgcaccacttcactccagcctgggcgacagagtgagcctccatctaaaaaaaaaaaaaatttatatatatatatatatatatatatatataataaatatatattatatatcatatatatattttatataatatatatgtatatttttatatattatacatacatatcaatatatgatatataatatgtatatataatatataatatgtatattcatatattatataatatgtatattgatatatattacacatatatattttgatatatatatatctccaaaccatctaaatatcaagtattttttaatccatctaagagctgaaattgctgaaaaaactactccctccaaaagctgtagagacaggcacatccacagtcacagcagagacttgctgacttggaagagaagctcctggagacacattggtgagaacatttacctggtgattatgctgaatgtctggaggacaaatgtggactagggggagggtgagcactcctagaggctgtacaccccacacttgtgtggacttgccctccagggccttcaggttctcgtggaagcaattaaaatagattccctatagccatgaactggggaggagtaatcacggagaaaagatgcacaaaaagacttttctagaaagctcatccaagggaaggtattctccaaaatcttagtttatgtgggggaaggaaatacttccaaattacagacccctcctcctcagccttcctctatcacgcaaatgataaaattagccaagaggagtcagattcaaggcggtagccctgggtgcagcatctgcagaagggaggaaagagagaaaatcagctgtatcactggagattccttgtgaaggtcactgctcaggagaagagggcaaccaaaccagggagagtcaactgtaagaacataccatgctcccctgccccacacattacctcctcaacagcatcattaatatggattaaagagggcagtgtgattgctttagatctgtttgagaaagaaagtcacatactgaggcctagggtcagggtcggcggcacttcccgtgagtaagatactacgaagaaggaaaaattaggggtccataactgtgaaaatcagccacagtgtgtgtgagaatgtttgtgtttgtgtttctgtgtgtttgagtaggagttattggaacagcggacgtggagtgagctttaatccacatccatctgcagcttcaggtattctcagatgcagtattcatctgcaagagccgaaatgagaaaagagccacctccaacccccccagagttttagcctccctttgtttccagtgatccagtgcatctagacctccaggaagtggactccctggtgattttagcgattcttctcttggagccaccctgaagaggacattgggtttccaaaggcccattcactatttcaagaagtggtgccatcagctcatgttgtcactgaaggagcattctgagccagggcacagtcacttcctagtgagctacagaggctgagagaaaaatgctctgtgagacccaatgggaagctccctgcagtgcaaggtctgggtggcagggagcgctagggcctcgcccagcacaggctgcagccctggagcaggtgcaagggaggctggggaggggttcctcccagggtctgatgtcttccttttctcggacaaacatgctttaataagttaaacaagactttagtaaagactattgatgtgtctttgtgtctttcagtatacagttctatttgtaggatttatctaacctaacaagtcaatgagaatcacatgtaaaaggagaaatttctaggattttcagatatcttaataggtaggagatggagaaaagggatggttttattaattcagtgcttgccaatcttaacagagacagtagtaagacatgcagaaagcaaagcccagaaaagtatgaaggtgtcaaagtgccatttaagtatgggttcacttggaggaccatgttctgcgggaacttgttttcagcagacaatctattttagcagagttctgggcatacaaggggacacacatcattaaacaaggattgggacagggacttcagcgtcccactgttgcatggcccataaattatgtgtgttctctttctcatcttggatcaagtctagagctatgaaatagtatccctcatgaatatgcaaataacctgagatttactgaagtaaatacagatctgtcctgtgccctgagagcatcacccagcaaccacatctgtcctctagagaatcccctgagagctccgttcctcaccatggactggacctggaggatcctcttcttggtggcagcagccacaggtaagaggctccctagtcccagtgatgagaaagagattgagtccagtccagggagatctcatccacttctgtgttctctccacaggagcccactcccaggtgcagctggtgcagtctggggctgaggtgaagaagcctggggcctcagtgaaggtctcctgcaaggcttctggatacaccttcaccggctactatatgcactgggtgcgacaggcccctggacaagggcttgagtggatgggatggatcaaccctaacagtggtggcacaaactatgcacagaagtttcagggcagggtcaccatgaccagggacacgtccatcagcacagcctacatggagctgagcaggctgagatctgacgacacggccgtgtattactgtgcgagagacacagtgtgaaaacccacatcctgagggtgtcagaaacccaagggaggaggcagctgtgctggggctgagaaatgaaagggattattatttttaatgttgtttacagtatgtcattaataaattgaaaaaaagtaacaatagaagtatatactctaattatatgggaactttgttttttcagttttttcatttttttttttttttttggtttgtttgtgacagagtctcactctgccacccaggctggagtgtaacggcacaatctcagctcactacaacctccacctcccaggttcaagcaattctcctgcctcggcctccagagtagttgggattacaggcacccgccaccatgcccggtgaatttttgtatttttagtagagacggggtttcaccatgttagctaggctggtctcaaactgctgatctcaggtgatctaccctcctcagcctcccaaagtcctgggattacaggcgtgagccactgcgcctggcccaattatatgggaattgtttatataattatcaccctataagcaaaattcatggaggaggaaaagctctactgaagaaagctgataccggcattcccatgaaagtatctgtgtagaagtaagtattaaaatcagttgaataggcaaggcatggtggctcacgcctataatcccagcactttgggagaccgaggcaggtggatcacaaggtaaggagttcaagatcagcctgcccaagatggtgaaaccccttctctactaaaaatacaaagaattagctgggcgtggtggtgggtgcctgtaatcgcagctattcgggaggctgaggcagagaattgcttgaacctgggaggtgaaggttgcagtgagccgagatcacgccactgcactccagcctgggcgacagagtgaaactccatctcaaaacaaaacaaaacaaaacaaaacaaaaaaacagttgaataaagtaccttagagtcatctgttcaattaacatgtttaactccaaagaaatactgaaaatattttccaaaaaggaagtgccattttacgttcctaccaacagtgaataagattttcttttctggagccttgtcagtattcactaatgctttgctgtgcagccgttgtaatattatagtaaatgagtagcagtatttaatggttgttttaaatatacatattcttaatacaaagtcttgatgaacacttttttatacattgttttatgaggtgtgtgttcagatctatgtatgccagaaatgcctggcagcgttaatttaagcacactgtgagaatgaccctatagtttatgaagaatgtatgttcagagctctgagctaagaaatccaggagctgtcaacccagaagtttattccttgtctgtgaaggacatctgaatccctggcctatcccttggaacacaggatgtccaggtgattgatgctctttgttaaatctggaggttgctaggtagagggtgctaagtgaaaatcataatataaactacacgtgttttacaaatggtagtggttttcctgtccaacacacttttcctgggccacattgtatgcaagtcctcaatacaccctaggtcttgttcatgggctccaggtctcctcttcagccttttggacatggtgccatgcctattacagtcaataggggtctagcatgacaactggtaggcccagaacaaggtcaaagaaaatcctgcaagctcttagacaacagtgtcaaggaaggggagacctgtggggaaatcccaggcaggccatgcacatctctgtgggcccaacagctgcaatccttgatggatggggcccgctgcatgtgtacggggatgcctccaaaatgccaaaagttctggaggacctgttgcctgaggtggatgtgacaatgtgacaaagtgacagtcagattcctgagctgtggcagctgttggccactcctgactgcactctgagcaaccactgaggcagagctcattgcacaggctagggtgtgtcagccacgagaacagttgtaactataatgagatgccgcctgtagggataggatagcaaattggagaccattgtttatttggtaggccatttaaagtgttgctgactgccacaccaatgcattaggactactatgactacgtcatcctgggagcctaagtcctggcgtccgatgtagagctccagtgggaaggagatgaaggttaggatgagtccataaaggttcttgctctgcagcccctgctttgctgtctcacttggtgaacagagaatgggaggtcaatgcggacaaagtccagggtccaggcttatcagtcaaatacttggtgtcatctggttacataagactatagttattccatatttcatcatagataagataagatgcaggtctactcatgtcccaccacaccaaagcagttggaaacctcccaaggcctcctgggacattggcgatcctttattccccatttcggcaaaccccttgggcccccatggcacttagacaagaaggtgccccactgcgactgttccaaaagggaggatgagggctctgaagaagctgaagtcacagtgaaatgaatacaaaccttgggagttctagtgcagggacagccctgtgaattggatgtagtcagttaccctgaggggtttaggtggggactgtgttaaaggcaaggacataagtgtgtgtccctaagaccctggtctcaaagacagaaggaagctgaagtgagatatactgtttaggagtagcaactgcactacatgtcatgccttacgagtgtaggatgtgacaaagagggccactccacatccggaacaacctttagcaggctggctaaaggatgccttccagacacaaaagccttggaatgccaggacacagtctgtagccaaatggtacttgtggtggtcaccaccaacataaaagtgggccaactgtgccagcagaagttagccccacagaactttcccccacctaagagaaggcagtgcaccacaatgcggaattccaccactgtggaattgggggagcttagaattggattcagacacaaggggagagagtggatcacagggtggcttctctatgggatagggggtggagagtattatactctctggactcaagatgagtaaaatgacacccatcacaaaccatccagccctatgatggcacctttatggtaagtggttgcaggctccaagggggccgggtccaatgaggaagatgcccccacagctcgttctcaatggcagactatagaagagttgcaggatatcttctgggagtcgagatgaggcatgctaattatgctgagaattattgaagtcccaacaatgaattgtttactgcaaaataaaagctacagttatgtattcagtgcctacccaatggcatggtgcactgatttccacgttaagccccctgggagggcagccaacatttcatgtgccccaggtagttgctgacttaggagaaaagaagaaactgagtaagcaagggatgcaccctactgtgatgaagaacaatggcaccaaaggaagagagacagccaaggagccagtcagggtggccagacaacgaatgtgctctaactggcaacacctaccagttctctgggcccatagcggcaataggtggttatggaagggccacggaagtcagaccggttgaactagtgatacgacctgggggactgccacccagaccctgtgtagtatacacagcttccatcctagaacacatgagaatggatatcttcttaggcgtgaccctccaaacaacggccagggaattccaacggagagttagagtggtgatatgtgtgaccaagcagaaggcaaactggatgccagtagagctgccaacccatggggagtcccacagctggagcaacaccacccgccctgggaggggaagatgatccaatcatgaagattgttaaggagctagcccaggtaggcattaggaggccactgcatggttcctacaacagacctgcatggcccatgcagaggccagttgagacatggagaatgacagtagattactgggagttaaataaggtggtctcccgagtgaatgcagctgttcctaatatctcctccagtctgacgagaataggagaggtgttagccacgtagcatttccttatcagtttagtcaataccttcttcagcatttctgttgccccagagtcaagatcaatttgcattaacctaaaaagaacaatggacttttactgtcttgttccagggatatttacacagcccaaatctcacagcctagtgacctccaacctcagtcgatgggctgacccaaaggggatacatgttttccactacattggtgttatcatgataacctctgagtcttttttcagcttataaattacagcccctgtcttgctgtctcacttgctgaatagaggatgggaggttaatacagacaaaatccagggtccaggcttatcagtcaaatagttggtgtcatctggttgggtaaaactaaagtcattccatctgccatcatagataaggtgcaggcctacccacgtcccaccacaacaaagcagctgcaaactctcaaggccttctggagcatcagtgtccttttattccttttatttgacatccctgaaggaggctgctaggggagactgtgtccctcctaaattcatgtgctgaagtcccaacccttggtccttcagaatgaaatcatacttggattagtgtcctttaaagaggtgaataagttaaagtgagattcctggagtggggccctaatgcaatctgactgttgttataagaagaggaagcaggagggagggtgcacaggccccgagggacggccatgttaccacagaacagtgagaaggcgccatctgcatgccagggagcgagacctcagaggaaacccacccagctggcagcttgatcttaggctttcatcctccataagtgtgaggaaattggttttgtattgtaagccatccgatctgtggtatttcgttataaaagccctataaaatgaatacagtaggtaataggagagcttctatacattgaaaaagtcggatggccagaaaaacctagacactcctgttcagacctgagcagggtgatggacctgctttgggacaggagaggggaagagatgaacccagcacccagacccagctgagcccattcctcagcaggccgtccctgggccggagcttgcacaggtgtgaaagagcctgtcttggtcttcaggggctcatggagttggacggagaatggtgtagactcaagaacacgtcatcggtgtgcccgtgtttatctgaatgggatgtgtttctagggtgtgctcatccccaaagaagaattaatcaggtctcttgggctaaaaagaggttgtggcatttgtgtgtattaataactgtggtcggacagtaaattatgttaaactgcttatgggaaggcacaatggaaagaaacactttgttacagaaggaaaaaaaaggtgattatttaaatgaggtgcctttgaaggtcaccatgccaagaggagcccatcacatgatagtgctggctttcatgttcaggagatcaggagggtccgtccgctggcttttatgacaccctagacagagctgagagtgtaatgtatgaatggaggggaagtggagagaggggaggccaaatgtttggtgggaatggagggtcactattggagccattaggaaatacacaagcatgaattatgctggaggacagaacagtgttcctggggaatattgtgttgctttgggagctgctgaacatacaggagtttcactgttcctagttctcaaattctctagactctctggacaacccagttttaaatattgggaatataggtaagacacattcgttattaaaaattattaagagaagatgtaggaagaaatttaaagtaatccatttggttatgaaaatttagttacagcgaactgtgatgtccgtttcttacttggaataatggaatgtaagtcattagtcatctcaacggttcatttttccataaccatcaattacaaaactgctgagtaatttcctgaattgcccaccatagaaactgacctcacatttcctcaatgagaaactgccagtcccgttgatccagcctcgttcttcccatcagggattttgtatctctgtggacgtgtggcacagtgctgcatatccatcggcatatggcctcaggaaaggcgccagcctatccatgcatgatgaagcttacttaggggatgaagcccgcatgctgggtgagccagtgccaacagctgaaagaatcaactgcctggtgtatgatgcttttatgaaaacaagcccagggcctcttgcattcttctgtattagattctctggtgaagatttttattcatttctgcctgaaattgccacatataattacctggaagcattacaataaactgatttggaagttaactgacttcctggtgaggttaaaatgagtgtcaggtgcatagtgagacagaccggagacatggatgcatagcaaacttgtgctcaccatggtttctatcttagttagggaaacttctgtaccttccttagatgttcaggcactccattgaggaccctggcataacattatttattgacagaccatagctcaaagtatagaactggatactaccaaggaggatatactattactattttatctttatcttaaaatatactcttccatctgaggtgaaaattaatccagatggtagaacttattgcagttactacagcattttagcaaatcaaaagccgcagaacaaacatatggacagatggcaggtatgttttcggaatcgtaaacaagttcgtgatgactgtaaaaccaaggggtgtctcacgagggctggaaacctctcacaatgaaacaacacaatgaggatctttgaaaagtactctgacctcctggtgagctggctgatatggaggctgagctccatgtagaaagccaaaggaatttctgcaggacgtcatcatgccaagcacagccgtaacctgggtcccagcccttttcacacgctcaatggttagatcttgggagggaatcaaagaagccatagtaaaatatcaaaatttaaaccccgattttgaatttaaaaagtgttaaaatatggttgtggcctacactcagaaaatctgtgtccttcagatggtttctcagtggcaccagatggtttcaagtggctattcattaagtttctcagtgaaattaccagacatagaataaataaattgtcactgtcttaaatcaacccatgggaaaggaaaactgtgtaaatacagcagagaggaaacattgctcaagggaaaaacaatctccagaaagtattgttaaagaaacagaggccctctttccagccagcgccgagcgatgggcacctctcgggacaactggcacaagggccgcaaagctgggggcaagagaaggccctgccacaagaagcggaagtatgagttggggcgcccagctgccaacagcaagactgacccgtgccgcatccacacagtccgtgtgcgaggaggtaacaagaaatactgtgccccgaggctggacgtggggaatttctcctggggctcagaatgctgcgctggtgaaacaagggtcatcgatgttgtctacaatgcatccaataacgagctggttcgtaccaagaccgtggtgaagaattgcatcgtgcccatcgacagcacgccctaccgacagtggtacgagtcccactgtgcactgcccctgggccgcaagaagggagccaagctgactcctgaggaagaagagattttaaacaaaaaacgatctaaaaaaattcagaagaaatatgatgaaaggaagaagaatgccaaaatgagcagtctcctgggggagcagttccagcagggcaagcttcttgcgtgcatggcttcaaggccgggacagtgtggccgagcagatggctatgtgctagagggcaaagagttggagttctatcttaggaaaatcaaggcccagaaaggcaaataaatccttgttttgtcttcacccatgtaataaaggtgtttattgttttgttcccaaaaaaaaaaaagaaagaaaaagaaacagaggcatcacacttactagaaaaacatattctatttcatatattatggggatatgacgtgatgttttgacatatgcgggcattgtgaaattattaaatcaagtaaataaacatgtccatcacctcacatacttattttttatggtgtaaacgtgtaaaatctactctcttatcagttttcaagtatatagtacattagtatcatggaagtcaccatgctgtgcaatagatcttcaaacgaattccttctatctaaccaaaactctgtaccctttcaccaacgtctcagctttcacatgcccctgacgccagcccctggtaggcaccattctactctctactctgagttcaacatttttagattgcatgtgtaagtgagatcatggagtaattttttatacctggcttatttcactcaacataaagagtcaaatgctcaacatcactaatcatcagggaaatgcaaattaaaaccacgataagatatcacctcacacatgttacaatggcttagtctcagtctgtctttttgttactataaccgaataccagagactgggcaatttctaaagaaaaggaatttatgctttatggtgcttgagtcagagaagtctaatatcaaggcactggcatctcacaagggccttctcactgcctcatctcacagcagaggtgggtgagcaagagaccatttgtccacgagagaaaagagaccatcttttattagaaattcactcctataataactaacccactccattgatagtgacagtaatccattcatgaggacagagccttcatgacttgatcacataataaaggtcccacctctcaacactgttgcattaaagattatttccagatcctaaactttgggagacacatttaaaccatagcattccattcctaatatcaaaatttatgtccttatcacaatgcaaattacattcattccatcccaattgtctccaaagtcttatccagcatcagtgcaaaagtctgaagtccaaagtctcatctaaatcagatatgagtgtgactcgaggcacaatttagcctgatataaattgtttccatctgcgagcctataaagtcaaaacaagttatctactttcaaatacagtgaacaatggggcaggtatgggatagaaattcccattccaaagctcagagagaggcaaggagaaagcggtgcctagttcaaaacccaacagggaaaaaaacattaagtcttatagctggaaaatcatcctctttaacggcatcttgtgcacactggggagggggatgggcccccaaggcctccggcagtcttgcctctatatattttctgggttcagtccactcagccgctctcacaggtgggactctcaggcctctagctctcctaggctgactggaaactctttgtggtacctccaaacccacatttctgcttggcattgtgctaagggcccagtgtggtgactctgtctctgcaacaagtcactgcccgagaccttaggctgtccttaggctgcccgagaccttaggccgtccacagcattctttgaaatctaggtggagaaagccatgccctcgtggttcttgtattctgcacacctgcagaattaacaacacatggatgccatggaagttgatgacttgtaccattaaagtgatggcttgagccacacctaggtcctcctgagccacagcatgggcagccaaggagtgctgtgcctggacaccgggaacagagtcctaaagtgcctgctagaagtcaggccatagatttccttcaaatttctcccaccatataacctcgttcatggctctgaacttccaccttacagaaggacctagggatgaacacaattcagccacgttctttgccactttatggcaaggatggcctttgctccattttccgatgagctattcttctttttctcctgagacctcatcagaacggcctttattgtccacggttctactgacattctaatggtcatcacctaaataatctctaagaagtttcagaatttcctcacagctctcttcttctgagtcctcaaaagaatcacctctagtgttctattcagggcaatccagactttttatagtctgatcctccaaattattccagtctttgtgcattactacatccacttctacattttggggtatttgttatcgcaacagccccacctcttgatactgatttttcgtcttagtccactttgtggtgcaatgagtgaataccacacactggctaaagtataaggaaaagaaatttattttctcgcagctctagaggctgggaagtcaatatcaaggtgttagcatctggcaagagccttcttgctgtgatgtccatgtggaaggcaggagagcaggtgcgaaggatggaaaggggtttaaactcattttttaatgaggaacccaggcctgtagtaactaatctgctaccacaatgagtaacctactctgacgataatggcattcattgcttcatgagggcagagccctcatgacctaatcatttcttaacattcccacctctggacactatggaatttgggattaagtttccaatacacatcctttctaaacagcaggggctttttaataggttgaccacccaaggctgcaggaggctctgaagcagtggcctgaggttggctgtcctttgtgagaatggagagaagtgaactgactcatggagacacaagtagatgaggtaaaggcattcattgcttcattacatggatggtgaggtcgattgaaggcattaacggattaaagatggtggcaaaaccgtctgaggtggagaccacggggagtccatcagaaatggaggacacgtcccaataaatggtgcttcatttccctgcaaagcagaagaaagcaaagaacaaaacacaacatcatagtgtacactgagcagtggattgagagaagagtttcctaaggcataactgacagagtggagaagacacacaaatctttgcatgatgctaacatttggactgtggcttcattatttcttattaatattttactgaaatatcgctagaaggagactgaaaatgaagtgtgaaaagttaaatgggatttctgctctatgtccttttcagatgagaggaactagggaattccagggaagaaacaataatagctgctgagcaaggcttttgcagggcaggacaaggaatccccaaagagaaaacggaaacctcagcttcactttgcatctgctcctgagccaggtcctgagcgacccctgtaggtcctgagtgcccctccgtaggttctgagcatcccttggttgctgggcgccctctggtggtgtctgagcccctctggtggtttctgagccccccgccttatgtctgatcctccctggtggtgtccgagtgcccctgctagtgtctgagccccctggtggtgtctgagtccccttcttagtgtctgagccaccctattagtgtctgaggacccctgatggtgtctgagcccccagttagtgtctgagccaccctattagtgtctgagcccccctggtggtgtctgagcacaggagagctcctctgaaggaagggtctacatggggacaggcgtgcttgtctcagggaagggtccatgtggggacaggtgtgcttgtctgaaggaaggttccacatggagacaggtgtgcttgtctcagggaagggtccacatggggacaggtgagcctgtctgaggggacagaagtgcttgtctcaaggaagggtcctcatgtggacaggtgagctcttttgagggaagggttgacctggggacaggcatgcttgtctgaggtaagggtcctcctggggacaggtgtgcttctctcagggaagggtccacgtggggacagaggtgcttgtctaaggcaagaatccaagtagggacaggtgagctcgtctcagggaagggtccaggtggggacagttgtgctcatctgagagaagcgttgaagtggggacaggtgtgcttgtctcaaggaagggtccatgtggggacaggtgtgctagtatcaagaaagggtccacatagggacaggtgtgcttctctcagggaagggtgcatgtggggacaggtgtgcacatcggagagaatggtccacctggggacaggtgttcttgcctcagggaagagtccaccttctcagggaagaagtgtgctcctctgagggaagggtgcacatggggacaggtgtgcttgtctcagggaagggtccatgtgggaacaggtgagctcatctgagggaagagtccacgtggggacaggtgagctcatctgagggaagggtccacatggggacaagtgacctcgtctgagggaagggtccacgtggggacaggtgagctcgtctgaaggaagggtccacttggggaccggtgtgctcctctgagggaagggtccacgtggggacaggtgtgctcctctggagggaagggtccacgtggggacaggtgagttcatctgaaggaagggtccacatggggacagttatgctcctctgagggaagggtccatgtggggacaggtgtgcttgtctcagggaaaggtccacgtggggacaggtgtgctcaccttggggaagaggacagatgagctcatctcagggaaggggccatgtggggacaggaccaagggttgggacttcagcacaagaatttaggaggaacacagtcttccctagcagcctccttcagggatgtcaaatattttccttctgttccctgtgaaagccttaaaggggtagggaaagggcgttcaacctgcacactcgtagaggggaaaccagcttcattagtaatcgttcatctgtggtaaaaaggcaggatttgaagcgatggaagatgggagtacggggcgttggaagacaaagtgccacacagcgcagccttcgaaacacaccacggtcacgttaagtttaaatggagtgaccacattcgccaggaaagggaaatatttacacttttgaagaaacagtaatttgtgtttctgattatgatctggccttggattttccctcccctcataagcaatgacagaattggcagaaatatgtgaaacgttagttctcagacatgagacacccacagagggccccctgtgcccttccctgagagctgatcagctcctgcatctgaagaaatgaccaaagaccaggagagaaccacacagaagcatcggagggacagcacctggggctctgatggggtcaggaatagcatctgttcccaatagatggactaagtaaaaagtatcataattcacaagagttttacatagcacagaagaaaaagttaccctatatcaactgttgatcttgtgaatccaggaactctggattcaaggtggtcgggcacatcttgatttacgcatttcagggacacatgagacatcagtcaatataagtaagaaggacattagttccatccagaaaggctgagacaactcaaagcaagtcctccccacttagggcttccaggtcacaggtaggtgagagacagatggttgcattcttttgagtttctgataagtgtttgcaaaggaggccatgaggatatgcacctgtctctgtgagcagagggacaactttaaatagactgggaggcagatttgtcctgagtggtttccagcttgacggggcccaagatattttcctttcacaatctggtaacttcaaacaaaacttcaaagccacaacaaaacaacacaacaacaaaaagaataagacatgggtacttattaagagtagaaaaacattcagtccccaaggaaaatattggcagtgtctacctccacatgacaaaggagtaagcagtgtgagccacagaaaggagcactattaacccacagagcaaccgagaataacacgggtgatgcgagggcattggacgcacatcattgcattttgtagattcagaaagaaacggaaaagattgacggtggtaaaagagacagccctgcttccctctcccttttccctccccgatgaggcctcacagccatgaccctcagcctcatcccgcagtgcagcagctgccgtcctgtccaggcccaccccctgccccgccctgggactgttacctcattccctcccggagtccaggtgccccccggggtgtggtgcgggagcctggggaggccctttgttctctgtcagggtctccctgggagggacgcagccaccgcagctggttggggcctggcttcgcccaggacagtcctttcctttcccattgtctttggatgactatcgctgggctgggacatgaggcgggcagaggcgcgggtcacccttaggacccccctcttgctgctggggctctgggcgctcctggctccggtccggtgttctcaaggccgtcccttgtggcactatgcctcctccgaggtggtgattcccaggaaggagacacaccatagcaaaggccttcagtttcccggctggctgtcctacagcctgtgttttggggtcaaagacacgtcattcacatgcggaggaaacaccttctttggcctagacatctgctggtgacaactcaggatgaccaaggagtcttgcagatgggtgacccctacatccctccagactgctagtacctcggctacctggaggaggtgcctctgtccatggtcaccgtcgacacgtgctatggggacctcagaggcatcatgaggctggacgaccttgcgtacgaaatcaaacccctccaggattcccgcaggtttgaacatgttgtttttcagatagtggccgagcccaacgcaacagggcccacatttagagatgatgacaatgagacagaccccctgttctctgaagcaaatgacagcatgaatcccaggatatctaattcgctgtatagttctcatagaggcaatataaaaggccacgttcaatgttccaattcatattatcgcatatatggcaatattacaacttgttccaaagaggtggtccagatgttcagtctcattgacagcattgctcaaaatattgatctgcggtactatatttatcttttgaccatatataataatcgtgacccagcccctgtgaatgaatatcgaattcagagtgcaatgtttacctattttaaaacaactttttttgatacttttcatgttcattcatccacactacttattaaatacgtgccacatgaatctaactatgaacctgaaaggtataacttctgttcccgtatagccctgttacacattggtactccaggcagacattatttattggtagccgtcataataacccagacacagatgagaagtattggtctggagtatgatgataactactgcacatgtcagagaagggcctcctgcattatgcagcgatttcctgggatgacagatgcgttcagtaactgttcttatggacatgcacaaaattgttttatacattcaggccggtgtgtttttgaaacacttgctcctgtgtataacgaaaccatgacaacggttcgctgtggaaacctcatagtggaggggagggaggaatgtgactgtggctccttcaagcagtgttatgccagttattgctgccaaagtgactgtcacttaacaccggggagcatctgccatataggagagtgctgtacaaactgcagcttctccccaccagggactctctgcagacctatccaaaatatatgtgaccttccagagtactgtcacgggaccaccgtgacatgtcccgcaaacgtttatatgcaagatggaaccccgtgcactgaagaaggctactgctatcgtgggaactgcactgatcgcaatgtgctctgcaaggcgatctttggtgtcagtgctgaggatgctcccgaggtctgctatgacataaatcttgaaagctaccgatttggacattgtattagacaacaaacatatctcagctaccaggcttgtgcaggaatagataagttttgtggaagactgcagtgtaccaatgtgacccatcttccccggctgcaggaacgtgtttcattccatcactcagtgagaggagggtttcagtgttttggactggatgaacaccatgcaacagacacgactgatgttgggcgtgtgatagatggcactccttgtgttcatggaaacttctgtaataacacccagtgcaatgtgactatcacttcactgggctacaactgccaccctcagaagtgcggtcatagaggagtctgcaacaacagaaggaactgccattgccatataggctgggatcctccactgtgcctaagaagaggtgctggtgggagtgtcaacagcgggccacctccaaaaagaacacgttccgtcaaacaaagccagcaatcagtgatgtatctgagagtggtctttggtcgtatttacgccttcataattgcactgctctttgggacagccaaaaatgtgcgaactatcaggaccaccaccgttaaggaagggacagttactaaccctgaataacactaattcagcctcccgatccctgtaaagatacagagaatataacagcaaaatctatgaaacaggatcaggggaagggatggcaaagctcaagtccacatttcttgaagtccacaggaagcacagggtcctgtttcacatcacagggaaacgggaggcattggcttctgtcccaggttcttgtaggtcgctgatgctcactctgaaataaatcttcaaaaacacacattggtgccttccacattttcttagactcctctgggagcccaaacttggccagaacctcttgcctggagagacatgaatgagcatctggctcttgtcctgaggtctctggtcccagaattaacggaagttgccaccagctccttacagggaacattcatgacatttctccagaagagagctccagagcaatgagcttcctcattccccaggtaatctgtccttctctaaacccgaagtcagtttagggtgatccagggctactccctgttccctgtctgttcctcacgggggtgctgtgggctttgcagtgagagggacttgggttcaaatcccccaccaagcaaatccccctacctggggccgagcttcccgtatgtgggaaaatgaatccctgaggtcgattgctgcatgcaatgaaattcaactagaaaaataggtagacgtgaggggcaagctgtctgtcatttagtgtgagctctgtgagtggcagctgccccctttcttcctgcccccacatttccttgaactgaaacaggaagggaagctgagtaagtcgtgatgaggaagagaaaccaggcttgtagcagcacaggctggtccgggtggaaaacagggctaggtgtatcactgagttattgtaaaggaaaatggaagttaaatgtataaataactgaatgagataacattttattttaacttaaaattcacactaatattgacttttaaaatgcagtgtagatatgtcagagagaatttcaaaggcaaagcccaccgacggaagaaatcacccttcccataccatccacagaaaactgttggtattctagggtagtactgagatctagcatttttctgaatacatctgtggttctagatgtcctgcttccatagatattgtttagaattcccacccctttctccaaacacagcttgatatcctttctctgaacctgttagaaatttcctccattcagctgtcataaagatgcgagcaatccattcctgtgcctctgtcagtgtgttctattattttgtggctgaacgctaatggacagttaagtgtgaggtcagtgaatacagtgccctccctctatgtgtccttcgggtgtgaggggttttgctgatagagcagcaggccccatcccaccctttatgcatctccgccccccacctcacgctccagctgacctctcccctgtggcctggggcgttccccagggggaatgacctctcctctctccagggcccacccactcagtgcccgtgcaagaccaccacgcttggcacggccccacctcgtgtcagggcctgtgtcccctgccccaccccctaaacagatgggaaccactgggactctgctcagggcagggggcggaggtatgtgtgaaaggaaggcaaatgtgcactctgttggagaaatattataggtagtttgagcaaaaaatctaatgccatgggaacttttagaatgatacgtattttaacaaagaacatgaccaatagagtttgtattgaagccaggaaaacactatttagagcaacagcaatatcaaaaacacaagccaacagttcaccaagaaaaaccaccattaaccccatggaaatggtcttccaagagcatcggcacttaaatcctggaaatctgcctgcctcagcacctgttgtcctgacctgccctcctgtgtgtcctaatcactcccaaacacggggcctgcactgtgggagattcacactgtgccaggtggagggagcaggacaactgctaacaggttgttggtgtggatgccgaggccacccaagcaggtgtaaactcccacctgtggggcagggaagagtgcacgggagacatgtcccgggcatagggtgagggagagctgtgggggctctgggttctgaagtgggttctgaagagggttctggcctggcagggataagaccaaccagcatgtgaggccaggctggagtctggacctctgaagctgcaagggtcatgggctgcttggccccaggggctgtcctggttctctatggagtactttcaaacattctttcttcttccaatccccctccttctctcccaaagcctgcatctcccaaatcctctttgtcggatcctcggcttcactctgcatccgtcctgagcatcgatcttccaattccatcctcttctcttctgctatgtctaagctgctgtgaagccacctgctgtaatttactgctttatatttaatattgtaccgtacatctgttctgtttccctcatcataaatgcttcatttcatgctcagcatctgagaacacaaggccttgtcagctgtcacctccttccgttctctgtttccttcctcctatccccatattgctcatcatgtccagtctcctgccatcctgaatgcttctgatggaaggtctgagatgtctcatgagcactgtgaagattctttgtaatgtgagcttgttccaggcaggaattctccttcacccagccctggaagccaagtataggcagatggccatgctcaatcaaagactgagctaacttaacagtggctttggttttaaggtttctccaatccccagggcacaggatttcagggaattcaggtgagagtctgggtgttacccttcaggaggctgtaaactccatttcacctagtctacaccacagactatggaaactatatatatatatagttctgtccctctagagaaacctaatatgtatatatacaatatataatacgtattatatattatatataatacgtattatatattatatatattatatatatattagagtttattgaggagtattaaactcacaatcacaaggtcccacagtaggccatctgcaagctgaggagcaaggaagccagtccgagtcccaaagctgaagaatttgaagtctgatgttcgacggcaggaagcatccagcacaggagaaagatgtaggctgggaggctaagccagtctagtcttttcacgtttttctgcctgctttatatcctggccacactggcagctgattagatggtgcccacctagattaagggtgggtctgcctttcccagtttactggctcaaatgttaatctcctttggcaacaccctcacagacacacccaggatcaatactttgcatgcttcaatccaatcaagttgacactcagtatcaaccatcacaagtccaccccttgtcaacttgaacccatacaaatctcctgagatcatacataatcttcaaataaagacaataataaggtcataattacacctaatgtaatacaactatcttttgtacaaccagaaatgcaccaatccccaacccaaatgctattatgtaaagttaagaacacttaaatgctgatatgaagtcaataaattttatgtcacatgataaaggaaaaaagaaatgaaggaattttcttagtacaagtgtgtacatgcacaaacatgtttttaacaaaagaagaaggaaatactgatgacaattacagtcctcatttctgcaactgatcacgtggttgtagctggtattgatgactaccttcttctactacccattctgtattccctttgccttcagcaagcatcacagcaggtagagttttttctcctagtggagtgatgcaaaccttcattcctgaagggtctgggccatttgtagtcctgcctggattgggctgttgtagtttcccgttgaccttaatgacagggcatggtaatgttaagagacgccctaatggatctcctgtattccatacatattcttccttacctccattgtggagtaatagactgattgcatcttgatagtccaggtcaatcagcccagccaacactgtaactcccctcttagcctgtggacttaaaggtaggaggggcccaaagtggccaggtggaaatctttacttccagtttaatggaattgttgttgtttctcctgatggcagcattattcccactggaactaagacctctaggccaacagaatgtaatgtcatgggaccaggaagcaaaaattttgctagtggatcactaggggtgatggtgaatggtgccatttccacttccaccccttgattcctggatccatgaattatggctatgggagaaagagtaccatatattggatgctgatttggagcatacatggccttttggagagctttgccccagccctgcaaagtattggagcctagttgacattgtaattgtgactttgaaaggccattccattcttctatcaatccagctgcttcaggatgatggggaaaatggtaagacaagtgaatcccatgagcatgagcccactgccacacttctttagccgtaaagggagtgccttggtcagaggcaatgctatgtggaatactgtgacagtggataaggcattccatgactccacagatggtagtcttggcagaagcattgcatgcatatctgcagtaagtgtctatttcagtgaggacaaacctctgccctttccaggatggaagaggtccaatataatccaacctgccatcaggtagctcactgatcaccctgaggaatggtgtcatttgggtagagacccagagccaaaccagatcacgccacccaacccctcccaaatctcatgtcctctttgcatttcaaaaccaatcatgccttcccaacagtcccccaacatcttaactcatttcagtattaactcaaaagtccaaatccaaagtcacattggagacaaggcaagtccctttcatctatgaacctgtaaaatgaaaaacaagtcagttacttccaagacaaaatgggggtacaggcattagatacatgctcccatttcagttgggagaaatgagccagaataaaggggcttcaggtcacatgcaagcccaaactccagtggggcagtcattaaatcttaaagcttcaaaataatctcctttgactccattcctcacattcagggcatgcttatgcaaagtgggggctcctacaaccttgggaagctctcaccctgtggctttgcagctctgaccccatggctgctctcatgggctttgcagagttcagccctcctggctgctctcattgagtgcatgcagcttttccaggtgcacagtgcaagccgttaatggatctaccattctggggtctgaaagatggtggccctcttctcacagccccattagtcactgtctccagtggggactctgtgtgggggctccaaccccacatttcccttctgcactgccctagcagaggctctccatgaaggctttgcccctggcgcagacttctggctggacatccagtcatttctataaatcctctgagatctgggtggaggatcacaaagctgaactcttctcttccgcacatccctaggcccaacatcatgtagaagccaccaatgattggggctttctgaagcaatggcctgagctgtacattggacttttttagccacagctagacctggagcagctgggacacagggcaccaagtcccaaggctccaaagagaagctgggccctggacccagcccatgaaaacatttttccctgataggcctccaggcctgtgattggaagggctgctgcaaagatctccgacatgccctggaaacattttccccattgtcttgattattaatattcatctcttcattacttatgcaaatttctgcagccaacttgaatttctccctagcaaatgtgtttttctttactaccacatggccaggctgcaaattttccaaacttttatgctctgtttcccttttaaaaataagttcctatttcagatcatctctctcaagggcaaagttccacagatttctagggcagggacaaaattccatcaagcttggttttatacattttagagaggcatgagacatcaatcaaatacatttaagagacacattggtttggtccagaaaggtggaacaactcaaagctagggcttccaggctataggtgaatttaaatattttctggttgacaattggttgagtttgtctaaagacctgggatagatagaaaggtaatgttcaggttaagataaagattgtagagtccaaagttcttttgaagtcttatagtggctgcccttagagataataggtgacaaatgtttcctattcaaatcttagttgaactctttaggattgggaggttctagaagaaaaagatctagctatgttaatagagattctttacagatgcaaattttcccccacaaagaacagctttgcagggccctttctttctttctttctttctttctttctttctttctttctttctttctttctttctttcttttttagatggagttttgctcttgttgcccaggctagagtataatggcacgatcttgtctcaccacaacctccacctcctgggttcaagtaattctcctgcctcagtctcccgagtagctatgattacaggcatgcaccaccacacccggctaattctgtatttttagtagacacagggtttctccatgttggtgaggctggtctcgaactcccaacctcaggtgatccgcccacctcagcctcccaaagtgctgggattacaggcatgagccaccatgcccggcctgcagggccatctcagagtatggcaaagaaacatgttttggggtaaaatattttgattttcttatttgtctcataatgttatgccagagtcagtttggaaagtaaatcatgatatataggtttaaataaaacccatctgatgagaatttatgatttgtagagcatgcctccccagactctttagataggaatttgggcaagatgaaaaaaaaatcagagtttagtcctcactacctaagaccagctcagcttggacttcactgttcatgtcactatcagcattttagtcaaaaccactcaataagtctctaggaagttccaaactttcccacatcttcccttctcctttcaagttctccaaactgttccaaccgctgccaggaggtacccagttccaaagttgcttccagattttgagttatctttatagcagttccccactcctggtaccaatttactatattagtctgtttccacagtgctataaagaactgcccgaaagtggttaatttgtaaagaaaagaggtttaattgactcacagtgctgtgtggttagggtcggaggctcaggaaacttgcaatcatggtggaagtggaagcaggcatgtgacacatggcagcaggtgagagagagaaagagagagagagggaatgaaggaggaaccaccatacatggataaaaccatcagatctcatgagaactcactcactatcaggagaacatgaggacagcatgggggaaaccacccctatgacccagtcacctcccaccaggtccaccccttgacacataaggattactatttgagatgagatttgtttaatgacacagagccaaaccacatcagcatgtgacaaaggtctaatatcaagaatctatgagggggcagttccaaaatggctgaataggaacagctccagtctacagctcccagcatgagctacacagaagacaggtgatttctgcatttccaactgaggtactgggttcatctcacgggggcttgttggacagtgggggcaggacagtgggtgcagcccaccaagagtgagctgaagcagggcgaggcattgcctaacccaggaagtgcaaggggtcagggaattcccgttcctagccaagggaagcggtgatggacggcacctggaaaatccggtcactcccaccctaatactgcacttttccaacggtcttagcaaatggcacaccaggagattatatcctatgcctggcttggaggttcccatgcccacggaacctcgcttattgctagcacagcagtctgagatcaaactgcaaggtggcagtgaggctgggggaggggtgcccacaattgctgaggcttgagtaagtaaacaaagtggctgggaagctcaaactgggtggagtccactgcagctcaaggagacctgtctgcctctgtagactccacctctgggggcagggcatagctgaacaaaaggcagcagaaacctctgcagacttaaatgtccctgtctgacagctttgaagagagtagtgtttctcccacatggactttgagatctgagaatggacagactgcctcctcaagtgggtccctgacccccgagtagcctaactgggaggcaccctccagtaggggcagactgacaccttacacggctgggtgcccctctgagatgaagcttccagaggaattatcaggcagcaacatttgctgttcagcaatattcgctgttctgcagcctctgctgctgatacccaggaaaatagggtctgcagtagacctccagcaaactccaacagacctgcagctgagggtcctgactgtcagaaggaaaactaacaaacagaaaggacatccacatgaaaaccccatctgtacatcaccattatcaaagacaaaaggtagataaaaccacaaagatggggaaaaaacagggcagaaaagctgaaaattctaaaaatcaaagtgcctctccccctccaaaggaatgcagctcctcgccagcaatggaacaaagctggatggagaatgactttgatgagttgagagaaggtttcagatgatcaaacttctccgagctaaaggaggaagttggaacccattgcaaagaagctaaaaaccttgaaaaaagatcagatgagtagctaactagaataatcagtgtagagaagtccttaaatgacctgatggagctgaaaaccatggtatgagaactacgtgatgaatgcacaagcttcagtagccgattcgatcaactggaagaaagggtatcagtgattgaagatcaaatgaaagaaatgaagggagaagagaagtttagaggaaaaaaaagtaaaaagaaagaaacaaaccctccaagaaatatcagactatgtgaaaagaccaaatctatgtctgattggtgcacctgaaagtgacagggagaatggaaccaagttggaaaacaccctgcagtatattatccagcagaacttccccaacctagcaagacaggccaacattcaaattcaggaaatacagagaaccccacaaagatactcctcgagaagagcaactccaagacacataattgttagattcaccaaagttgaaatgaaggaaaaaatattaagggcagccagagagaaaggtcgggttaccctcaaagggaagcccatcagactaacagctgatctctcagcagaaactctacaagccagaagagagtgggggccaatattcaacattcttaaagaaaagaaatttcaacccagaatttcatatccatccaaactaagcttcataagtgaaggagaaataaaatcctttacagacaaacaaatgctgatagattttgtcatcaccaggcctgccctacaggagctcctgaaggaagcactaaacatggaaaggaacaactggtaccagccactgcaaaaacatgccaaatcataaagaccaccaaagcgaggaagaaactgcatcaactaacgagccaaataaccagctaacatcataatgacaggatcaaattcacacataacaatattaacctttaatgtaaatgggctaaatgctccaattaaaagacacagactggcaaattggataaagagtcaagacccatcagtgtgctgtattcaggagacccatctcacatgcagagacacacataggctcaaaataaaggcatggaggaagatctaccaagcaactggaaaacaaaaaaaggcaggagttgcaatcctagtctctgataaaagagactttaaaccaacaaagatcaaaagagacgaagaagaccattacataatggtaaagggatcaattcaacaagaagagctaactatcctaaatatatatgcatccaatacaggagcacccagattcataaagcaagtccttggagacctacaaagagacttagattcccacacaataataatgggagactttaacaccccactgtcaacattagacagatcaacgagacagaaagttaataaggatatccagcaactgaactcggctctgcaccaagcagacctaatagacatctacagaactctccaccccaaatcaacagaatatacattcttttcagcaccacaccacacctattccaaaattgaccacatagatggaagtaaagcactcctcagcaaatgtaaaagaacagaaattataacaaactgtctctcagagcacagtgcaatcaaactagaactcaggattaagaaactcactcaaaaccactcaactacatggaaactgaacaacctgctcctgaatgactactgggtacataatgaaacgaaggcagaaataaagatgttctttgaaaccagtgagaacaaagacacaacataccagaatctctgggacacattcaaagcagagtgtagagggaaatttatagcactaaatgcccacaagagaaagcaggaaaaatctaaaattgacaccctaacatcacaattaaaagagctagagaagcaagtgcaaacacattcaaaagccagcagaaggcaagacataactaagatcagagcagaactgaaggaaacagagacacaaaaaaacccttcaaaaaatcaatgaatccaggagctggttttttgaaaagatcaacaaaattgatagaccactagcaagactaataaagaagaaaagagagaagaatcaaatagatgcaataaaaaatgataaaggggatatcaccaccgatcccacagaaatacaaactaccatcagagaatactataaacacctctacggaaataaactagaaaatctagaagaaatggataaatttctcgacacatacaccatcccaagactaaaccaggaagaagttgaatctctgaatagaccaataacaggctctgaaattgaggcaataattaatagcttaacaaccaaaaaaagtccaggaacagatggattcacagccgaattctaccagagctacaaggaggagctggtaccattccttctgaaactattccaatctatagaaaaagagggaatcctccctaactcattttatgaggccagcatcatcctaataccaaagcctggcagagacacaacaaaaaaaaagagaattttaggccaataaccctgatgaacatcaatgcaaaaatcctcaataaaatactggcaaaccgaatccagcagcacatcaaaaagcttatccaccatgatcaagtgggcttcatccctgggatgcaagtctggttcaacatacgcaaatcaataaacgtaatccagcatataaacagaaccaacgacaaaaaacacatgattatctcaatagatgcagaaaaggcctttgacaaaattcaacaacacttcatgctaaaaactctcaataaattagatattgatgggacgtatctcaaaataataagagctatctatgacaaacccacagccaatatcatactgaatgggcaaaaactacaagcattccctttgaaagctggcacaagacagagacaccctctctcaccactcctattcaacatagtgttggaagttctggccagggcaatcaggcaggagaaggaaataaagggtattcaattaggaaaagaggaagtcaaattgtcgctgtttgcagatgacatgattgtatatctagaaaaccccatcgtctcagcccaaaatctccttaagctgataagcaacttcagcaaagtctcaagatacaaaatcaatgtgcaaaaatcacacgcatttctataacccaataacagacaaacagagagccaaatcatgagtgaactcccattcacaattgcttcaaagagaataaaataccttggaatccaacttacaagggacgtgaaggacctcttcaaggagaactacaaaccactgctcaatgaaataaaagaggatacaaacaaatggaaaaacattccatgctcatgggtaggaaggatcaatatcctgaaaatggccatactgcccaaggtaatttatagattcaatgacatccccatcaagctaccaatgactttcttcacagaattgggaaaaactgctttaaagttcatatggaaccaaaaaagagcctgcaatgtcaagtcaatcctaagccaaaagaacaaagctggaggcatcacgctacctgacttcaaactatactacgaggttacagtaaccaaaacagcatggtactggtaccaaaacagagatacagaccaatggaacagaacagagccctcagaaataatgccgcatatctacaactatctgatttttggcaaacctgacaaaaacaagaaatgggaaaacgattccctatttaataaatggtgctgggaaaactggctagccatatgtagaaagctgaaactggatcccttccttacacattatacaaaaattaattcaagaggattaaagacttaaatgttagacctaaaaccataaaaaccctagaagaaaacctaggcaataccattcaggacataggcatgggcaaggacttcatgtctaaaacaccaaaagcaatgacaacaaaagccaaaattgacaaatgggatctaattaaactaaagagcttctgcacagcaaaagaaactaccatcagagtaaacaggcaacctacagaatgggagaaaatttttgcaatctacttatctgacaaagggctaatatccagaatctacaatgaactcaaacaaatttacaagaaaaacaaacaaccccatcaaaaagtgggcaaaggatatgaatagacacttctcaaaagaagacatttatggagccaaaagacacatgaaaaaatgctcatcatcactagccatcagagaaatgcaaatcaaaaccacaatgagataccatctcacaccagttagaacggcgatcattaaaaagtcaggaaacaacaggtgctggagaggatgtggagaaataggaacacttttacactgttggtgggactgtaaactagttcaaccattgtggaagtcagtgtggcgattcctcagggatctagaactagaaataccatttgacccagccatcccattactgggtatatacccaaaggattataaaacatgctgctataaagacacatgcacacgtatgtttattgcggcactattcacaatagcaaagacttggaaccaacccatatgtccaacaatgatagactggattaagaaaatgtggcacatatacaccatggaatactctgcagccataaaaaaggatgagttcatgtcctttgtagggacatggatgaagctggaaaccatcattctcagcaaactatcacaaggacaaaaagacaaacactgcatgttctcattcataggtgggaattgaacaatgagaacacttggacacaggaaggggaacatcacacaccagggcctgttgtggggtggggggagtggggagggatagcattaggagatatacctaatgttaattgatgagtttatgggtgcagcacaccaacatggcacatatatacatatgtaacaaacctgcacgttgtgcacatgtaccctaaaacttaaagtataataaaaaaatttttaaaaaaagaaacacctgcttttttctgttttccatttgcttagtagatttttctccatccttttactttgagcctggggatgtcattgcatgtgagatgggtctcttgaagacagcatacatttgggtcttgcttctttctccaacttggcaattctctgccctttaattggggcatttagcccatttacattcaaggttaatattgatatgtgcatatttcatcctgttatcatgttgttagctgctcaatatgcagatttgattgtatagttgatttatagtggcaatcgttatgtacttaagtgtgtttttgtggtggccagtaacgttcttccattatcatatttagcaatcccttaagggcctcttgtaaggcaatctagtggtgatgaatacccttagcatttgcttgtctgaaaaggatcttatttctccttcacttgtgaagcttcatttggctagatatgaaattcttgcttggaatttcttttctttaagaatgctgaatataggcccccaatctcttctggattgtacagtttctgctgaaacctccattgttagcctcattgggttccctttgtatgtgacctgaaccttctttctagctgcctctaatattttttttcctttcaacctttaagagtctgatgtctgatggctatatgtcttagggatggttgtcatgtataatatcatgcagaggttatttgcatttcttgaatttgaatgttggcctctctggtgaggttggagaaattttcatggaggatagcctgaaatgtttttcaagtttctttttttctctttctcttcttaagggataccaatgtgtcatagatctggtctttttacataattgcacatttctctgaggttttatgccttcttttttattctttgttctttatttttgtctgactgagttaattcagagaatcagtttttaagctctgtgattctttcctcagcttggtctattctgctgttaatacttgtaattgtattctgaaattcttgaagtgagttttttagctctatcaaatcagtttggttctttcttaaaatggccatttcatctttcagcttctgtatcattttactttatttcttagctcccttggattgggtttcaacattctcctgaatctcagtgatcttctttcctgtgcatattctgaattctatgtctgtcatttcagccatttcagtcaggttaagaaccattgctgggaaaccagtgtgattatttggaggtaagaagacactctggattttagagttgcagagtttcttgcattaattctttctcatctttgtgggctgtttctttaatctttgaagtggctgtcctttggatgtttttgtcttttttgttgttttttggtgtgtgtttttgtttgtttgttcatttgtttgttttttgctcttatcttctttgatactcttgcaggtttgattgtggtataaagtggattcagttagctgtgtttcttgaaaatcttagagggtccaggctcacctcagcactcttgtggtgtgttctctgctctgggactgggcccctggctttattctctggccccttgagtttagaaacttgctgcattggaggggctgaggtgttcccagtccattggccacaacactatagtagggggtgccggccaaagcacttcattagagtggtggcagtgggatccattcttactcatgggtgccagcagttgtggagtcatggcagggtgcacatgcatctgctggggtgggggtactggcaggagcagagtggcagcatccctacataggttcctgctggcagtcacagcgcagtgaggtgcccgtgtgttggcagggacagggtggtggggcacacatgcacatgcttgctggtggtagagggagttgtgatctgctgtgcactcatgccagcaaagcagttgggaggtactatgggtggactggtgcacatcagcagaggctggcctgctggaggtctccaatggttaggcatggtctgctggcaaaggagctatgatgagggcccccaggaaacaccctggttgggcttccaaggctgtactgcaagcaggcacagccagcctggggccccaggagaggccagaaggcaaggaaattctcatttcagatgggccctgtcccatggacaagaccaccctgctttattcaggtcccatagtcactctaaggttaaaatctcctagaggaggttggtgagccttgggggatgggtgtcccctggctgtgctccactacagccattctcatgtcaaacactctgggctttacacagactggagtcctgcccctggcatctctctaagcagctgtcccttccagcacaagtgtccatgggggtcatggggtctcctgctgctaggattctggaggcccatggcaacagcaggccactcctcacctgttcaactcaacctttccccaggagttgctgggagccaggaatgagtcctggtgcttggcatccccatgcagggttcccatcttcctccaccttcagctcagcatctgtgtcctcccccgtctactctcaatccactctcaatgcctccccttcaaagatctgcttggaaagcacccgtcttcctgatgtctcactccctccatggcagatattcctcctggctgcatctagtcagccatcttgactcgcctccaaagtctttttaattaccacttcggttaaattagtaactatcattttacaatggcctgtgattctgttttgatcaaatattttgagccttttagcatctataacaaatgttctcaaaaatcaaaatcctaaatcaagtctctgccttagtcttatttctggggcttattaaggctataaaaattaatcaccataaggttgtacaagctttttacagcttccagtcaggctatgaactccagtatcaccacctccagcctgataattacatatattggaagaaaatcagttaaaggactccctctagacccttgaaagggtgtgagagacaacatggtttcgcctgccttcatgtgtcccagtccatccctgtggctgcctctgtccacctcagcttgcccactgtctttccttcccaactgtctgccctgctgacttctggcctcagtgacagatgcaaagacaaggcgacagccccacatagaccgtttaaccagtcccacatttgcataagctaaatggtcatgtcacagtctgttgcccaggctggtctcaaactcctgggctcaagtgatccacccaccttgacccccaaggtgctgggattacaggcttgagccacagtgcccagccaagaacccgtttttgagtgggcaccttggcacacacctgtaaacgcaacactttgggaggccaaggtgggagtgtggcttgaggccaggaggttgaggttgcagtgagctatgatggcaccacctcactccagcgtgggtggcagagtgagatcctttagaaaaaaaaaaaaaaaaaacttgttttctctgcagccgggctccgtgaccaaacacaaacacaaacttcccctccagagggtccaggaggggctgggctgcaggaggtgcttagggcctcttagggaatggtaagtgaccacccaacgcaggcactcagccccaggggcatatgcagagagagggtccaggaggagctgggctgcaggaggtgcttagggcctcttagggaatggtaagtgaccacccaacgcaggcactcagccccaggggcatatgcagagagagggtccaggaggagctgggctgcaggaggtgattagggcctcttagggaatggtaagtgaccatccaacgcaggcactcagccccaggggcatatgcagagagaggctgggaggacactttcagtgactggggttacaaaccccaaccataagacattgctggctctgtgagccgccacctccagaaatctcccacttagttcttagcacttatccactcttcccttttcctactctcaattcctggaggatgccctcctttctcaggctcagaccaacctaccagctccactctagacctgaacacatgactcctccctctgtctccacctggaaatctcatcagtgcctcacatttacactcctgaaaatcaggtcctgcctacccaccctcttgctccacctgattcctgccctgtttcagccagagaccttgcagtctcctttaactctcaaacccacccatgtcgtgtgagcatactgactgtgttctatgcaagaaagagcagtttcttggtggtcctgcggttttattagtccagaggcaaagcgttggcagagctggtttcttctgaaccctgggagggagattctgttttcatgccttttccagattctagaacccatattccttgctctgtgtccccttcttccatcttcaaaggccatcctctcatctctgtgtccatcatcacatcacccttcccctgactctggttctcctgcttccacttataagcacccttgtgattacatcatacccacccagacaatgcagggccatattctcccctctcgagattaatttaatcacatctacaaagttcctcgtgccatatgaggtcactaaaccacatgttctgggggtttgaatgtaaacatttgggggatgcattattcagccacccacaagcactgctccccactggccacacactatgcacagccgagatcatgcaagtgaggcacgttcatcaacagcagcttcagcaggaaactatatgctccactttcctgccatttgtatctggatttttttttcgctatcattgtagaaagagtggtattgtaaaattaaagatggattattttctttctagaacactttggcaatctatccaacattatttatccccttctgagtgtcaagtgtgaggtcattctttcattgagagctcaatgcctacaattatgataatgcatattgggtactttcacacatcagaaagttcttctttcttaaaatctgttcttgaattattcattcttctctagctttttgttgatctattttataattttagaaaaatcagaaagtaacttgaagtatctgtcatctctacaggtttacctccctctttgtggccttcagaatgtcatgacacgcttttcccttgctcatcacatggtttctatgtatgagacctcatcacaggagctgtggtcccccgggagcaggcatctgtggatggtgccttgctcctggctgctgggacctgtgtgctgccagtggcactccacgacagtgatttcccagctcagttttgcagctccagatggtgggtgagacactaggaccactttgtgaacagcgagggcttggggtttgcttttctaccatgtccagggctgctgttcatgagggaatgtttctaacctgacatcatggctgaagccaacttagaacctctctagccgtatggggagtaggtgagtgatacagatgttaattagctcagtggagccactcccctatgtagacatgttacaaaacattatgctgtacagaataaatataggtcatttttatgtgtcaatcaaaagagaaactaattatttaaaaaaaaaaaaaaaacctctctactcaagccgaaacctcagctccagtcccacaagtcacacaaggctgctcccgtcctgtgtatgttaaacctacctcagaaatgcaagggggcattcaggtttcattctcaattcaaatgccctttttaattttgtctattcctagcacctggcaacttccagctctttttttcggggctcattcattatttaaagcacgtataatttttcacccacattctaacacatgtagtactgtagagaatccttccctaggaggatctacagcattagaaaagaattaagaactccaatatttacaagaaggaaaaagcaaaaagagatcaaaaaatgggcaacttctagaaatagaaaaccctcatgagtatgatgataaatcgctggcacacatgtgaatagttacttgatgcttatagtgatgtctgggaaaataacatgaaatacttataatctgtttctcacacatgtaattcaaaagaatagagagaagatgatttgaaatattcttaagtttgtaggaaaaaagctacttccatatgcataattgcatgtattttgatactgccattattaagaactatctaagagggtccattaaaaataaaatttcttggctgggcacagtggctcatgcctgtatcccagcactttggaaggccgaggcaggtggctcacctgaggtcagaagttcaaaaccagcctggccaacatggtgaaacgctgtatctaccaaaaatacaaaaattagctgggcatggtggcatgcacctgtagtctgagctacttggggggctgaggcaggataatcgtttgaacccaagaggtgtaggttgcagtgagctaagatcataccaccgcactccagcctgacagacaaagcaagactctgtctcaaaaatattaaaataaaatttctcattcctattacagagtaatttaattcattaatgccctgccctgttacaaaactcatttgtaaaatactaattgtaattgtgaaaaaatggcaattgatactaattttaaattctaaaaacagggcacccatattaaagattattctgcagtaagagaattagctataacattttgtaataaggtggagaaaacattctccaacttacaatggttggtgagaagaaagtttccagcacggtagatggaccctaagagcccttgttgaaataataagacaaaaagatatacagagagatgagccagatgaagggagacagagagagagagagagagagagagagaggcacagaaatgagagatacaaagtgaaagagggcaacctgtggggtcatcagatatttgttttctgttttgtttattctaacataaaggcagtggtgggtcatcgatgtatttagagtttgcacaatcactgtggaacacagacagacacaggggaagaggagaaacacagggcggtggcttgcccttggactgttcttagttcctcaaaacgtaacagctttgcccaacctaagggaactttcagcagctgctcttctgccataggcctctttcctgccttgttttcatgtggctgactgtttctgttcctgcaggtcttagctcatcagacaggcatttattacctctgtgtcaacagtgggagcttccattactctctagcatgacactccccttcctcttttaggaaatttaacatggaagtgagtttgccatcggccttctccccacagtgttaacagtggtgaggaagccagcctgttccaccttgcccctcccatgattccaacactgagttcagacttgtcacatggaacttatctttgcatgtttgtggcacagacagatggacccaaccatggattagtggatggatggatggatggatggatggatggatggatggatggatggatagatggatggatggatggctgagtaggtgtgtggatggaagagtgaaaagatagatggatgcatgtatgggtggatgggtaggttgatggatgcatggatgggtggatggatgggtgagtggatgaatgggtgggtaggtgggtggctacatgcatggatgagtacttggatagataagtgagtggatggatggatggatggatgaatgggtatgtgaagggatggatgtattagagtgggtagttaggcaggcatgagctgatagtcaagtgattgttaaactgcctctctaaaataataattggtctcggctggacgcggtggctcatgtctgtaatcccaacactttgggaggctgaggtgggcggatcacaaggtcaagagattgagaccatcctgaccaacatggtgaaaccctgtctttactaaaaatacaaaaattagctgggcgtggtggcgtgcatctatagttccagctactcgggaggctgaggcaggagaattgcttgaacctgggaggaagaggctgcagtgagctgagattgtgccactgcactccagcctggtgacagagcaaagctctgtctcaaataataataataataataaataataattgatctcagccagcgccaagaaaaggcagtctcccaatagatagaaaacacccgaaactggtcatcagcagcttcctgataagatctcaggcattgggtgagtgggctcaagcatatgcactaagaggcaaagtggcagagtttaactggcacataatcttcctctaggaacactctaatagtaagagaaggacacctcaaatgagcatgtgcacatttcattaaacccactgtgtatgcagcccctcccaagtgctggcaggccactgtacatgtgggcagcccactccaagggaagaatcaagggagaagaaatacaaatcccagaaccatgtcaatgtataaaaccccaagtcaagggccggacagagcacttagatctctcaagtcgcccacttagccctcttccaagtgtactttacttcctttagttcccactttaaaactttaataaacatttactcctgctctaaaacttgcttgggtctctcactcttctgtatgccccttggccaaattctttcctccaaggaggcgagaatcaagttgctgcagacctgtatggattcgctcctgctaacagatagctggatgggtggacagatgcatgaattagtggatggacgtttggatgtgtgggtgggtgggtggattgtgggatggctggatgaatgcatggctggatgggtggacagatgcatgaattagtggatggatgtttggatgtgtgagtgggtgggtggattgtgggatggctggatgaatgcatggctggatgggtggacagatgcatgaattcgtggatggacgtttggatgtgtgggtgggtgggtggattgtgggatggctggatgaatgcatggctggatgggtggacagatgcatgaattcgtggatggacgtttggatgtgtgggtgggtgggtggattgtgggatggctggatgaatgcatggctggatgggtggacagatgcatgaattcgtggatggacgtttggatgtgtgggtgggtgggtggattgtgggatggctggatgaatgcatggctgggtgggtggatggatgcatggataagtggtggacggatggacgggtgagtggatgggtggatgtgtgtgtggatgggtggataggaaagccctctaattgattacagggctcagtgtgtgcttcaacatcatgatggcatcatcacattggtccctgtatgaagcagtgggggaggagagtgtaccaggggagcaggaatgacttttctccagaatcgacctctcccaccctgcagcctgggctgtgcaggccacattggagaaggtgcggtcgactactcctaaatgttgttgtgtccaatggcttgttgacgttgatgtaggaatgagcctacatctccaccatagatggaactgtttgggtccccaaagcagaaagcctcttctgttgcaggtgctgaagtttccatcttcttctgcttatacggaagctcacgcatcccttggatggcaggcgtcaggttcctgtgcgcactgagttccccccttacatgctttggacagaagtgtgagacacacaagattgctgcaggaagtccacctgtggggatgctgcgacttctccagcaagaacacgagtctgctcattgaccatcaccacacataacaaattaagtgtcccttttttgataacacgtcattgtttcacagagtattcttttaaagtgtataagttgactgcagttattattttttacttctgttactaatttactcataattaggcacaatttacacttaagaaatttcttaatagttttttcctccttaaggtgaactacagtcagataacatacttatcaattgtctctagctcttgtcagaaaaacatatagatgtgtgtgtgcgtgtgtcttggcctttccaatgatgaattaagatgtgcattgagaaggcattcactttatttgacgttaaggaagtaccaagaagacgctctccacagaccctgggaaagccagcagctgcaccccgaggctgtgccaggcagggaacaaggaggcagcaccacctgctgggcagggaaaatgtcctcccagtccctgccgcttctctgcagaggcacaaagagctgccccttctcctgggccttctcctgggctgatgagattgctccccgatatgccaaatcagggttgtgcatctgaggctctgtctagactctcagctccttcctactcctgcaaagtgaagaaaacaatgccaaggggtcctggaggcgtctctacccctggagagttttgactctcttcaatagtctccactaccctgccctcactccatgtcctccgtttctccctaaagcggtgcccagtctgattgcactgtggcagggataacgaggggccaggacatcaggggagagaagtttctacctgagtcacagcagcggctgccctgcagactcctgaagacacaagacacatttccatcccagagacccagcgaaatgcaacctcaggctagagacagccagttattttttcttgttctgtcctggagaggccactgagaaagtcgagccccttgttgaggaaaacatgagatctctgtgtgtcgtcctctgcctgatggctgtacctccatgtgagtgtctcagagatttcagaacgggggctgtgggctgtggtgtccgcttgtgactcatctctttgcttcttgtccctgagtgtcctgcatcagatgcagctactggagtcatgcccagggctggtgaggtcctcacagacctctgggcctggacccagcagccctctgggaaggcgctggggcacctcagctccaggggcagcacacacttcagcccagcctttctgggccaactctccatctgtagagacacatccaaggcccagttatccctgcagctgagctccgtgatggccaagggcagggccgcacattcccgtgggagacagaatggggacctcagcgtgagcccagacacaaacctccctgcagggaagcacaagaccaccaggcggcgctccagaccacacagcggccccagaagcaggttttagggggcggggcagacgtgtccgcgttgagtcaggtcattggttttactttccctgagcaaacggcctctgccaaggactcactgcacctctcaccttcacagttgttttttttttttttttaatcaccctgtagagttttgctagctaatttagatattgaggagtgcttcatacttccttgggcctctgcttgcagaaacatagcaattgtaaggaggcacgtgggaaagccccggctcggtgacccgggggatgctgctgtggccctggcaagagggcgtcgggccgcagtaacaaaggtgcagacggctctcagcctgcgcccgcggagtacaacacataagggctgtaacctaacgaaaaaagaatcgcagtgcaactgtcctgcatttgagtttgtgatcagttttgccctttgtctttaacaggttctaacataaaattttgaatgttggttcaagccctgtgggtaaaatgcacttacccacattccttaaacaaatagaacactgaggtggaaatgttttgaaaaagtagttttcagacatttggaaacaagcatcacaggatcataacccctgagaaaagaaaaacaaatgaacgaatcctgctattgcctgaaagcagctgccaggacacacggaaaggcttagtgagctgagcggacagagagcagagttcaaggcagcagcagcccgaggggaggagcaccggggagcaggctgctgtgcagccaggatgggccggggtggggcggggggagaacagctggagacttgccgcagggagggggatccctcaggtttggggctgagaactgacttatgcctgacttatgcctgcatgaaaagaaactactcgatatcagggggaaatcaccagaaacctgtggacccaaaactacacagagcctacacaaggaaagcattgtttgtgttctcccagccagggtggaaagaccttgagatatgtaaagcttcaagcaatcttccgaagtaatctcgtgagtagtggtgccacattaattcaggactaaaggctgctctgaactgaacctaagaaatgcttcaagtgtagcctggagcccgggtgcagtggctcacacctgtaatcccagcactgtgggaggccgaggcaggcggatcacttgaggtcaggactttgagaccagcctggccaacatggcaaaacctgtctctactaaaaacacaaaaattagctgggcgtggtggcagatgcctgtaatcacctcccacctggacccttccttgatacatcagaattacaactagagatgagattggggtggggacacagagccaaaccgtatcacataggaacctaaaaggataataaagtaggaaaacttcccacatcagtaaccctttatccgatagtaatcccaatctgcaaagtaaaactgtgtgattttactaagataacggaatcttctctacagaaggactttccagtgcaaaagctccccaccctcaccatgaaatgcacgtgaccatttccaatttgtgtaaagtcctcagttagtactgagacttcggaaggttagaaatccctttgctcatgctgcatggtccggatgagatgtaagaatcattagctaatagacatgcaacagcttttgtgtgaaagatgttatgagacatttaaggtatttgcttgtgattactaagcattcattgtatcattggagcacatgtgcttttataccctggagaaattccagtaattgaattgctgggttgaatgggattttgatttggattaaatttaaactatagattttatttagggaaaactggcatcttaattatgttattggggggcccttgctcccagagctcccaagatggtggcaggccgcttccaaaatgaccgcaggccacttccaagatggtggcaagcctcatgttctctgacctggggttcttggcctcacggattccaaggaatggaagcttgggccatgcagtgagtgttatagctctattagaagccgtgggtcacggaagagaaccgtggaacccagtgactagtgttcagctcgattaggacgaacccaggcacttagccgtgcaggaacaatggcgagcatttggcccgatcgagagtggcaatgggcgcctcgctggatcaggagcacagcggataccctgatggatccggagggatggaagccagcggtgggtctcccacgggggcaaacagcagtggtggacggtgagcgaaagcgaagctcgagccgtaacaaacatggaccagaagagtgcagttgcaagatttagtagagtgaagacagagctcccatacaaagggaggggacccaaagagggtagctgttaccggctcgaatgcctgggtttatatcccgatcattgtccctcccgctgtgctctcaggtgatagatgattggctatttctttacctcctgcttttgcctaattagcattttagtgagctctctttactatctgattggtcgggtgtgagctgagttgcaagccccgtgtttaaaggtggaagtggtcaccttcccagctgggcttagggattcttagtcggcctaggaaatccagctagtcctgtctctcaattacactgagttttccaatccatgcatccaatatgtggtgtatctcttcatatgttcatagcctctgagcaatgttttacaattttctgtgtaaagaactccacatcgttttatgtttcttctaaggtatatcctgattgctttttatgtcttcacaagttttttcctttcaaaattaattttccaattgtttggtgctaatatgctcaaatgtccttgattttcttagtttgaacagtccgtttttgttttggggatttatttttttttcagattctttaagattttctatgtctataaccatataatctctgaacagagacagttttgctttttcctttcaacttgaggtaggttttctgggtagttcaggacgcgcaggcactgggtgggtggtgttagcagctgcacgatgccttggagaggacactctcgggggactgtggccgctgctcagctgtgaccgttcttatagcaccagcagctgcggccaccattcttatccaatttccaaagccacaccacaggccctctcaagaacgaggcgtggaggctatgccctctcctggacacatcatcattcccaagccccacgatgtgggccccatgggacgcacacctttgtctgtccagacctcagccccacctcctcatcctgcaccagaactcttcagagcccagtgcatgaaatgggctaccaaggaaatgagggtaggttcctgagaggaaactggccctgcatttgggagctaggagtctgctaattcgcctggcagccctgtgcagccctccgtggctacagtccaccccgtgcccatcagtgcctccttcctgtgcaagcctggacctcgccctgggctcaggatgggctgtagaccgagaatgcaggcgggaaagtctttgtctatcggggccatagtcaggttctacagtgagtcagggaaagacctgtggaggtgtggatgaggacaatgggtccaccatcaacaggaggacacgggttcgaccccttgcagaggcacagtcccacatcactgggaggcagccacactcactgcctcgccctctcctcacacagtgcagtttccacgttcacagccccagccagtcaccaggaatgccctgggggcggcctttccccagtgcactccgagccctcccttggctgtgcggtgagctccatgcccaggagatatccacccatagtcctccggaaagcagctgacctgccatgccctggaaccacaaatccccacagatcagccagcctgcagtgggccttggatgtggtgaggagtggtggcacccccgttcccaccccacagatgcaacgcctgtgggtgacgcatgtgagtactgaggagtagagggtagaactgtaggccccgagaaccacagaaactcgggtgttacactctggggccatgtaaggagaaagtgtcactggacagaaacaggcccctcctagacactgtgtgcgccatagtcacctgtcattagctctcactcttgcagattcatgattgaggtggttaaaaaaaaaaaagctcctactcacccatccaaccccatcctggggtgtttccaccacccttggggtttgggatgagctgcccttgcccactgtgctctgtggacctccctttagaagctcacagctccctgcactcggctccatcctgccccaccacacagaagcaaaacccctctcctttccactgcaggcttttcctggaccagaatgctgacctgctgcccttcactcccgaagtggtgggactgcctggggtggtgtgggtgttgagccttcttactctagggacctggcacctggccccaggggcacagggatggtgcatctgcctagggatgcctcctcatgccagggggtgggggttagtaccatcggccctcaggatttgttgcatgaatgagtgaatgggtgaataaatgaaggggatctgatctatgaataagggtatatagactttggttgatgtaggacgccaaatgctggaatttcagagtcatcacacccaggggccctgcctctgagctcctctttgcatccaatctgctgaagaacatggctctagggaaacccagttgtagacctgagggccccggctcttcaatgagccatctccgtcccggggccttatatcagcaagtgacgcacacaggcaaatgccagggtgtggtttcctgtttaaatgtagcctcccccgctgcagaactgcagagcctgctgaattctggctgaccagggcagtcaccagagctccagacaatgtctgtctccttcctcatcttcctgcccgtgctgggcctcccatggggtcagtgtcagggagatgccgtattcacagcagcattcacagactgaggggtgtttcactttgctgtttccttttgtctccaggtgtcctgtcacaggtacagctgcagcagtcaggtccaggactggtgaagccctcgcagaccctctcactcacctgtgccatctccggggacagtgtctctagcaacagtgctgcttggaactggatcaggcagtccccatcgagaggccttgagtggctgggaaggacatactacaggtccaagtggtataatgattatgcagtatctgtgaaaagtcgaataaccatcaacccagacacatccaagaaccagttctccctgcagctgaactctgtgactcccgaggacacggctgtgtattactgtgcaagagacacagtgaggggaagtcagtgtgagcccagacacaaacctccctgcagggatgctcaggaccccagaaggcacccagcactaccagcgcagggcccagaccaggagcaggtgtggagttaagcaaaaatggaacttcttgctgtgtcttaaactgttgttgttttttttttttttttggctcagcaacagagatcatagaaaaccctttttcatatttttgaaatctgttcttagtctaatggagattctctaatatgtgacaatgtttttctcttgctgtttttggaattctttgtctttgacttttgacaacttgacttttgacagtgtgcctcaaagaagttctattttgggttctgtgaacctcctggatctgggaagttttcagctatgatttcattaaacgtgttttctacaccatttccctactcttttggaatacccataatgcaaatatttgttcacttaattgtgtcccataaatgctggggattttcttcattcctttttactctttttttctttttattcatctgcctgaattatttcaaaagatctgtcttcaacttcagaaactcttttgcttggcctagtctaatcttgaaggtctcaattgtacttttaatttcattcattgaattcttcaactctggaatttctgttggttcttttttatgatacttatctctttgttgaattcctcattcaaatgataaattgttttcctgatttcactgaattttctatctgtacactattgtatctccctgagtttcttagagattatccttttgaattatttttctgacattctgtatatttccttatgattggggtctgctactggagaatgactgttgtctttttcaggtgtcgtgtttcctggccttttcatgttttatgtgttcctacgttgatttctacacatctggcggaccagtcatcccttgcaatttaatggagtaggttttgcaggaaaagacttcctagtacagacgggtctcagggtgtcagtgtggcggggcgtgctggctttagttctaggttgacgcagtagcgtagtctccatgtcgtttcttcagctgccgtccacattggtgacgtttgcgagtgtctcagtggcctgggctgagaggtttgtggcagtggaagtgcaacgttgctagaggtggactcaccaggctgtttctgaggtcgaggcacatgcatgcacatggtggattgaccaacttggtgccaggctcactagggttggggacatggggctgtttctcaggcccaggatgcaaacacaagtctctttggctggcctgggggtgtggcttctgagggcaatccacagggctgtttctcaggttcaggacacaagtgcatggccgctcaactggcctgggcatgtgtctcccagggccaccccatgggctctttctcagacccaggacatggccacatggcttcctcagctggcctgggtgtgtgtctgctggggggctgcaggggcacagggttatttctcaggccggggtcatgggcgcacagctgcttgctggcttataggagtgcctgccaggggtggcccatgatgctgtttctcaggcctaatttcaggtgcagagcctttgggcaggtcaacggcatacctgtggaaattggagtggatgccacagggctatttctcaggtgcctgagtgtgggcacatatccactctgccagcctggagttagtatcaggtgctcggtggctcaggggcctctcctgctcaggggagggccctcagcagcttggccaaatcaatggtggattcaccctgggcaggcctggcaggctcttcctccagctggatgtgcagcagcaggggttgggttttttgctgtgcagggccagagtcacggccaatcctcagcctaggctctgcacagccagggttgtggcattcagccacccagatatgggcatcctgaagatggagccccaatgctagaaaggggcagtggctaccagcctcagggcaggatgcactccagaggcggctccggtctcaaggtggcgctgggctgcagcagctaggctcacagtggatgaatgggggcagggagtacacaccttgtgctcctaatctgggatcattcctggcagctcccaaacttggctgagggcttgcaaaacctgtggaattctcctgttgcaagggctgtagatgtttgcagtggcagtgggtgctggcgggaaatctgcttaccttttccctacatgggaagtccctcctgtgtccagaccaatccgatctgggtggggaagacaaggctgcaaaggccaggtgcctccatgctgccctccgatcaccacgggtgcgtttccacacctccactgcactccgtcagtctcccttcaacactccagtcaaaccttagctgtttcttctttgccttattccttcctcatggggagggtgtgggtgaacaccaggcttctctaagttcttcatccatcttgctgatgtcattctccatccaggcatgggtttttaagaagtagtgaatactgaaatttcagcagaggacacctctataaaaattctgcaactggaaaacctccttaaattggctgattgtcattacaattggaggaaaactgccaataatttcaaatttagaaggctgagactctataaacaaagactaacaatatgttttctgatatttttccccaaaataatacttttccaagacgaaaatttttccagggtatataagcacatgtgctccaatgatacaacaaatacttactaatcataagcaaataccttaaatgtcttataacatctttcacacaaaagctgttgcatgtctattagctaaaaattcttatgtctcgtccagatcatgcagcatgagcaaagggatttttgaccttcaaaagtctcagtactaactgaggactttacacaaattggaaatggtcacctgcatttcatggtggtggtggggagcttttgcactggaaaatccttctgtagagaagattccattatcttggtaaaattacatagttttattttgcagattgggattaccaactgataaagggttactgatgtggaagttttcctactttattctcctattaggttcctatgtgatatggtttggctctgtgtccccaccccaatctcatctccaattgtaattcccatgtgtccagggagggtccaggtgggagtgattagatcaagggtggtttttcccaggctgttttcatgatagggtgttatcatgagatatgatggtttaaaagtggcaggttcccctgctctctctctcgcctgctgccacataagacgtgccttgctttcccttcaccttctgccatgattgtaagtttcctgaggcctccccagccatgcggaactatgagtcaattaaacctcctctctttataaattacccagtctcaggtagtatctttatagcggtgtgaaaatggactaatacactatggctttgaattaataatttaaaatttgtcagcttggcaataaaacatcctgttgacatttattttttaggtaatattttaaattggcagtttcattcatgtttttacaaattcttattttcagggtgtttaaggcctttgctttgaacttggtggttccttacactccatgctgttagtgaagagggaccaggttgggaggcattggtttgggtggtggtcaggaagggcagagtgatttgagtagggtctgagtggataatagctcatcagtttggaatttataaatgaccagggatgatttaaggagattcctgccagacacctatgccatggccatgccctatctggatctccagccgtgagatgagaacccagccatgcgggggagtctgttcgttctgctcaatgttgtaagtggcacatgctattggataatgtagaattgaatggatatcattttattattataatttacaaacttcctacaataaacttatcacctttatacatagaaacaaatataagtacattttccctcccctatgtcattttgagccctctctccaaaccatcctcccactctgcgactcactgtcctgcatttggctatgctctggcaagtcctgcttagacaagcactcaccagaccacctactcagcctcccttcagcgcccacctggcccacctgctcaaatacatgttgagtggtcacacacatggactgaacaccatctattccatgcactgccccagtgaccgcactgagcagcaagagagaaatgatcgcattagctatcaattatgccaattcaaatgctggagtctttctcagatacttttcaatgttcaagaattgttgattgtgaattctatacccaatgaaactatccttcagaaatgagcagaaaatggataccttctcaaataaacaaaaactaaaagaattcttgctacaagatgtactcttaaagactggctaaaggaagttcttcaaacagcaaggaaattgaattgatcttatgtcctgcacacttgctaaatttcctctcaattttagcagcactgtttagattccataggattttccatacaaacagtcatgtggtctatatatagagacagattttcctcttttccagtggggataaatttatgtctttttctttctgtgttacagcaggtaggacctccagtacaatgttaaacagaagtggtgaaaacagacattcttgcctgtttcctaacgttggagtttggtcttttactatggtgtcagatgttagctgtagggtttttataaatgcccttcatcacattgaggaagtttgctcctatgcctaattttctgagagtcttttaatgtgacactcatgctagaatttattaaatgctttctgtctactaagatgattatgcagttcttatattaacatgaataattacatttatttattctttaatatcaaggcaattttgcattcctgagacaaaccccatttagtcatcatgtgttgttattgttacatattgttggattcaatttcctcaaaatttgttaagaattgttacatctatgtttacaaggaagattagtctgtagggtattttttcttataataactttgcctagttttgcaatcagggtaatgctggactcacagaatgagttgggaagctatttcctcctcttcatttttctgaaagaatttgtataaaattggaattatatcttccttaaaggtttgcaagatttcataatgaagtcattggcctagagttttctttgtgggaaagtctttgtttgtttgttttgtggtttgggtttttttttaagagacacagtctcactctgttgcccaggctggaatgcagtggtgtaatcatagctcacagcagcctcaacctcctgggctcaagcaatcctcctacctcagccttcagagtagctgggactacgggcatgtaccaccacacccagctgtttgtttgtttgtttatcgctttgtcttgtttttgaggtcttattatgttgcccaggctggtcttgaactcctggcctcaagtaatcctcatgcctcagcctcccacagtgctggaattacaggcatgagccactgcacacagactgtgggaaagtttttaactaaaaattcaattttctcttccttttccagtgagctttccagtgtctttcaattaatgtatctattttatctaagttgttgaatttattgtcaaaatttttttaaacaatattcctctcttagaggttgaacatctgtagaatctgtagtgatggcacctcttaaatccctgatcttgctcatctgtgtcgtctctctttctctaatcagtatgcctaaagtttaatttcattgattttcttaaaaaactggttttggttttattgatttttttccctagttttttgtgttacatttcattgacttctgctctgatatttactatttcctttctactgcctacagtaagtttaatttgctattttcttagtttcctaaagtggaagctaagtttattgacttgaggcctttcctctgtctggatgcggatatttgctgctaaacatttccctccaacaccatgctgtgagttttagttacagcgggcttggagttggcctgagaaattctacttaaacagctgcacctatcatgtaagtgataaatgatgtacctgcctggccctcacccctggtcaaagaatgggatgtactaatgagcaatgttgctgcgtagctgtggatttcaaggtattttctgtgtggttttatcatcagcattgtttgttgatgactgcaagactgatgatttgcacctggcctcggtgagatccccgaaagaccctgcagatgggctggttacttagcagaaaatatgacaacgtggccagcaggaaacaggaaggtacaatcggctgcaggtgagctgttggaagtaagttccaattttcctattttgtatttgcattttaatagtgagactgcgcttatgttatttgtgtgaaacagctttattcatagcactgtaatttaaagagaaaacccattcatgggaacaacaaacgacctagacaccaaggtagctcatgccatccaaggctatactgtgcagtgattgggaaaatgggcactggtcccagaagtctgatcgacactctgccactggctagtcccgtgctggggggcgaggatccacactctgccactggttagtcccatgctggggacaagtatccacactctgccactggctagtcccgtgctggggggcgaggatccacactctgccactggttagtcccatgctggggacaagtatccacactctgccactggctagtcccgtgctggggggcaaggatccacactctgccactgattagtgttgtgaagatttaaataaagaacccacaccatattctttgacttgtgctttccgtatactgagagatagtaagagtacattattattatttataaagtaaactagaaagcacatgggaagacaagaagaaaacctgaataaacatgaattaccccattttcctcaggagaaaactttcacactctgaaggtacacaaattagcctacaaatttaatgtaaagcaaatagactgttgtaggtaccaattctcaatgtcacagtgttacatggaaagtaaaatacacaagaacagcccaaaagatggaaacaatggacgtggtcaaatgacatcagtacaacatccatatggtcctaagtagccatctttaaaatgggttagaaatgccttcaatcattcacacagacacatgcattgaacaaactctaagaagtgttcttacacgggaaaagcaagttacagatgcatgggcatgatatggatgtagatgtgtgtatgtgcatcccactcatacacaaaatacccagcatcgcccacatgcctgctgtgtgcgtaagtgtgagcgagtgcacagacaacagcgtgcagaaattcaaaccaagctgtgggtacttgttaccactgggaagggagtcggtcacagagggaaagagaaacaggacatcagcctttgacttcagaactgttcctgccttttcacatcctgtgctgttttcagcatcatcggagcccttaacacacatcacgggagtaagagtgtgttagagggagcattcggtgggacagatattgccatggcttgtggatagagttcacagtccttaataatccccgagatggcagccaagagctacgttctcaatcacgcagcttcaccccagaaactgacagaaacccaacaaccaaaaggtgtccattctgacagcctcagcctgtgctggctcagatgagcaaaaatgtacagatattaataatgatgttgatttgaagagcacagaggggggtatgcatgataagggtccaaatttttaccttaaaaaagaatacatttacttctcaatcacctacataacgatcattttttaaaaaactgatcaaatttggtgttacaagggcacgttgcaaattcttctggctacttttctctgactattctaattacgttaccgtgttttctcctgtatgtgcccgttcatgtgaatgtcatttctggctacttttctctgactattctaattacgttaccgtgttttctcctgtatgtgcccgttcatgtgaatgtcatttctggctacttttctctgactattctaattacattaccgtgttttcctgtatgtgcccgttcatgtgaatgtcatttctggctacttttctctgactattctaattacgttaccatggtttctcctatatgtgcccgttcatgtgaatgtcatttctggctacttttctctgactattctaattacgttaccgtgttttctcctgtatgtgcccgttcatgtgaatgtcatttctggctacttttctctgactattctaattacattaccgtgttttcctgtatgtgcccgttcatgtgaatgtcatccaggcagatttcccaaatccggcttcctgtaaccaagggctgaaagagggaacggtttcctgggaatcctttttgcagtttattttacccggaggcagaagcccacggttccgtgaagagtctattgctctcccctctctccttttgtgtctctatttttaattgacaaaaaagcaaatgtgaagattcctggggtacaatgcaaagtgacaatgcctgtctatattgtgggatgattaaaacaaggtaagtggcatatccatcacctcacacacttatcattttgtggtgagaacatttaaaatctcatcttttagcaattttgaaatagtcattattgttaactatagtcaccatgctgtgcaacagatcaaaagaactgactcctcccatcagcagaaacttcatgccctttgaccagcatctctcctttccccgtccacgactaacccccagcccaagagaacagccaacacccacctcgctgctgccacacgacatgtcgggctttgatgggatggaggtgagggtggggaagacaattccaaagctggagcactggcctcacagctcagacactcttctacttatcctgagagaatgatgtgctgagaccaactaaacctcccctgctcttcccacatggcagaaaagaggcaacccagggaagccattgccaggacatcatggtcacccaacccttgtgcagaaaggaagcacctgcccaggatgccatagcacccaaccctcatccccaaggaaacacagcccagggcaccatggacacccaaccgtcatccccaggggaggacacagcccagggcaccatggacacccaaccctcatccccaggggaggacacagcccagggtatcttggacacccagccctcattcctaggggagtacacagcccagggcatcttggacatccaaccctcatccccagggaaggacacagcccagggcatcttggacacccaaccctcattcccataagagcacacagcccagggcatcgtggaggcccgaccctcatccctaggggaggacacagcccagggcaccatggacacccaaccctcatccccaggggaagacacaacccaggccaccattaacacccaatcatgtgcagggagggtgtccttggagcctgggactcttgccagtgaagcggtggacaagaaactgaggatgcgatcagcacacagaaatctcaggcagcctaggatacatgaggcctctcacccctgggaacactgagcagccaccaggagcccacaccttgaggtacagcaggagccatgcgctcttgctcttgctcactcacactcctgcacacagccactgacacacgccctcgtgcacgttgcagattaactccactggccttgcacttgcaacgctggaggctgagaggtatccccaggttcttttctcgtgagaggggcaggctgactttcactctcctccatgtgctagaggcagctccaccaacactggctgccctgagtggatgcacctggctctggaattcctgtcatttgctttggatccaggagcccctgcctcatgtagctacttaacagaaaggaggaatccacccaggacatgcccagacgggagcctcacaggatggacagtggtgtctggggtcacgggcagccctgacccagcagcgccagcaccagcacacccagtggggaaggcggggaggcccaaacgccacccacagtttgttactccactgggtgggacccggcacccctgccttcctgacaccctggagtccctgcctcctcctagagcccccaagcccatctgcctcagagcatccagagacagacctggggagccatttcctcaggccctggacaaggaaacagggaattccaggttatgggtgcctggggcaggtctcaggcaggtgctgggaaccagagagaggggtcaccgcgaggcctcaggcctggcaccagcactttgagcctcagtttaccagcccacgaggtgctgagtctggactggatgaccttcccacccccagtgacctctgccctttcccgagcatgtcagctctgctccagcatcctggtgtgagcgcaatgccactttttttctcaacaaatacgaaaggaggaaggtgcccccagggccctgtgccctgaggatgcctgtgtggaggggtccatttcatcactggtgtcactcacaggaagggacgaagccacctgccttgacggagcttactccacctccgccgaaggccggggaggtccctcacagagaacctgaggcccagcaggctgcagaggtgctggcatggaatgactgctcagacgcccggggccggcagagaggacggatgtgggggaggtgcacactgaggagcctctccttggaggtggagacacgtgcaccacatggaccaggacacagtccacgaagcctcgcatccccctgagctgcagctcaagggcctctctctgagcccagagtcccacccctgggaggcagctgccccagctctgagggaggagggcatccaccaggccctccatctcctgggggcaccagcccagcccagaggctctgcaggactctgcacctccaattcatggccaggactttctggatgtatcttaaggactgaggactccacatcagggaccacacaagaccggggtcccggacacgggggttgggggtgagcatgtcaccgggatgggctgtggcgtcactctggtacttcatccggacagccagggaccaaagccacgccctcagccccaccccacccctgcctcacatggcaacgcagggtctgcagatgcaggagagtgagaagcatggtagccaggcagactagaggacccgagctggggttgagcacctccctgtctacccagggcatggcctgtgagactgcaggtggcctagtgtgtgctgcaggctcaaggtcctgccccagggagcatgacattcaggcccagaaattgcatcgtgctgcacacagtccaaggggataaccctgtgaagttcaggtcaccagcaggcttggggtcaagaccgagctgcagaggacaggtttctggaaggcacagcatcatgggtggagggacttggagcaaggtccttagccccgggaccagtgaatgtgtgcccttatagggaaagggggtctgtgcagaagcaagttagctgaaaatcatgaagtggagaggctcccctggattaaaggggtgagccctaatgtaatcacaagtgtccttctaggaggttggcagagggagactgacatagacagaagccaggtgaggtgggaagcggaggcagaggccgagagagcagacgctacgccctggccctgaagacggaggaggagccgagagctcagggatggagagactggaggaggcagggaagttctccccgcaagcctggagggagcatggcctccagcacccccagaccttggccctgcaggattcatctggacctgtggtataaatggtgtttaagccactgggctgtgcaaattgtcatagcagccatggcgcattcctagagggagccctggtggggacccagcaggcagcgacggggccctcacaagcctgtgagccactcagagccgcgagagtggctaggcttggtgaggtgcaggccacgcgcacctccactaaggcagccttagggcccacacatcctctctctctctctctctctctctctctatctctctccctccctccttccctccctcccgctctcttggttggacagctctccatcatccccctggacacgaccacctcccaaggccgagctggggcgctttgctcgaggtgagcactgacatcctgggggtgtgaggggcacctgcccagcggccccgtgtgcaggatgggcggtgggccctagctggcactgggcatatggcccggctggtgcctgcaggctgcagcttttctggggtggctgggatcagtgaaggcctccagagtctgggcctgggatccctgcagtgctggctgaggacaggcggggctgggcagtgagggcactgggtcactatcaccacccacggtttattacttcactaggtgggacctggcacccctgccttcctgacaccctggaatccctgcctcctcctacagcccccaagcccatctccctcagagcctccagagacagacctggggaggcatttcttctgcccccagcagaagcccgggaggccgggaaggcacagtgggtctaaaggagaggatcccaggactgcctgaggggtgactccgacgaggcaagcatagagcccactgagaagcggggtgggagccccaccagggatgggctagttcctcatgaaggaccaggacccaggaaggacaagggggcctgctggggcagggtctgctatgccggagtccctgtgagcctggcccagacctgcctctctctttcctcattggtccccacaggtccgtggtggttgccgtatcgggaggccccatggtggcaggggtgggacacctggtatacgtcgccaggtgtgtccaataggctcatgctcacaccttctcctggcacctgggcaaagcctgagcacccaggcactgaagtgagggcaaggcctcggggccccacaggatggccgaggagacagctgcagggcgcctgggacccctgggctcaggaggtagaaggatacagcctgaaaacccacaccacaagctcaccggccagtgcaggcccacagagctcgaggaggcagccctgagcctcccagggagagatgctctgtgcacgccggcacaggccctgggttacaaaccctaggcacagcccaggagaggcccaggccccagtccagcaaggggttgcaggaagcaagaggtccccggccacagcatgagataagcccatcaagccagggccaggtgggcaatgggaggcaggcagggcttgggggtgagtccctgctgcagcgccgtccactgtcgaccggaggagtttcttccctgtgcggagtccacgggcctcctgtgagtgtgtgcatgggcacaagtgtgtgtgtggctctgctgtgtgtctgtacacacgtatgttttgggtttttttgtgtctcagaccacagagtctgcccctcccaccaaagcccaggcagaaggatgaacccacgcccctggggcccaggcctcagcagcctctgcaggatcattgttcccagttgtcacttgcctttgccacagccctatttctccacaattccttaaagtcctcaacatgcatttaaggcacaaaggtgaaactgcccagaaacatctgactccgccgtggaacccaggagcaagctgggttagctaaggagcggggccgttggcagaggctggggatccaggctgaactttggaggaggcatgtgccagcatgggctcctgactatgtcctcctgggacaaacccaaacccactctttgaatatgggagggactttgctggccccggccctgaccgcagcacttggaaactgaggagtggtcgcctcctccgtgtcacagctgcccgttcaccatcatagaagcaactctgtcacctccatgggcccctctgtggctgctgcctgggtccaagctgagcccagctgcccaggcccagaaggaaagcccaggccaggtgcccagcacagaggcagtcacataccccggggagagccacagcaagcagccaatgttgcccaggagaggagtagctgacaaggtagaacgtgagctgccatcggctcgagaggctttgctggtcctcctggggctctggacatgaccaggaggagcgagggaagaagtcgcatggtggtcccatcctgggtggggcctgatggcagctggccacccgtcccagagtggcagccagatgccagcgccattcccacagtcacatcattggtcacagaatgcaggacatagagtgtcttctttccatcacagtgctgtccagacccatagcctagggtagacctggaagattcaatgtccacacccggggctggagcgtagccatgagccacgccccctgcccgtgcatggaaagccagcccaagctctgctccatccctagccaaagtcagtgtcctttccccttctcccaagtgagctctagccacctgcctaccctgccatctgaggatgacagccttcattccattggaacctggctctgccaccagcaggcttgcagtcctgggcagactccgtcacctctctatgcctcagcctttccatctgcacaggaggaagatgatgatggtggtgatgatgatggcgatggtttccttttgcatctgaggcaaggactaattgagatgatacacatcaggcactgggtatggtgctggtccttcctgagcactcaatctatgtgagctgtccttgtgaaatgggtgtcaccacatttccccacgcagaacatcctttgtctgccatacttgaaacatctgccccaatattaacagttccttcatggaagatgtgcacacccacccaccctcatactcccaaaggtgcccgtgctttatcaagccaaagtccagccaggaactttacagcagcatccctttccctctccaagcaccaaggagcaaggcaaagcactacatcttccatctggaggcaatgccaccctcttctcccattttcactgccatccctaagaggcagtgcttccccaaaaggttccatagcagcctgcctacagcaactctgttcacacgagtttcagcatccttgcagtggctcccctgccatgctgtggctcttcattcaccctcttctcctgctccccgtgacaggcatagattctgagtgatctggatacattgctttgtttaataacattacagcttctgtgctgaaaaagatacagcagatagagaaggcaattgttgaacacaaaatagtgacagcagagatgacggcaagttggcatttttcttttctagcaataaaacttaaagctgactcaaggagaaatggaaatcataattggaacagtaatcctcaagaaagcattaagattattaaataattgccctcacagatgacttcaggccaagatggctttatgggtgaagtttagactttcacaaaactaatcagttcccataagaactgctccaggatttggaggaacatgggaaagtctattaaagggatcacaattcacagtccccagagtaaaacatgggctaacttgcattttggcaaagagccaaatgttataaatgacatcctagaaggccaaattctgtccatctcgttgaacaaggacttacaccaggaatttagaactatttatagctcatcccaccactcaggccaatgatgacccatgatcatctcaccagaaatggaaagactcagatgattaatagagtctcaatttctctgagacatctaagagcccagcccaagcccagacccaggagggcacccaggcctggacagagaacactgatatcacaccagccctccagagggaagcagagactccttcaagctctggaaacacaggcccagacagctgcctaaagttgggcaggcttcactgcaaacccaaatcatgaagctaggtaacacctttacagattctttacatttaaaaatcatcaaaacaagagtaaataataaactcaaataatattaatctaatatgtaaaggtcttgtaccattattatgcaaacaacatacataagctaataagaaaaagaacaaatcccttaagaaatcggcaaaaaggatataacacaatttctaaaagaaaacaaatggctagcacacataaggaaaacactttgtgaacagacattcttcagaacattatttataattataaaatagttgaaagcaagatagtgcctgaagaaattatggtgcatacattagtgggactattctgcaaacattcccaattatacttgtcacatatctgtgataacgtgacagccagcattcatggggtgacctcatttggtaaaagggtgcaaagctcaacacgcattgtgagatgactgtggtgtaaaattagtgggattattccgcaaacattcccaattatacttaccgcatatctgtgataacatgacagcattcatggggtgacctcatttggtaaaagggtgcaaagctcaacacgcattgtgagatgactggtgtaaatacaaagaccaaactgtgaaaaggagtccatcaattaatcgatgcttaccttcagttttgggctaatttttaaagtatgctataagcatatgctcctgttataacagaatggagggattatgagagatgatgcaggtgtgtcctgggcctcccctggcccactgggccctagagatgccttcccaggcatcgctgtcagggcttccctcagagggagtcctgtattgacctcaccaccaaggtctggagcaggggatccttagatattggttggggttatctcaccttaggtctgaatttggggttgtcttagactgttttgtgctgttagaatagaatacccaagactgggaaatttatactgaacggaaatttatttctcacagttctagaggctgtgaagtccaagagcacaggtgccagagcaagtccaagagcaagggaaagtccaaagcaagtccaggagcatctggcgaggaccttcttgctgtgtcatcacatggcggaaggcaagaaagagagcaagagggggccgaactcacccttttataacagcaccaatcccacccatgaggtggggaccttatgacctaatcactcttcatactgttacaatggcaatgaaatttcaacatgagttttggaggagagaagcattcaaaccacagcaagggtgctcctacctcctctctcagggcatctgcagaaagagctgcaactgcacgtccttcctccgtccatcctccatcccttcccaatgtccgtgcatatcctgtgacccaggaggtctggcatagggggtgctcctgccttaggtctgaggccctgtctgaagaggggtaggtgaggaggccatctgatggtctgggccaagacagtcacaggacgcatcatttatcatcaaggaggctgagggttgagtctccaggtccagggaactccccacaaagtgggaaccctgcccagctccacacagcctctgctgggggaccctgctctggtgcagagcctggggacaggtcttgagctcagccagagtctgcctccctgtcatttaggaactaaaccaagcggcaggatgctggagcccagcccccatctgaccttacagggccaaggctggggccctgggttcccctcaaggcgcagcaggactggagccccaggcagtgcaggagtggccaaagctggggcttcctccagagcccccaagcatcacggcaccaagaagggtaggaccctggcctgaggaattggcaccaaagccccagaaactaccctggacaccatggagagaggcctggaggggaagcaccaggcactgcctccccttctgatcccacctgaggtggctgccaagcccagagagccgctctgatgtcccccagccctgcagcccagggatacctgtactgtgcccctgggggacccctggccagtctgtgcaaagaagtcaccaccctacactcagagacagtgggggtcctcgtcccacatcctcagagcatggcccggctgctgcagggatggtctcctggtcctcagagcatggcccggctgctgcagggatggtctcctggtcctcagagcatggcccagctgctgcagggatggtctcctggaggccccccagtgctctattgtcagggctccctccaccccccgcaccaagagagagccagaccccagcaaggcttccagtggcttcaggtcacacccctaggctgaccccagccccattaacacctgcctgagaaagctccacgcaccagaactgaccgtctgctccaactcttgacctcccgttctcagggcgtctgctgaaaaggctgcaactgcacatccttcctccgtccgttcccgatgtccgtgtgtctcctgtggccaggaaggtctttctcgggacctgagagccgctccctgaagtgtccccattgggaaggatggggcctgtgtctccaggctctgggaggacagaatcctgacctcaacagtggccggcacggacacaactggccccatcccggggacgctgaccagcgctgggcaacttttcccttccccgacgactgagccccgagcaccctccctgctcccctaccacctccctttacaaggctgtggcctctgcacagatgataatggagcttggctcattcccctagagtcggtagggagttaaggacaaaactcagtttcctccacctgaactcaagtctgcctatgtttacctaatcacacctggtggacagtttggacaaacttgcacactcagagacacagacacttctagaaatcattatctccctgccccggggaccccactccagcagaagtctgctaggcactggcctgggccctcctgctgtcctaggaggctgctgacctcctgcctggctcctgtccccaggtccagagtcagagcagactccagggacgctgcaggctaggaagccgccccctccaggcgagggtctagtgcaggtgcccaggacaagaaagattgtgaatgcaggaatgactgggccacacccctcccgtgcacgccccctcctgccctgcaccccacagcccagccccccgtgctggatgcccccccacagcagaggtgctgttctgtgatcccctgggaaagacgccctcaacctccaccctgtcccacggcccaaggaagacaagacacaggccctctcctcacagtctccccacctggctcctgctgggaccctcaaggtgtgaacagggaggatggttgtctgggtggcccctaggagcccagatcttcactccacagaccccaacccaagcacccccttctgcagggcccagctcatccccctcctcctccctctgctctcctctcgtcgcctctacgggaaatccgggactcagcagtaaccctcaggaagcagggcccaggcgccgtttaataggaggcttcctcacaatgaaacttttagaaagccttgactacaatgatgaccttggtgtggctgtgaacactgtcagctcccacagctgctgcagcaaaaaatgtccatagacagggtgggggcccggggtcgtctgctgtcctgctcagcccacagcacgcatggaggatctgaggtgccacacctgacgcccaggccagaacatgcctccctccagggtgacctgccatgtcctgcattgctggagggacaggggcagcctatgaggatctggggccaggagatgaatcctattaacccagaggaaaactaacaggacccaagcaccctccccgttgaagctgacctgcccagaggggcctgggcccaccccacacaccggggcggaatgtgtacaggccccggtctctgtgggtgttccgctaactggggctcccagtgctcaccccacaactaaagcgagccccagcctccagagcccccgaaggagatgccgcccacaagcccagcccccatccaggaggccccagagctcagggcgccggggcagattctgaacagccccgagtcacggtgggtacaactggaacgaccaccgtgagaaaaactgtgtccaaaactctctcctggcccctgctggaggccgcgccagagaggggagcagccgccccgaacctaggtcctgctcagctcacacgacccccagcagccagagcacagtggagtccccactgaaccccactgaatggtgaggacggggaccagggctccagggggtcatggaaggggctggaccccatcctactgctatggtcccagtgctcctggccagaactgaccctaccaccgacaagagtccctcagggaaacgggggtcactggcacctcccagcatcaaccccaggcagcacaggcataaaccccacatccagagccgactccaggagcagagacaccccagtaccctgggggacaccgaccctgatgactccccactggaatccaccccagagtccaccaggaccaaagaccccgccccggtctctgtccctcactcaggacctgctgcggggcgggccatgagaccagactcgggcttagggaacaccactgtggccccaacctcgaccaggccacaggcccttccttcctgccctgcggcagcacagactttggggtctgtgcagagaggaatcacagaggccccaggctgaggtggtgggggtggaagacccccaggaggtggcccacttcccttcctcccagctggaacccaccatgaccttcttaagataggggtgtcatccgaggcaggtcctccatggagctcccttcaggctcctccctggtcctcactaggcctcagtcccggctgtgggaatgcagccaccacaggcacaccaggcagcccagacccagccagcctgcagtgcccaagcccacattctggagcagagcaggctgtgtctgggagagtctgggctccccaccgcccccggcacaccccacccacccctgtccaggccctatgcaggagggtcagagccccccatggggtatggacttagggtctcactcacgcggctcccctcctgggtgaaggggtctcatgcccagatccccacagcagagctggtcaaaggtggaggcagtggccccagggccaccctgacctggaccctcaggctcctctagccctggctgccctgctgtccctgggaggcctggactccaccagaccacaggtccagggcaccgcccataggtgctgcccacactcagttcacaggaagaagataagctccagacccccaagactgggacctgccttcctgccaccgcttgtagctccagacctccgtgcctcccccgaccacttacacacgggccagggagctgttccacaaagatcaaccccaaaccgggaccgcctggcactcgggccgctgccacttccctctccatttgctcccagcacctctgtgctccctccctcctccctccttcaggggaacagcctgtgcagcccctccctgcaccccacaccctggggaggcccaaccctgcctccagccctttctcccccgctgctcttcctgcccatccagacaaccctggggtcccatccctgcagcctacaccctggtctccacccagacccctgtctctccctccagacacccctcccaggccaaccctgcacatgcaggccctccccttttctgctgccagagcctcagtttctaccctctgtgcctaccccctgcctcctcctgcccacaactcgagctcttcctctcctggggcccctgagccatggcactgaccgtgcactcccacccccacactgcccatgccctcaccttcctcctggacactctgaccctgctcccctcttggacccagccctggtatttccaggacaaaggctcacccaagtcttccccatgcaggcccttgccctcactgcccggttacacggcagcctcctgtgcacagaagcagggagctcagcccttccacaggcagaaggcactgaaagaaatcggcctccagcaccctgatgcacgtccgcctgtgtctctcactgcccgcacctgcagggaggctcggcactccctgtaaagacgagggatccaggcagcaacatcatgggagaatgcagggctcccagacagcccagccctctcgcaggcctctcctgggaagagacctgcagccaccactgaacagccacggagcccgctggatagtaactgagtcagtgaccgacctggagggcaggggagcagtgaaccggagcccagaccatagggacagagaccagccgctgacatcccgagcccctcactggcggccccagaacaccgcgtggaaacagaacagacccacattcccacctggaacagggcagacactgctgagcccccagcaccagccctgagaaacaccaggcaacggcatcagagggggctcctgagaaagaaaggaggggaggtctccttcaccagcaagtacttcccttgaccaaaaacagggtccacgcaactcccccaggacaaaggaggagccccctgtacagcactgggctcagagtcctctccaacacaccctgagtttcagacaaaaaccccctggaaatcatagtatcagcaggagaactagccagagacagcaagaggggactcagtgactcccgcggggacaggaggattttgtgggggctcgtgtcactgtgaggatattgtagtagtaccagctgctatgcccacagtgacacagccccattcccaaagccctgctgtaaacgcttccacttctggagctgaggggctggggggagcgtctgggaagtagggcctaggggtggccatcaatgcccaaaacgcaccagactcccccccagacatcaccccactggccagtgagcagagtaaacagaaaatgagaagcagctgggaagcttgcacaggccccaaggaaagagctttggcgggtgtgcaagaggggatgcgggcagagcctgagcagggccttttgctgtttctgctttcctgtgcagatagttccataaactggtgttcaagatcgatggctgggagtgagcccaggaggacagtgtgggaagggcacagggaaggagaagcagccgctatcctacactgtcatctttcaagagtttgccctgtgcccacaatgctgcatcatgggatgcttaacagctgatgtagacacagctaaagagagaatcagtgaaatggatttgcagcacagatctgaataaattctccagaatgtggagccacacagaagcaagcacaaggaaagtgcctgatgcaagggcaaagtacagtgtgtaccttcaggctgggcacagacactctgaaaagccttggcaggaactccctgcaacaaagcagagccctgcaggcaatgccagctccagagccctccctgagagcctcatgggcaaagatgtgcagaacatatgtttgtcatagccccaaactgagaatgaagcaaacagccatctgaaggaaaacaggcaaataaacgatggcaggttcatgaaatgcaaacccagacagccagaaggacaacagtgagggttacaggtgactctgtggttgagttcatgacaatgctgagtaattggagtaacaaaggaaagtccaaaaaatactttcaatgtgatttcttctaaataaaatttacagccggcaaaatgaactatcttcttaagggataaactttccactaggaaaactataaggaaaatcaagaaaaggatgatcacataaacacagtggtcgttacttctactggggaaggaagagggtatgaactgagacacacagggttggcaagtctcctaacaagaagagaacaaatacattacagtaccttgaaaacagcagttaaaattctaaattgcaagaagaggaaaatgcacacagctgtgtttagaaaattctcagtccagcactgttcataatagcaaagacattaacccaggttggataaataaacgatgacacaggcaattgcacaatgatacagacatacattcagtatatgagacattgatgatgtatccccaaagaaatgactttaaagagaaaaggcctgatatgtggtggcactcacctccctgggcatccccggacaggctgcaggcacactgtgtggcagggcaggctggtacctgctggcagctcctggggcctgatgtggagcaggcacagagccgtatccccccgaggacatatacccccaaggacggcacagttggtacattccggagacaagcaactcagccacactcccaggccagagcccgagagggacgcccatgcacagggaggcagagcccagctcctccacagccagcagcacctgtgcaggggccgccatctggcaggcacagagcatgggctgggaggaggggcagggacaccaggcagggttggcaccaactgaaaattacagaagtctcatacatctacctcagccttgcctgacctgggcctcacctgacctggacctcacctggcctggacctcacctggcctagacctcacctctgggcttcacctgagctcggcctcacctgacttggaccttgcctgtcctgagctcacatgatctgggcctcacctgacctgggtttcacctgacctgggcttcacctgacctgggcctcatctgacctgggcctcactggcctggacctcacctggcctgggcttcacctggcctcaggcctcatctgcacctgctccaggtcttgctggaacctcagtagcactgaggctgcaggggctcatccagggttgcagaatgactctagaacctcccacatctcagctttctgggtggaggcacctggtggcccagggaatataaaaagcctgaatgatgcctgcgtgatttgggggcaatttataaacccaaaaggacatggccatgcagcgggtagggacaatacagacagatatcagcctgaaatggagcctcagggcacaggtgggcacggacactgtccacctaagccaggggcagacccgagtgtccccgcagtagacctgagagcgctgggcccacagcctcccctcggtgccctgctacctcctcaggtcagccctggacatcccgggtttccccaggcctggcggtaggtttggggtgaggtctgtgtcactgtggtattacgatttttggagtggttattatacccacagtgtcacagagtccatcaaaaacccatccctgggaacctgctgccacagccctccctgtggggcaccgccgcgtgccatgttaggattttgactgaggacacagcaccatgggtatggtggctaccgcagcagtgcagcctgtgacccaaacacacagggcagcaggcacaacagacaagcccacaagtgaccaccctgagctcctgcctgccagccctggagaccatgaaacagatggccaggattatcccataggtcagccagacctcagtccaacaggtctgcatcgctgctgccctccaataccagtccggatggggacagggccggcccacattaccatttgctgccatccggccaacagtcccagaagcccctccctcaaggctgggccacatgtgtggaccctgagagccccccatgtctgagtaggggcaccaggaaggtggggctggccctgtgcactgtcactgcccctgtggtccctggcctgcctggccctgacacctgggcctctcctgggtcatttccaagacagaagacattcccaggacagctggagctgggagtccatcatcctgcctggccatcctgagtcctgcgcctttccaaacctcacccgggaagccaacagaggaatcacctcccacaggcagagacaaagaccttccagaaatctctgtctctctccccagtgggcaccctcttccagggcagtcctcagtgatatcacagtgggaacccacatctggatcgggactgcccccagaacacaagatggcccacagggacagccccacagcccagcccttcccagacccctaaaaggcgtcccaccccctgcatctgccccagggctcaaactccaggaggactgactcctgcacaccctcctgccagacatcacctcagcccctcctggaagggacaggagcgcgcaagggtgagtcagaccctcctgccctcgatggcaggcggagaagattcagaaaggtctgagatccccaggacgcagcaccactgtcaatgggggccccagacgcctggaccagggcctgcgtgggaaaggcctctgggcacactcaggggctttttgtgaagggtcctcctactgtgtgactacagtaactaccacagtgatgaacccagcagcaaaaactgaccggactcccaaggtttatgcacacttctccgctcagagctctccaggatcagaagagccgggcccaagggtttctgcccagaccctcggcctctagggacatcttggccatgacagcccatgggctggtgccccacacatcgtctgccttcaaacaagggcttcagagggctctgaggtgacctcactgatgaccacaggtgccctggccccttccccgccagctgcaccagaccccgtcctgacagatgccccgattccaacagccaattcctggggccaggaatcgctgtagacaccagcctccttccaacacctcttgccaattgcctggattcccatcccggttggaatcaagaggacagcatcccccaggctcccaacaggcaggactcccacaccctcctctgagaggccgctgtgttccgtagggccaggctgcagacagtccccctcacctgccactagacaaatgcctgctgtagatgtccccacctggaaaagaccactcatggagcccccagccccaggtacagccatagagagagtctctgaggcccctaagaagtagccatgcccagttctgccgggaccctcggccaggctgacaggagtggacgctggagctgggcccacactgggccacataggagctcaccagtgagggcaggagagcacatgccggggagcacccagcctcctgctgaccagaggcccgtcccagagcccaggaggctgcagaggcctctccagggggacactgtgcatgtctggtccctgagcagccccccatgtccccagtcctgggggcccctggcacagctgtctggaccctctctattccctgggaagctcctcctgacagccccgcctccagttccaggtgtggttattgtcagggggtgtcagactgtggtggatacagctatggttaccacagtggtgctgcccatagcagcaaccaggccaagtagacaggcccctgctgtgcagccccaggcctccagctcacctgcttctcctggggctctcaaggctgctgttttctgcactctcccctctgtggggagggttccctcagtgggagatctgttctcaacatcccagggcctcattcctgcaaggaaggccaatggatgggcaacctcacatgccgcggctaagatagggtgggcagcctggcggggacaggacatcctgctggggtatctgtcactgtgcctagtggggcactggctcccaaacaacgcagtcctcgccaaaatccccacggcctcccccgctaggggctggcctgatctcctgcagtcctaggaggctgctgacctccagaatggctccgtccccagttccagggcgagagcagatcccaggccggctgcagactgggaggccaccccctccttcccagggttcactgcaggtgaccagggcaggaaatggcctgaacacagggataaccgggccatcccccaacagagtccaccccctcctgctctgtaccccgcacccccaaggccagcccatgacatccgacaaccccacaccagagtcactgcccggtgctgccctagggaggacccctcagcccccaccctgtctagaggactggggaggacaggacacgccctctccttatggttcccccacctggctctggctgggacccttggggtgtggacagaaaggacgcttgcctgattggcccccaggagcccagaacttctctccagggaccccagcccgagcacccccttacccaggacccagccctgcccctcctcccatctgctctcctctcatcaccccatgggaatccagaatccccaggaagccatcaggaagggctgagggaggaagtggggccactgcaccaccaggcaggaggctccgtctttgtgaacccagggaggtgccagcctcctagagggtatggtccaccctgcctatggctcccacagtggcaggctgcagggaaggaccagggacggtgtgggggagggctcagggccccgcgggtgctccatcttggatgagcccatctctctcacccacggactcacccacctcctctccaccctggccacacgtcgtccacaccatcctaagtcccacctacaccagagccggcacagccagtgcagacagaggctggggtgcaggggggccgccagggcagctttggggagggaaggatggaggaaggggagttcagtgaagaggcccccctcccctgggtccaggatcctcctctgggacccccggatcccatcccctccaggctctgggaggagaagcaggatgggagaatctgtgcgggaccctctcacagtggaatacctccacagcggctcaggcaagacccaaaagcccctcagtgagccctccactgcagtcctgggcctgggtagcagcccctcccacagaggatgaacccagcaccccgaggatgtcctgccagggggagctcagagccatgaaggagcaggatatgggacccccgatacaggcacagacctcagctccattcaggactgccacgtcctgccctgggaggaacccctttctctagtccctgcaggccaggaggcagctgactcctgacttggacgcctattccagacaccagacagaggggcaggccccccagaaccagggatgaggacgccccgtcaaggccagaaaagaccaagttgtgctgagcccagcaagggaaggtccccaaacaaaccaggaagtttctgaaggtgtctgtgtcacagtggagtatagcagctcgtcccacagtgacactcgccaggccagaaaccccatcccaagtcagcggaatgcagagagagcagggaggacatgtttaggatctgaggccgcacctgacacccaggccagcagacgtctcctgtccatggcaccctgccatgtcctgcatttctggaagaacaagggcaggctgaagggggtccaggaccaggagatgggtcccctctacccagagaaggagccaggcaggacacaagccccctccccattgaggctgacctgcccagagggtcctgggcccaccccacacaccggggcggaatgtgtgcaggcctcggtctctgtgggtgttccgctagctggggctcacagtgctcaccccacacctaaaacgagccacagcctcagagcccctgaaggagaccccgcccacaagcccagcccccacccaggaggccccagagcacagggcgccccgtcggattctgaacagccccgagtcacagtgggtataactggaactaccactgtgagaaaagcttcgtccaaaacggtctcctggccacagtcggaggccccgccagagaggggagcagccaccccaaacccatgttctgccggctcccatgaccccgtgcacctggagccccacagtgtccccactggatgggaggacaagggccgggggctccggcgggtcggggcaggggcttgatggcttccttctgccgtggctccagtgcccctggctggagttgacccttctgacaagtgtcctcagagagtcagggatcagtggcacctccctaacatcaaccccacgcagcgcaggcacaaaccccacatccagggccaactccaggaacagagacaccccaataccctgggggaccccaaccctgatgactcccgtcccatctctgtccctcacttggggcctgctgcggggcgagcacctgggagcaaactcaggattaggggacaccactgtgggcctgacctcgagcaggccacagacccttccctcctgccctggtgcagcacagactttggggtctgggcagggaggaacttctggcaggtcaccaagcacagagcccccaggctgaggtggccccagggggaaccccagcaggtggcccactacccttcctcccagctggaccccatgtcttccccaagataggggtgccatccaaggcaggtcctccatggagcccccttcaggctcctctccagaccccactgggcctcagtccccactctaggaatgcagccaccacgggcacaccaggcagcccaggcccagccaccctgcagtgcccaagcccacaccctggaggagagcagggtgcgtctgggaggggctgggctccccacccccacccccacctgcacaccccacccacccttgcccgggccccctgcaggagggtcagagcccccatgggatatggacttagggtctcactcacgcacctcccctcctgggagaaggggtctcatgcccagatccccccagcagcgctggtcacaggtagaggcagtggccccagggccaccctgacctggcccctcaggctcctctagccctggctgccctgctgtccctgggaggcctgggctccaccagaccacaggtctagggcaccgcccacactggggccgcccacacacagctcacaggaagaagataagctccagacccccaggcccgggacctgccttgctgctacgacttcctgccccagacctcgttgccctcccccgtccacttacacacaggccaggaagctgttcccacacagaccaaccccagacggggaccacctggcactcaggtcactgccatttccttctccattcacttccaatgcctctgtgcttcctccctcctccttccttcgggggagcaccctgtgcagctcctccctgcagtccacaccctggggagacccgaccctgcagcccacaccctggggagacctgaccctcctccagccctttctcccccgctgctcttgccacccaccaagacagccctggggtcctgtccctacagcccccacccagttctctacctagacccgtcttcctccctctaaacacctctcccaggccaaccctacacctgcaggccctcccctccactgccaaagaccctcagtttctcctgcctgtgcccacccccgtgctcctcctgcccacagctcgagctcttcctctcctagggcccctgagggatggcattgaccgtgccctcgcacccacacactgcccatgccctcacattcctcctggccactccagccccactcccctctcaggcctggctctggtatttctgggacaaagccttacccaagtctttcccatgcaggcctgggcccttaccctcactgcccggttacagggcagcctcctgtgcacagaagcagggagctcagcccttccacaggcagaaggcactgaaagaaatcggcctccagcgccttgacacacgtctgcctgtgtctctcactgcccgcacctgcagggaggctcggcactccctctaaagacgagggatccaggcagcagcatcacaggagaatgcagggctaccagacatcccagtcctctcacaggcctctcctgggaagagacctgaagacgcccagtcaacggagtctaacaccaaacctccctggaggccgatgggtagtaacggagtcattgccagacctggaggcaggggagcagtgagcccgagcccacaccatagggccagaggacagccactgacatcccaagccactcactggtggtcccacaacaccccatggaaagaggacagacccacagtcccacctggaccagggcagagactgctgagacccagcaccagaaccaaccaagaaacaccaggcaacagcatcagagggggctctggcagaacagaggaggggaggtctccttcaccagcaggcgcttcccttgaccgaagacaggatccatgcaactcccccaggacaaaggaggagccccttgttcagcactgggctcagagtcctctccaagacacccagagtttcagacaaaaaccccctggaatgcacagtctcagcaggagagccagccagagccagcaagatggggctcagtgacacccgcagggacaggaggattttgtgggggctcgtgtcactgtgaggatattgtactaatggtgtatgctatacccacagtgacacagccccattcccaaagccctactgcaaacgcattccacttctggggctgaggggctgggggagcgtctgggaaatagggctcaggggtgtccatcaatgcccaaaacgcaccagactcccctccatacatcacacccaccagccagcgagcagagtaaacagaaaatgagaagcaagctggggaagcttgcacaggccccaaggaaagagctttggcgggtgtgtaagaggggatgcgggcagagcctgagcagggccttttgctgtttctgctttcctgtgcagagagttccataaactggtgttcgagatcaatggctgggagtgagcccaggaggacagcgtgggaagagcacagggaaggaggagcagccgctatcctacactgtcatctttcgaaagtttgccttgtgcccacactgctgcatcatgggatgcttaacagctgatgtagacacagctaaagagagaatcagtgagatggatttgcagcacagatctgaataaattctccagaatgtggagcagcacagaagcaagcacacagaaagtgcctgatgcaaggacaaagttcagtgggcaccttcaggcattgctgctgggcacagacactctgaaaagccctggcaggaactccctgtgacaaagcagaaccctcaggcaatgccagccccagagccctccctgagagcctcatgggcaaagatgtgcacaacaggtgtttctcatagccccaaactgagagcaaagcaaacgtccatctgaaggagaacaggcaaataaacgatggcaggttcatgaaatgcaaacccagacagccacaagcacaaaagtacagggttataagcgactctggttgagttcatgacaatgctgagtaattggagtaacaaagtaaactccaaaaaatactttcaatgtgatttcttctaaataaaatttacaccctgcaaaatgaactgtcttcttaagggatacatttcccagttagaaaaccataaagaaaaccaagaaaaggatgatcacataaacacagtggtggttacttctgctggggaaggaagagggtatgaactgagatacacagggtgggcaagtctcctaacaagaacagaacgaatacattacagtaccttgaaaacagcagttaaacttctaaattgcaagaagaggaaaatggacacagttgtgtttagaaaattctcagtccagcactgttcataatagcaaagacattaacccaggtcggataaataagcgatgacacaggcaattgcacaatgatacagacatatatttagtatatgagacatcgatgatgtatccccaaataaacgactttaaagagataaagggctgatgtgtggtggcattcacctccctgggatccccggacaggttgcaggctcactgtgcagcagggcaggcgggtacctgctggcagttcctggggcctgatgtggagcaagcgcagggccatatatcccggaggacggcacagtcagtgaattccagagagaagcaactcagccacactccccaggcagagcccgagagggacgcccacgcacagggaggcagagcccagcacctccgcagccagcaccacctgtgcacgggccaccaccttgcaggcacagagtgggtgctgagaggaggggcagggacaccaggcagggtgagcacccagagaaaactgcagacgcctcacacatccacctcagcctcccctgacctggacctcactggcctgggcctcacttaacctgggcttcacctgaccttggcctcacctgacttggacctcgcctgtcccaagctttacctgacctgggcctcaactcacctgaacgtctcctgacctgggtttaacctgtcctggaactcacctggccttggcttcccctgacctggacctcatctggcctgggcttcacctggcctgggcctcacctgacctggacctcatctggcctggacctcacctggcctggacttcacctggcctgggcttcacctgacctggacctcacctggcctcgggcctcacctgcacctgctccaggtcttgctggagcctgagtagcactgagggtgcagaagctcatccagggttggggaatgactctagaagtctcccacatctgacctttctgggtggaggcagctggtggccctgggaatataaaaatctccagaatgatgactctgtgatttgtgggcaacttatgaacccgaaaggacatggccatggggtgggtagggacatagggacagatgccagcctgaggtggagcctcaggacacaggtgggcacggacactatccacataagcgagggatagacccgagtgtccccacagcagacctgagagcgctgggcccacagcctcccctcagagccctgctgcctcctccggtcagccctggacatcccaggtttccccaggcctgccggtaggtttagaatgaggtctgtgtcactgtggtattacgatattttgactggttattataaccacagtgtcacagagtccatcaaaaacccatgcctggaagcttcccgccacagccctccccatggggccctgctgcctcctcaggtcagccccggacatcccgggtttccccaggctgggcggtaggtttggggtgaggtctgtgtcactgtggtattactatggttcggggagttattataaccacagtgtcacagagtccatcaaaaacccatccctgggagcctcccgccacagccctccctgcaggggaccggtacgtgccatgttaggattttgatcgaggagacagcaccatgggtatggtggctaccacagcagtgcagcctgtgacccaaacccgcagggcagcaggcacgatggacaggcccgtgactgaccacgctgggctccagcctgccagccctggagatcatgaaacagatggccaaggtcaccctacaggtcatccagatctggctccgaggggtctgcatcgctgctgccctcccaacgccagtccaaatgggacagggacggcctcacagcaccatctgctgccatcaggccagcgatcccagaagcccctccctcaaggctgggccacatgtgtggacactgagagccctcatgtctgagtaggggcaccaggagggaggggctggccctgtgcactgtccctgcccctgtggtccctggcctgcctggccctgacacctgagcctctcctgggtcatttccaagacagaagacattcctggggacagccggagctgggcgtcgctcatcctgcccggccgtcctgagtcctgctcatttccagacctcaccggggaagccaacagaggactcgcctcccacattcagagacaaagaaccttccagaaatccctgcctctctccccagtggacaccctcttccaggacagtcctcagtggcatcacagcggcctgagatccccaggacgcagcaccgctgtcaataggggccccaaatgcctggaccagggcctgcgtgggaaaggtctctggccacactcgggctttttgtgaagggccctcctgctgtgtgactacagtaactaccatagtgatgaacccagtggcaaaaactggctggaaacccaggggctgtgtgcacgcctcagcttggagctctccaggagcacaagagccgggcccaaggatttgtgcccagaccctcagcctctagggacacctgggccatctcagcctgggctggtgccctgcacaccatcttcctccaaataggggcttcagagggctctgaggtgacctcactcatgaccacaggtgacctggcccttccctgccagctataccagaccctgtcttgacagatgccccgattccaacagccaattcctgggaccctgaatagctgtagacaccagcctcattccagtacctcctgccaattgcctggattcccatcctggctggaatcaagaaggcagcatccgccaggctcccaacaggcaggactcccgcacaccctcctctgagaggccgctgtgttccgcagggccaggccctggacagttcccctcacctgccactagagaaacacctgccattgtcgtccccacctggaaaagaccactcgtggagcccccagccccaggtacagctgtagagagagtcctcgaggcccctaagaaggagccatgcccagttctgccgggaccctcggccaggccgacaggagtggacgctggagctgggcccacactgggccacataggagctcaccagtgagggcaggagagcacatgccggggagcacccagcctcctgctgaccagaggcctgccccagagcccaggaggctgcagaggcctctccagggagacactgtgcatgtctggtacctaagcagccccccacgtccccagtcctgggggcccctggctcagctgtctggaccctccctgttccctgggaagctcctcctgacagccccgcctccagttccaggtgtggttattgtcaggcgatgtcagactgtggtggatatagtggctacgattaccacagtggtgccgcccatagcagcaaccaggccaagtagacaggcccctgctgcgcagccccaggcatccacttcacctgcttctcctggggctctcaaggctgctgtctgtcctctggccctctgtggggagggttccctcagtgggaggtctgtgctccagggcagggatgattgagatagaaatcaaaggctggcagggaaaggcagcttcccgccctgagaggtgcaggcagcaccacggagccacggagtcacagagccacggagcccccattgtgggcatttgagagtgctgtgcccccggcaggcccagccctgatggggaagcctgtcccatcccacagcccgggtcccacgggcagcgggcacagaagctgccaggttgtcctctatgatcctcatccctccagcagcatcccctccacagtggggaaactgaggcttggagcaccacccggccccctggaaatgaggctgtgagcccagacagtgggcccagagcactgtgagtaccccggcagtacctggctgcagggatcagccagagatgccaaaccctgagtgaccagcctacaggaggatccggccccacccaggccactcgattaatgctcaaccccctgccctggagacctcttccagtaccaccagcagctcagcttctcagggcctcatccctgcaaggaaggtcaagggctgggcctgccagaaacacagcaccctccctagccctggctaagacagggtgggcagacggctgtggacgggacatattgctggggcatttctcactgtcacttctgggtggtagctctgacaaaaacgcagaccctgccaaaatccccactgcctcccgctaggggctggcctggaatcctgctgtcctaggaggctgctgacctccaggatggctccgtccccagttccagggcgagagcagatcccaggcaggctgtaggctgggaggccacccctgcccttgccggggttgaatgcaggtgcccaaggcaggaaatggcatgagcacagggatgaccgggacatgccccaccagagtgcgccccttcctgctctgcaccctgcaccccccaggccagcccacgacgtccaacaactgggcctgggtggcagccccacccagacaggacagacccagcaccctgaggaggtcctgccagggggagctaagagccatgaaggagcaagatatggggcccccgatacaggcacagatgtcagctccatccaggaccacccagcccacaccctgagaggaacgtctgtctccagcctctgcaggtcgggaggcagctgacccctgacttggacccctattccagacaccagacagaggcgcaggccccccagaaccagggttgagggacgccccgtcaaagccagacaaaaccaaggggtgttgagcccagcaagggaaggcccccaaacagaccaggaggtttctgaaggtgtctgtgtcacagtggggtatagcagcagctggtaccacagtgacactcacccagccagaaaccccattccaagtcagcggaagcagagagagcagggaggacacgtttaggatctgagactgcacctgacacccaggccagcagacgtctcccctccagggcaccccaccctgtcctgcatttctgcaagatcaggggcggcctgagggggggtctagggtgaggagatgggtcccctgtacaccaaggaggagttaggcaggtcccgagcactctccccattgaggctgacctgcccagagagtcctgggcccaccccacacaccggggcggaatgtgtgcaggcctcggtctctgtgggtgttccgctagctggggctcacagtgctcaccccacacctaaaatgagccacagcctccggagcccccgcaggagaccccgcccacaagcccagcccccacccaggaggccccagagctcagggcgccccgtcggattccgaacagccccgagtcacagcgggtataaccggaaccaccactgtcagaatagctacgtcaaaaactgtccagtggccactgccggaggccccgccagagagggcagcagccactctgatcccatgtcctgccggctcccatgacccccagcacgcggagccccacagtgtccccactggatgggaggacaagagctggggattccggcgggtcggggcaggggcttgatcgcatccttctgccgtggctccagtgcccctggctggagttgacccttctgacaagtgtcctcagagagacaggcatcaccggcgcctcccaacatcaaccccaggcagcacaggcacaaaccccacatccagagccaactccaggagcagagacaccccaataccctgggggaccccgaccctgatgacttcccactggaattcgccgtagagtccaccaggaccaaagaccctgcctctgcctctgtccctcactcaggacctgctgccgggcgaggccttgggagcagacttgggcttaggggacaccagtgtgaccccgaccttgaccaggacgcagacctttccttcctttcctggggcagcacagactttggggtctgggccaggaggaacttctggcaggtcgccaagcacagaggccacaggctgaggtggccctggaaagacctccaggaggtggccactccccttcctcccagctggaccccatgtcctccccaagataagggtgccatccaaggcaggtgctccttggagccccattcagactcctccctggaccccactgggcctcagtcccagctctggggatgaagccaccacaagcacaccaggcagcccaggcccagccaccctgcagtgcccaagcacacactctggagcagagcagggtgcctctgggaggggctgagctccccaccccacccccacctgcacaccccacccacccctgcccagcggctctgcaggagggtcagagccccacatggggtatggacttagggtctcactcacgtggctcccatcatgagtgaaggggcctcaagcccaggttcccacagcagcgcctgtcgcaagtggaggcagaggcccgagggccaccctgacctggtccctgaggttcctgcagcccaggctgccctgctgtccctgggaggcctgggctccaccagaccacaggtccagggcaccgggtgcaggagccacccacacacagctcacaggaagaagataagctccagacccccagggccagaacctgccttcctgctactgcttcctgccccagacctgggcgccctcccccgtccacttacacacaggccaggaagctgttcccacacagaacaaccccaaaccaggaccgcctggcactcaggtggctgccatttccttctccatttgctcccagcgcctctgtcctccctggttcctccttcgggggaacagcctgtgcagccagtccctgcagcccacaccctggggagacccaaccctgcctggggcccttccaaccctgctgctcttactgcccacccagaaaactctggggtcctgtccctgcagtccctaccctggtctccacccagacccctgtgtatcactccagacacccctcccaggccaaccctgcacctgcaggccctgtcctcttctgtcgctagagcctcagtttctcccccctgtgcccacaccctacctcctcctgcccacaactctaactcttcttctcctggagcccctgagccatggcattgaccctgccctcccaccacccacagcccatgccctcaccttcctcctggccactccgaccccgccccctctcaggccaagccctggtatttccaggacaaaggctcacccaagtctttcccaggcaggcctgggctcttgccctcacttcccggttacacgggagcctcctgtgcacagaagcagggagctcagcccttccacaggcagaaggcactgaaagaaatcggcctccagcaccttgacacacgtccgcccgtgtctctcactgcccgcacctgcagggaggctccgcactccctctaaagacaagggatccaggcagcagcatcacgggagaatgcagggctcccagacatcccagtcctctcacaggcctctcctgggaagagacctgcagccaccaccaaacagccacagaggctgctggatagtaactgagtcaatgaccgacctggagggcaggggagcagtgagccggagcccataccatagggacagagaccagccgctgacatcccgagctcctcaatggtggccccataacacacctaggaaacataacacacccacagccccacctggaacagggcagagactgctgagcccccagcaccagccccaagaaacaccaggcaacagtatcagagggggctcccgagaaagagaggaggggagatctccttcaccatcaaatgcttcccttgaccaaaaacagggtccacgcaactcccccaggacaaaggaggagccccctatacagcactgggctcagagtcctctctgagacaccctgagtttcagacaacaacccgctggaatgcacagtctcagcaggagaacagaccaaagccagcaaaagggacctcggtgacaccagtagggacaggaggattttgtgggggctcgtgtcactgtgaggatattgtagtggtggtagctgctactcccacagtgacacagacccattcccaaagccctactgcaaacacacccactcctggggctgaggggctgggggagcgtctgggaagtagggtccaggggtgtctatcaatgtccaaaatgcaccagactccccgccaaacaccaccccaccagccagcgagcagggtaaacagaaaatgagaggctctgggaagcttgcacaggccccaaggaaagagctttggcaggtgtgcaagaggggatgcaggcagagcctgagcagggccttttgctgtttctgctttcctgtgcagagagttccataaactggtgttcaagatcagtggctgggaatgagcccaggagggcagtctgtgggaagagcacagggaaggaggagcagccgctatcctacactgtcatctttcaaaagtttgccttgtgaccacactattgcatcatgggatgcttaagagctgatgtagacacagctaaagagagaatcagtgagatgaatttgcagcatagatctgaataaactctccagaatgtggagcagtacagaagcaaacacacagaaagtgcctgatgcaaggacaaagttcagtgggcaccttcaggcattgctgctgggcacagacactctgaaaagccctggcaggatctccctgcgacaaagcagaaccctcaggcaatgccagccccagagccctccctgagagcgtcatggggaaagatgtgcagaacagctgattatcatagactcaaactgagaacagagcaaacgtccatctgaagaacagtcaaataagcaatggtaggttcatgcaatgcaaacccagacagccaggggacaacagtagagggctacaggcggctttgcggttgagttcatgacaatgctgagtaattggagtaacagaggaaagcccaaaaaatacttttaatgtgatttcttctaaataaaatttacaccaggcaaaatgaactgtcttcttaagggataaactttcccctggaaaaactacaaggaaaattaagaaaacgatgatcacataaacacagttgtggttacttctactggggaaggaagagggtatgagctgagacacacagagtcggcaagtctccaagcaagcacagaacgaatacattacagtaccttgaatacagcagttaaacttctaaatcgcaagaagaggaaaatgcacacagctgtgtttagaaaattctcagtccagcactattcataatagcaaagacattaacccaggttggataaataaatgatgacacaggcaattgcacaatgatacagacatacatttagtacatgagacatcgatgatgtatccccaaagaaatgactttaaagagaaaaggcctgatgtgtggtggcactcacctccctgggatccccggacaggttgcaggcacactgtgtggcagggcaggctggtacatgctggcagctcctggggcctgatgtggagcaagcgcagggctgtatacccccaaggatggcacagtcagtgaattccagagagaagcagctcagccacactgcccaggcagagcccgagagggacgcccacgcacagggaggcagagcccagctcctccacagccaccaccacctgtgcacgggccaccaccttgcaggcacagagtgggtgctgagaggaggggcagggacaccaggcagggtgagcacccagagaaaactgcagaagcctcacacatccacctcagcctcccctgacctggacctcacctggtctggacctcacctggcctgggcctcacctgacctggacctcacctggcctgggcttcacctgacctggacctcacctggcctccggcctcacctgcacctgctccaggtcttgctggaacctgagtagcactgaggctgcagaagctcatccagggttggggaatgactctggaactctcccacatctgacctttctgggtggaggcatctggtggccctgggaatataaaaagccccagaatggtgcctgcgtgatttgggggcaatttatgaacccgaaaggacatggccatggggtgggtagggacatagggacagatgccagcctgaggtggagcctcaggacacagttggacgcggacactatccacataagcgagggacagacccgagtgttcctgcagtagacctgagagcgctgggcccacagcctcccctcggtgccctgctgcctcctcaggtcagccctggacatcccgggtttccccaggcctggcggtaggtttgaagtgaggtctgtgtcactgtggtattatgattacgtttgggggagttatcgttatacccacagcatcacacggtccatcagaaacccatgccacagccctccccgcaggggaccgccgcgtgccatgttacaattttgatcgaggacacagcgccatgggtatggtggctaccacagcagtgcagcccatgacccaaacacacagggcagcaggcacaatggacaggcctgtgagtgaccatgctgggctccagcccgccagccccggagaccatgaaacagatggccaaggtcaccccacagttcagccagacatggctccgtggggtctgcatcgctgctgccctctaacaccagcccagatggggacaaggccaaccccacattaccatctcctgctgtccacccagtggtcccagaagcccctccctcatggctgagccacatgtgtgaaccctgagagcaccccatgtcagagtaggggcagcagaagggcggggctggccctgtgcactgtccctgcacccatggtccctcgcctgcctggccctgacacctgagcctcttctgagtcatttctaagatagaagacattcccggggacagccggagctgggcgtcgctcatcctgcccggccgtcctgagtcctgcttgtttccagacctcaccagggaagccaacagaggactcacctcacacagtcagagacaaagaaccttccagaaatccctgtctcactccccagtgggcaccttcttccaggacattcctcggtcgcatcacagcaggcacccacatctggatcaggacggcccccagaacacaagatggcccatggggacagccccacaacccaggccttcccagacccctaaaaggcgtcccaccccctgcacctgccccagggctaaaaatccaggaggcttgactcccgcataccctccagccagacatcacctcagccccctcctggaggggacaggagcccgggagggtgagtcagacccacctgccctcgatggcaggcggggaagattcagaaaggcctgagatccccaggacgcagcaccactgtcaatgggggccccagacgcctggaccagggcctgcgtgggaaaggccgctgggcacactcaggggctttttgtgaaggcccctcctactgtgtgactacggtgactaccacagtgatgaaactagcagcaaaaactggccggacacccagggaccatgcacacttctcagcttggagctctccaggaccagaagagtcaggtctgagggtttgtagccagaccctcggcctctagggacaccctggccatcacagcggatgggctggtgccccacatgccatctgctccaaacaggggcttcagagggctctgaggtgacttcactcatgaccacaggtgccctggccccttccccgccagctacaccgaaccctgtcccaacagctgccccagttccaacagccaattcctggggcccagaattgctgtagacaccagcctcgttccagcacctcctgccaattgcctggattcacatcctggctggaatcaagagggcagcatccgccaggctcccaacaggcaggactcccgcacaccctcctctgagaggccgctgtgttccgcagggccaggccctggacagttcccctcacctgccactagagaaacacctgccattgtcgtccccacctggaaaagaccactcgtggagcccccagccccaggtacagctgtagagagactccccgagggatctaagaaggagccatgcgcagttctgccgggaccctcggccaggccgacaggagtggacactggagctgggcccacactgggccacataggagctcaccagtgagggcaggagagcacatgccggggagcacccagcctcctgctgaccagaggcctgccccagagcccaggaggctgcagaggcctctccagggggacactgtgcatgtctggtccctgagcagccccccatgtccccagtcctgggggcccctggcacagctgtctggaccctccctgttccctgggaagctcctcctgacagccccgcctccagttccaggtgtggttattgtcagggggtgtcagactgtggtggatacagctatggttaccacagtggtgctgcccatagcagcaaccaggccaagtagacaggcccctgctgtgcagccccaggcctccagctcacctgcttctcctggggctctcaaggtcactgttgtctgtactctgccctctgtggggagggttctctcagtgggaggtctgttctcaacatcccagggcctcatgtctgcacggaaggccaatggatgggcaacctcacatgccgcggctaagatagggtgggcagcctggcgggggacagtacatactgctggggtgtctgtcactgtgcctagtggggcactggctcccaaacaacgcagtcctcaccaaaatccccacagcctcccctgctaggggctggcctgatctcctgcagtcctaggaggctgctgacctccagaatgtctccgtccccagttccagggcgagagcagatcccaggccggctgcagactgggaggccaccccctccttcccagggttcactggaggtgaccaaggtaggaaatggccttaacacagggatgactgcgccatcccccaacagagtcagccccctcctgctctgtaccccgcaccccccaggccagtccacgaaaaccagggccccacatcagagtcactgcctggcccggccctggggcggacccctcagcccccaccctgtctagaggacttggggggacaggacacaggccctctccttatggttcccccacctgcctccggccgggacccttggggtgtggacagaaaggacacctgcctaattggcccccaggaacacagaacttctctccagggaccccagcccgagcacccccttacccaggacccagccctgcccctcctcccctctgctctcctctcatcaccccatgggaatccggtatccccaggaagccatcaggaagggctgaaggaggaagcggggccgtgcaccaccgggcagcaggctccgtcttcgtgaacccagggaagtgccagcctcctagagggtatggtccaccctgcctggggctcccaccgtggcaggctgcggggaaggaccagggacggtgtgggggagggctcagggccctgcgggtgctcctccatcttcggtgagcctcccccttcacccaccgtcccgcccacctcctctccaccctggctgcacgtcttccacaccatcctgagtcctacctacaccagagccagcaaagccagtgcagacaaaggctggggtgcaggggggctgccagggcagcttcggggagggaaggatggagggaggggaggtcagtgaagaggcccccttcccctgggtccaggatcctcctctgggacccccggctcccatcccctcctggctctgggaggagaagcaggatgggagaatctgtgcgggaccctctcacagtggaatatccccacagcggctcaggccagacccaaaagcccctcagtgagccctccactgcagtcctgggcctgggtagcagcccctcccacagaggacagacccagcaccccgaagaagtcctgccagggggagctcagagccatgaaagagcaggatatggggtccccgatacaggcacagacctcagctccatccaggcccaccgggacccaccatgggaggaacacctgtctccgggttgtgaggtggctggcctctgtctcggaccccactccagacaccagacagaggggcaggccccccaaaaccagggttgagggatgatccgtcaaggcagacaagaccaaggggcactgaccccagcaagggaaggctcccaaacagacgaggaggtttctgaagctgtctgtatcacagtggggtatagcagtggctggtaccacagtgacactcgccaggccagaaaccccgtcccaagtcagcggaagcagagagagcagggaggacacgtttaggatctgaggccgcacctgacacccagggcagcagacgtctcccctccagggcaccctccaccgtcctgcgtttcttcaagaataggggcggcctgagggggtccagggccaggcgataggtcccctctaccccaaggaggagccaggcaggacccgagcaccgtccccattgaggctgacctgcccagacgggcctgggcccaccccacacaccggggcggaatgtgtgcaggccccagtctctgtgggtgttccgctagctggggcccccagtgctcaccccacacctaaagcgagccccagcctccagagccccctaagcattccccgcccagcagcccagcccctgcccccacccaggaggccccagagctcagggcgcctggtcggattctgaacagccccgagtcacagtgggtataactggaacgaccaccgtgagaaaaactgtgtccaaaactgactcctggcagcagtcggaggccccgccagagaggggagcagccgccctgaacccatgtcctgccggttcccatgacccccagcacccagagccccacggtgtccccgttggataatgaggacaagggctgggggctccggtggtttgcggcagggacttgatcacatccttctgctgtggccccattgcctctggctggagttgacccttctgacaagtgtcctcagaaagacagggatcaccggcacctcccaatatcaaccccaggcagcacagacacaaaccccacatccagagccaactccaggagcagagacaccccaacactctgggggaccccaaccgtgataactccccactggaatccgccccagagtctaccaggaccaaaggccctgccctgtctctgtccctcactcagggcctcctgcagggcgagcgcttgggagcagactcggtcttaggggacaccactgtgggccccaactttgatgaggccactgacccttccttcctttcctggggcagcacagactttggggtctgggcagggaagaactactggctggtggccaatcacagagcccccaggccgaggtggccccaagaaggccctcaggaggtggccactccacttcctcccagctggaccccaggtcctccccaagataggggtgccatccaaggcaggtcctccatggagcccccttcagactcctcccgggaccccactggacctcagtccctgctctgggaatgcagccaccacaagcacaccaggaagcccaggcccagccaccctgcagtgggcaagcccacactctggagcagagcagggtgcgtctgggaggggctaacctccccaccccccaccccccatctgcacacagccacctaccactgcccagaccctctgcaggagggccaagccaccatggggtatggacttagggtctcactcacgtgcctcccctcctgggagaaggggcctcatgccgagatccctgcagcactagacacagctggaggcagtggccccagggccaccctgacctggcatctaaggctgctccagcccagacagcactgccgttcctgggaagcctgggctccaccagaccacaggtccagggcacagcccacaggagccacccacacacagctcacaggaagaagataagctccagaccccagggcgggacctgccttcctgccaccacttacacacaggccagggagctgttcccacacagatcaaccccaaaccgggactgcctggcactagggtcactgccatttccctctccattccctcccagtgcctctgtgctccctccttctggggaacaccctgtgcagcccctccctgcagcccacacgctggggagaccccaccctgcctcgggccttttctacctgctgcacttgccgcccacccaaacaaccctgggtacgtgaccctgcagtcctcaccctgatctgcaaccagacccctgtccctccctctaaacacccctcccaggccaactctgcacctgcaggccctccgctcttctgccacaagagcctcaggttttcctacctgtgcccaccccctaacccctcctgcccacaacttgagttcttcctctcctggagcccttgagccatggcactgaccctacactcccacccacacactgcccatgccatcaccttcctcctggacactctgaccacgctcccctccctctcagacccggccctggtatttccaggacaaaggctcacccaagtcttccccatgcaggcccttgccctcactgcctggttacacgggagcctcctgtgcgcagaagcagggagctcagctcttccacaggcagaaggcactgaaagaaatcggcctccagtgccttgacacacgtccgcctgtgtctctcactgcctgcacctgcagggaggctccgcactccctctaaagatgagggatccaggcagcaacatcacgggagaatgcagggctcccagacagcccagccctctcgcaggcctctcctgggaagagacctgcagccaccactgaacagccacggaggtcgctggatagtaaccgagtcagtgaccgacctggagggcaggggagcagtgaaccggagcccagaccatagggacagagaccagccgctaacatcccgagcccctcactggcggccccagaacaccccgtggaaacagaacagacccacagtcccacctggaacagggcagacactgctgagcccccagcaccagccccaagaaacactaggcaacagcatcagagggggctcctgagaaagagaggaggggaggtctccttcaccatcaaatgcttcccttgaccaaaaacagggtccacgcaactcccccaggacaaaggaggagccccctgtacagcactgggctcagagtcctctctgagacaggctcagtttcagacaacaacccgctggaatgcacagtctcagcaggagagccaggccagagccagcaagaggagactcggtgacaccagtctcctgtagggacaggaggattttgtgggggttcgtgtcactgtgagcatattgtggtggtgactgctattcccacagtgacacaaccccattcctaaagccctactgcaaacgcacccactcctggggctgaggggctgggggagcatctgggaagtatggcctaggggtgtccatcaatgcccaaaatgcaccagactctccccaagacatcaccccaccagccagtgagcagagtaaacagaaaatgagaagcagctgggaagcttgcacaggccccaaggaaagagctttggcaggtgtgcaagaggggatgtgggcagagcctgagcagggccttttgctgtttctgctttcctgtgcagagagttccataaactggtattcaggatcaatggctgggagtgagcccaggaggacagtgtgggaagagcacagggaaggaggagcagccgctatcctacactgtcatcttttgaaagtttgccctgtgcccacaatgctgcatcatgggatgcttaacagctgatgtagacacagctaaagagagaatcagtgaaatgcatttgcagcacagatctgaataaatcctccagaatgtggagcagcacagaagcaagcacacagaaagtgcctgatgccaaggcaaagttcagtgggcaccttcaggcattgctgctgggcacagacactctgaaaagcactggcaggaactgcctgtgacaaagcagaaccctcaggcaatgccagccctagagcccttcctgagaacctcatgggcaaagatgtgcagaacagctgtttgtcatagccccaaactatggggctggacaaagcaaacgtccatctgaaggacaacagacaaataaacgatggcaggttcatgaaatgcaaactaggacagccagaggacaacagtagagagctacaggcggctttgcggttgagttcatgacaatgctgagtaattggagtaacagaggaaagcccaaaaaatacttttaatgtgatttcttctaaataaaatttacacccggcaaaatgaactatcttcttaagggataaactttcccctggaaaaactataaggaaaatcaagaaaacgatgatcacataaacacagtggtggttacttctactggggaaggaagagggtatgagctgagacacacagagtcggcaagtctcctaacaagaacagaacaaatacattacagtaccttgaaaacagcagttaaacttctaaatcgcaagaagaggaaaatgcacacacctgtgtttagaaaattctcagtccagcactgttcataatagcaaagacattaacccaggttggataaataagcgatgacacaggcaattgcacaatgatacagacatacattcagtatatgagacatcgatgatgtatccccaaagaaatgactttaaagagaaaaggcctgatgtgtggtggcaatcacctccctgggcatccccggacaggctgcaggctcactgtgtggcagggcaggcaggcacctgctggcagctcctggggcctgatgtggagcaggcacagagctgtatatccccaaggaaggtacagtcagtgcattccagagagaagcaactcagccacactccctggccagaacccaagatgcacacccatgcacagggaggcagagcccagcacctccgcagccaccaccacctgcgcacgggccaccaccttgcaggcacagagtgggtgctgagaggaggggcagggacaccaggcagggtgagcacccagagaaaactgcagaagcctcacacatccacctcagcctcccctgacctggacctcacctggcctgggcctcacctgacctggacctcacctggcctgggcttcacctggcctgggcttcacctgacctggacctcacctggcctcgggcctcacctggcctgggcttcacctggcctgggcttcacctgacctggacctcacctggcctgggcctcacctgacctggacctcacctggcctgggcttcacctggcctgggcttcacctggcctgggcttcacctgacctggacctcacctggcctgggcttcacctgacctggacctcacctggcctcgggcctcacctgcacctgctccaggtcttgctggagcctgagtagcactgaggctgtagggactcatccagggttggggaatgactctgcaactctcccacatctgacctttctgggtggaggcacctggtggcccagggaatataaaaagccccagaatgatgcctgtgtgatttgggggcaatttatgaacccgaaaggacatggccatggggtgggtagggacagtagggacagatgtcagcctgaggtgaagcctcaggacacaggtgggcatggacagtgtccacctaagcgagggacagacccgagtgtccctgcagtagacctgagagcgctgggcccacagcctcccctcggggccctgctgcctcctcaggtcagccctggacatcccgggtttccccaggcctggcggtaggtttgaagtgaggtctgtgtcactgtggtattactatgatagtagtggttattactaccacagtgtcacagagtccatcaaaaactcatgcctgggagcctcccaccacagccctccctgcgggggaccgctgcatgccgtgttaggattttgatcgaggacacggcgccatgggtatggtggctaccacagcagtgcagcccatgacccaaacacacggggcagcagaaacaatggacaggcccacaagtgaccatgatgggctccagcccaccagccccagagaccatgaaacagatggccaaggtcaccctacaggtcatccagatctggctccaaggggtctgcatcgctgctgccctcccaacgccaaaccagatggagacagggccggccccatagcaccatctgctgccgtccacccagcagtcccggaagcccctccctgaacgctgggccacgtgtgtgaaccctgcgagccccccatgtcagagtaggggcagcaggagggcggggctggccctgtgcactgtcactgcccctgtggtccctggcctgcctggccctgacacctgagcctctcctgggtcatttccaagacattcccagggacagccggagctgggagtcgctcatcctgcctggctgtcctgagtcctgctcatttccagacctcaccagggaagccaacagaggactcacctcacacagtcagagacaacgaaccttccagaaatccctgtttctctccccagtgagagaaaccctcttccagggtttctcttctctcccaccctcttccaggacagtcctcagcagcatcacagcgggaacgcacatctggatcaggacggcccccagaacacgcgatggcccatggggacagcccagcccttcccagacccctaaaaggtatccccaccttgcacctgccccagggctcaaactccaggaggcctgactcctgcacaccctcctgccagatatcacctcagccccctcctggaggggacaggagcccgggagggtgagtcagacccacctgccctcaatggcaggcggggaagattcagaaaggcctgagatccccaggacgcagcaccactgtcaatgggggccccagacgcctggaccagggcctgtgtgggaaaggcctctggccacactcaggggctttttgtgaagggccctcctgctgtgtgactacggtggtaactcccacagtgatgaaaccagcagcaaaaactgactggactcgcagggtttatgcacacttctcggctcggagctctccaggagcacaagagccaggcccgagggtttctgcccagaccctcggcctctagggacacccgggccatcttagccgatgggctggtgccctgcacaccgtgtgctgccaaacaggggcttcagagggctctgaggtgacttcactcatgaccacaggtgccctggtcccttcactgccagctgcaccagaccctgttccgagagatgccccagttccaaaagccaattcctggggccgggaattactgtagacaccagcctcattccagtacctcctgccaattgcctggattcccatcctggctggaatcaagagggcagcatccgccaggctcccaacaggcaggactcccacacaccctcctctgagaggccgctgtgttccgcagggccaggccgcagacagttcccctcacctgcccatgtagaaacacctgccattgtcgtccccacctggcaaagaccacttgtggagcccccagccccaggtacagctgtagagagagtcctcgaggcccctaagaaggagccatgcccagttctgccgggaccctcggccaggccgacaggagtggacgctggagctgggcccacactgggccacataggagctcaccagtgagggcaggagagcacatgccggggagcacccagcctcctgctgaccagagacccgtcccagagcccaggaggctgcagaggcctctccagggggacacagtgcatgtctggtccctgagcagcccccaggctctctagcactgggggcccctggcacagctgtctggaccctccctgttccctgggaagctcctcctgacagccccgcctccagttccaggtgtggttattgtcagggggtgccaggccgtggtagagatggctacaattaccacagtggtgccgcccatagcagcaaccaggccaagtagacagacccctgccacgcagccccaggcctccagctcacctgcttctcctggggctctcaaggctgctgtctgccctctggccctctgtggggagggttccctcagtgggaggtctgtgctccagggcagggatgactgagatagaaatcaaaggctggcagggaaaggcagcttcccgccctgagaggtgcaggcagcaccacagagccatggagtcacagagccacggagcccccagtgtgggcgtgtgagggtgctgggctcccggcaggcccagccctgatggggaagcctgccccgtcccacagcccaggtccccaggggcagcaggcacagaagctgccaagctgtgctctacgatcctcatccctccagcagcatccactccacagtggggaaactgagccttggagaaccacccagccccctggaaacaaggcggggagcccagacagtgggcccagagcactgtgtgtatcctggcactaggtgcagggaccacccggagatccccatcactgagtggccagcctgcagaaggacccaaccccaaccaggccgcttgattaagctccatccccctgtcctgggaacctcttcccagcgccaccaacagctcggcttcccaggccctcatccctccaaggaaggccaaaggctgggcctgccaggggcacagtaccctctcttgccctggctaagacagggtgggcagacggctgcagataggacatattgctggggcatcttgctctgtgactactgggtactggctctcaacgcagaccctaccaaaatccccactgcctcccctgctaggggctggcctggtctcctcctgctgtcctaggaggctgctgacctccaggatggcttctgtccccagttctagggccagagcagatcccaggcaggctgtaggctgggaggccacccctgtccttgccgaggttcagtgcaggcacccaggacaggaaatggcctgaacacagggatgactgtgccatgccctacctaagtccgcccctttctactctgcaacccccactccccaggtcagcccatgacgaccaacaacccaacaccagagtcactgcctggccctgccctggggaggacccctcagcccccaccctgtctagaggagttggggggacaggacacaggccctctccttatggttcccccacctggctcctgccgggacccttggggtgtggacagaaaggacgcctgcctaattgtcccccaggaacccagaacttctctccagggaccccagcccgagcacccccttacccaggacccagccctgcccctcctcccctctgctctcctctcatcactccatgggaatccagaatccccaggaagccatcaggaagggctgaaggaggaagcggggccactgcaccaccgggcaggaggctccgtcttcgtgaacccagggaagtgccagcctcctagagggtatggtccaccctgcctggggctcccaccgtggcaggctgcggggaaggaccagggacggtgtgggggagggctcagggccctgcaggtgctccatcttggatgagcccatccctctcatccaccgacccgcccacctcctctccaccctggccacacgtcgtccacaccatcctgagtcccacctacaccagagccggcagagccagtgcagacagaggctggggtgcaggggggccgccagggcagctttggggagggaggaatggaggaaggggaggtcagtgaagaggcccccctcccctgggtctaggatccacctttgggacccccggatcccatcccctccaggctctgggaggagaagcaggatgggagaatctgtgcgggaccctctcacagtggaatacctccacagcggctcaggccagatacaaaagcccctcagtgagccctccactgcagtgctgggcctgggggcagcccctcccacagaggacagacccagcaccccgaagaagtcctgccagggggagctcagagccatgaaggagcaagatatggggaccccaatactggcacagacctcagctccatccaggcccaccaggacccaccatgggtggaacacctgtctccggcccctgctggctgtgaggcagctggcctctgtctcggacccccattccagacaccagacagagggacaggccccccagaaccagtgttgagggacacccctgtccagggcagccaagtccaagaggcgcgctgagcccagcaatggaaggcccccaaacaaaccaggaggtttctgaagctgtctgtgtcacagtcgggtatagcagcggctaccacaatgacactgggcaggacagaaaccccatcccaagtcagccgaaggcagagagagcaggcaggacacatttaggatctgaggccacacctgacactcaagccaacagatgtctcccctccagggcgccctgccctgttcagtgttcctgagaaaacaggggcagcctgaggggatccagggccaggagatgggtcccctctaccccgaggaggagccaggcgggaatcccagccccctccccattgaggccatcctgcccagaggggcccggacccaccccacacacccaggcagaatgtgtgcaggcttcaggctctgtgggtgccgctagctggggctgccagtcctcaccccacacctaaggtgagccacagccgccagagcctccacaggagaccccacccagcagcccagcccctacccaggaggccccagagctcagggcgcctgggtggattctgaacagccccgagtcacggtgggtatagtgggagctactaccactgtgagaaaagctatgtccaaaactgtctcccggccactgctggaggcccagccagagaagggaccagccgcccgaacatacgaccttcccagccctcatgacccccagcacttggagctccacagtgtccccattggatggtgaggatgggggccggggccatctgcacctcccaacatcacccccaggcagcacaggcacaaaccccaaatccagagccgacaccaggaacacagacaccccaataccctgggggaccctggccctggtgacttcccactgggatccacccccgtgtccacctggatcaaagaccccaccgctgtctctgtccctcactcagggcctgctgaggggcgggtgctttggagcagactcaggtttaggggccaccattgtggggcccaacctcgaccaggacacagatttttctttcctgccctggggcaacacagactttggggtctgtgcagggaggaccttctggaaagtcaccaagcacagagccctgactgaggtggtctcaggaagacccccaggagggggcttgtgccccttcctctcatgtggaccccatgccccccaagataggggcatcatgcagggcaggtcctccatgcagccaccactaggcaactccctggcgccggtccccactgcgcctccatcccggctctggggatgcagccaccatggccacaccaggcagcccgggtccagcaaccctgcagtgcccaagcccttggcaggattcccagaggctggagcccacccctcctcatccccccacacctgcacacacacacctaccccctgcccagtccccctccaggagggttggagccgcccatagggtgggggctccaggtctcactcactcgcttcccttcctgggcaaaggagcctcgtgccccggtcccccctgacggcgctgggcacaggtgtgggtactgggccccagggctcctccagccccagctgccctgctctccctgggaggcctgggcaccaccagaccaccagtccagggcacagccccagggagccgcccactgccagctcacaggaagaagataagcttcagaccctcagggccgggagctgccttcctgccaccccttcctgccccagacctccatgccctcccccaaccacttacacacaagccagggagctgtttccacacagttcaaccccaaaccaggacggcctggcactcgggtcactgccatttctgtctgcattcgctcccagcgcccctgtgttccctccctcctccctccttcctttcttcctgcattgggttcatgccgcagagtgccaggtgcaggtcagccctgagcttggggtcacctcctcactgaaggcagcctcagggtgcccaggggcaggcagggtgggggtgaggcttccagctccaaccgctccactagccgagactaaggaagtgagaggcagccagaaatccagaccattccatagcaaatggatttcattaaagttaccagacttcagtgtaagtaacatgagccccatgcacaacaatcccttatgaaggggaagtcagtgtcgcctcggatttcttgaaaaacacaaaaacttatcaatgcctgtaaaagtctgttggaaagaaaatatgattcaagaatgttatgcccaacaaagctggcatattttctacccggacacactcagggaatgtggtcgcttgagtgcttctctcactgcgtaaatcctacgtggtgtttaagcatattcataaatgtgtatgtctatttttatgtgtaagatggttcatttttattttatttattcaatatgtacaataaagaatattgacaaataggctggacatggtggctcccacctgtaatcccagccctttgggaggccgaggcgggcagatcacctgaggtctggagttcgagaccagcctggccaacatgatgaaaacccatctctactaaaaatacaaagattagccaggcatggtggtgcatgcctgtaatcccagccactcaggaggctgagacaggagaaatgcgtgaacccggaaggcggaggttgcagtgagccgagatcacaccactgcactccagcctggcgacagagcaagattccatctcaaaaaaaaaagacaaagaaatttgtttttttgaataaagacaaatttcatcacacgaagataaagatgcaaagctccagacaggaaggcacggacagcacagtgaagcctggagcgggcgctggggggccaggggcatggcgggggtgccagcgtctctcagtgcctaccatggccactccagcctgtgttctcacgaggatggctgtgcaatgctaggagcgtgttcgaagctctagggcaaccactggaagtgaggctgaggagcagagcccagaggcccgtggagctgatgaaaagaaagctggagaaagtgtttgctgcctcccaacatggtaagaaaagatagaaagagagagcacacggcaaagggagcttgctgagggactctttacaatggcttgcacagagctcagggggtctgggaggctagggccctgcgcagggcagtcaccccagcctgctgaccaaggtttgctgcaggcagctctgggggtggttgaggcgcggtccctggagccacccctcaagggaacgaggcagcagagtgggccaaggcccaggtcggctgcaaggctgcccaggacttggggtccttacatcagcagccactgatgcagctggcccagagagaggcgccgagcaggttgcctccaggggacaaaccaggtcggagagggtgaggcagtggatggagccacaacaaccccgggcacgggtgacacgcacgttcatgcacatctgacccttcctccctcaccaaacaggtccccctgccttccccatggttgcgaaaaagcaaaatgtagacgttttttcttttttaattcatgttttaattgacaaatgaagccgtatatatttattgtgtacaacatgatgctttaaaatatgtatacatcgtggaacagcaacgtcgagctaatttaacacgcattacttcacatacttgtcatcttttgtggcgagaatgcttaaaatccactctcttagtattttttaagaatgcaatacattgttgtcaactgtggtcaccgtcatgcatagccaagctcccgacctcaccctcctgccagctcaggctgtgcatcctttcaccagcatcccccaccccggcccctggccctggtaactaccactctatactctacgtatgagttcagctttttaagattccacagatgaatgagatcatacagtatttgctttctatgcctggcttattttagttaacacactgtcctccagatccatccgttgttgcaaatgacagggtttcattctttttaaagtctaaagagtattccattgtgtcaatggacctcatttgctttatccatgcatcaactatggacatttaggttgattccatttcttagctgttgtggatggtgctgcagtaaacatggggctgcagatgtctcttcaacatactgacatcatgtcctttggataaatacccagtagtgggatcgctggatcacaatgtacagttttttttttaatggaaactttcattttttggtgaaattaggaaaacagataaaacccacagaatccaaaatatatgtgaagatgccaaaaacagttgacattgggcagaggtcacatggaaggaagtgaatacatgacggggtgtgagggcccagaggcagctgaaatacgctttctaaacacaaggacctcttctgagagggcagaagttttatcctgcacatgcaatgaccagcacagctaaaatacactttctaaacatgaggacctcttctgagagggcagctttatcctgcaaatgcaatgaccagcacaggacccagaataaagagagttgccagcggacgcctggtgtccatgtgtccaggtgagttcgagatgcggacggcgctggccagccagtcacaccctaagtcaatctgctgcatgcatttgtccttgccacagcagaaaacgagaaagcctttgggctgcaaagcttcacaggctcctcttctcccgactccatggaaacagctacaaagagcaggcccagtagagcttaattcatgaaaatgagtaataaacttgaactggaacagtatcgactttttagaaacggcagcaaagtgtataaaaaatattcaccagaacaatatttccaaacgatgagatgagaatttcagccaagtaatcctccatggatagaaaataatgaagggattggatttatgaaggaaaatcatggagctcaaatacaagagaagagaatcaaaaatgaacaggaggagataaaatatggtttggccaaagttacaaaataaattttttaaaaacccttcatcatggcaagtagaaagagcgagaggaaaaacagatcccgtggaagacacaaataggacatggggagaaaaatgaatgagatgaaacagagcagaaataaaattttacggaactaaagacaagtgatctgaacctgcctggggcctgggggacctcgccaccctgaagggaaagaacatgcctggctggctttgccacctgctcattgcagagccccacagcttgcaacaaacataggcggtagccagggagtggttacagcaggccttgagcaagacccagtgttgtgctgacttcaggtctgacccagcactgtcatagtggtggtgtccatagtggtagtgggggtgcttgtgtcactccacccccatctccaggaggctcagaacagacagagagagactccatttgtttgggagaaagtaagggatgagaacaagagtctctgcctggtaatccagagaattattctagatcttggccaagattatcaaagcagtacctctatgagtcttttgggcttggagtccccctaaagcagatatagctaagatcacaacacccaagtccttttgaatatgtgggaagacttcccaaggacaggagcaaacaaacaagcccagactgcaaaaaaacaagcccagactgcaataaacacctcactcttcaatgcccaggcactgaagaacatctcctagcagcaacaccatccaggaaaacatggcctcaaccagtgaactaaataaggcaccagggaccagtctcggagaaatagaggtatgttatctttcagagaattcaaagtagctttgttgaggaaactcaaagaaattcaagataacacagtgaaggaattcagaatcctatccgataaatttaacagagattgaagcaattaaaaagaattaagcagaaattatggagctgaaaaatgcaattggcatactgaaaaatgcatcagagtattttcatagcctcatatatcaagtagaagaaagaattagtgagcttgaaaacaggctatttggaaaagcacgataaaaggagacaaaagagaaaagaataaataacaatgaagcatatctacaggatctagaaaatagcctcaaaaggccaaatctaagaattattagccttaaagaggaggtagagaaagagggatggagagtttattcaaagggataataacagaaaacttcccaaacctagagaaagatatcaatatccaaatgcaagaaggatgtagtacaccaaggagatttaatgcaaagaagactacctcaaggcattcaatactcaaactcccatatgacaaggactttaaaaagatcctaaaagcagcaaaagaaaagaaatgaataaaatactatggagctccaatatgtctggcagcagacttttcagtgaagactttatatgccaggagagagtgtcataatggatttaaagtgctgaaggaaaaaacttttaccctcgaacagtatagctggtgaaattatccttcaaacatgaaggagaaataatttgtttccagacaaatgttgagggatttcatgaacaccagacctgtcttttaagaaatgctaaagggagtacttcaatcagaaagaaacacgttagtgaacaataagaaatcatctgaaggcacaaaactcaccggtaatagtaagtacacagaaaaacacagaatattataacactgtaactgtggtgtgtaaactccttttgtttgtttgtttgtttgtttgtttgtttgtttttgtttttagacggagttttgctccagcccaggctggagtgcaatggcacaatctcagctcactgcaacttccacctcctgggttcaagcaattctcctgcctcagcctcccaagtagctgggattacaggcatgtgctaccatgtccagctaattttgtattttagtagagacggtgtttcaccatgttggtcaggctagccttatcttgagtagaaaaactaaatgatgaagcaatgaaaaataataactacaacttttcaagacatagtacaataagatataaatcataacaaaaagttaaaaggtggagggatgaagttaaggcatagagtctttattagttttctttttacttgtctgtttatgcaaacagtgttaagttgtcatcagtttaaaataatgggtcataagatactatttgcaagcctcatggtaacgtcaaaccaaaagcaatacaacagatacacaaaaaacaaaaagcaagaagctaaattacgtcatcagagaaaatcaccttcactaaaaggaagacggagaaaagaatgaagagagagaagaccaaaagcaaatagcaatatggcaggagtaagtccttacttatcaataataccattgaatgtaaatggactaaactctccaatcaaaagacatagagtggctgaatcaattaaagaaaaaacaagacccattgatctgttgtccacaagaaacacactttatctataaagacacacatagactgaaaacaaagggatggaaaaagatactccacgccaatggaaaccaaagaaagagcaggagtagctacacttatatcaggcaaaatagatttcaagacaaaaactataagaagagacaaggtcactaatgataaacaggtcaattcagcaagaggatataacaattgtaaatatatatgcacccaatgctggagcacccagatatataaagcaagtatttactagagctaaagagagaaatagactccaatgcaataatagctggagatttcaacatcccactttcaacattgaacagatcctccagatagaaaatcaacaaagaaatattggacttaatctgcactatcgaccaaatggatctaacagatatttacagaacatttcatccaacagctgcagaacacacattcttttcctcagcacatagatcattctcaaggatagaccatatgttgggtcacaaaacaagttttaaaatattcaaatacattgaaataatatcaagcatcttctgtgaccacaatggactaaaactagaaatcaataacaagaggaattttggaaactatataaatatatggaaattaatgaatgctgagtgggtcaatgaagcaattaagaaggaaactgaaatttttcttggaacgaatgatcatggaaacagaaaataccaaaacctatgggatacagcaaaagcagtactaagagggaagtttacagctacaaatgcttacattaaaaaagaagaaaaacttcaataaaaaaacctaacaatgcatcttaaagaactagaaaagcaagaggaaatcaaatccaaaattagtagaagaaaacagtaaaggtcagagcagaaataagtaaaattgaaatgaagaaaacaatacaaaagatcaataaaacaacaggttgttttcttgaaaagttaaacaaaattgacaaacctttagccagactaagaaaaaaagacagaagatccaaataaataaaatcagagatgaaaaaggtgacattacaacttacaccacagaaattcaaaggatcattagtggctactataagcaactatatgccaataaattggaaaatctagaagaaatgcagaaattcctagacacatacaacctcccaagattaaaccaagaagaaattcaaaacctgaacagactgataacaagtaatgagatcaaagccgtaataaaaagcctcccagtaaagagaagcccaggacccgacggcttcactgctgaattctaccaaacatttaaagtagaactaataccaatcctactcaaactattccaaaaaatagaggtggaaggaatacttcaaaactcattatacgaggccagtattaacctgacaccaaaactagacaaagacacatgaaaaaaagaaaactacaggccaatatgtctgatgaatattgacacaaaaatcctcaacaaaatactagcaaaccaaattcaactacacattagaaagttcactcatcatgaccaagtggaatttatctaacttgggatgcaaagatggttcaacatatgcaaatcaatcaatgtgatacatcatatcaacagaatgaacaacaaaaaccatttgatcatttaattgatactgaaaaagcatttgataaaattcaacattccttcataataaaaattctcttctatactaggtacaaaagaaacttacctcaacataataaagccatatatgacagtcccacagtatgatactaaatgaggaaaaactgagagcctttcctctacgatctggaacatgacaaagatgcccactttcatcactgttattcaacatagtactggaagtcctagctggagcgatcagacaagagaaagatataaaaggcatccaaattggaaaggaataagtcaaattatcctcatttgcatatggtatgatcttctatttagagctaactaaagactccaccaaaaaaagttattagaactgacgaacaaattcagtaaagctgcaggatacaaaatcaacatacaaaaatcagtagcatttctatatgccaacaatgaccaatgtgaaaaagaaattaaaaagtaaccctatttacaataaccacaaataaacacctaggaattaaccaaagaggtaaaagatttctgtaatgaaaactataaaacactgatgaaagaaattgaagagtacaccaaaaaatggaaagcaattgcatgttcatggattagaagaatcagtgttgttataatgtccatactatccaaagcaatctacagattcaatgcaatccttatcaaaataccaatgacatcattcacagaaatagaaaaaaaaaatcctaaaatttacgtggaaccacaaagacccagaatagccaaagctctcctaagcaaaaagaacgaaactgtaggaatgacattgcctgtcttcaaattctactacagagctatagatagtaaccaaaacagcgtggtactagcataaaaacagacacagagacaaacagaacaaaatttaaaaacccagaaataaatccacacacctacagcaaattcatttttgacaaagttgccaagaacatactctggggaatagataatgatatctcttcaataaataatgtggggaaaactggatatccatatacataacagtgaaactagacccctctctctctcactatatacaaaaatcaaatcaaaattgtttaaggacttaaatctaagacctcatactatgaaaccactgcaagacaaccttggcggaaactctccaagacatcagtccaggcaaagatttcttgagtaatatcccacaagcacagacaaccaaagcaaaaatggacaaatgggatcacatcaagttaaaaagcttctgcacagtaagggaaacaaccaacaaaatgaagagacaacccacagaatgggagaaaatatttgaaaaatacccatctggcaagggattaaaaaccagaatatatgcagaatatataaggagctcaaacagtgctatagaaaaaaaaatctaataatctgatttaaaaatgggaaaaatgttagaatagacatttcttaaaataagacatacagatggcaaaccgacatggaacggtgctcaacatcatggattatcacagaaacacaatcaatcaaaactaaaactaaaatgtgctatcatctcaccccagttaaaatggctgatatccagaagacaggcaataacaaatgctggcaaggatgtggggaaaagggagcccccatacactgttgctgggattgtaaattagtacaaccactgtggagagcagcatgaaagttcctcaaaaaactgaaagaaagctaccataggatccagcaatcccactgctgtgtatatactacaaaagaaaggaagtcagtatatgaagaggtatctgcactcccatgtttgttgcagccctgttcacaacagccaagatttggaagcaacctaagtgtccatcagcagttgaatgtataaagaaaatgtggtgcatatacacaatggagtattattcaataataaaaaggaatgagattgagtcatttgcaacaacatggatggaactggagatcattatgtgaagtgaaataagccaggcacagaaagacaaacattacaatgttcttacttattaatgagatctaaaaatcaaaacaattgcacccatgttcataaagagtaaaaggatggttaccagatgctgagaacggtggtggggggatagggaaaggtggcagtggttaacgggtacaaaaaaatagaaagaatgaataagacttactacttgatagcacagcaaggtggctatagtcagtaatttagttgtatatttttaataatgaaaggtgtataattggattgtttctaacacaaaggataatgcttaagaggatggataccccattttccatgatgtgattatttcacattgcacgcctagatcaaaacatccaatgtaccccataaatatatacatcttctatgtacccataaaaattctgtaaaataaaatatataaaaagaggtgacagatatggaagacaggcaaagaagagacgacatccacataatccgagtacctaagaaagaatggagtccagtgcatctcaggagccaccattctaagccaattttctctggttctctcagtcaccctaccaatacgtgggcaatcttgttttatttcaggatagagtttttgaaattatagatttaagtatgctttctgttctattacttttggtaattaattttagaaagaactaatttgggcacaaatttgaaaaaattctaaatccaaaaaaaaaaagaaaaaaacacacacacaatcatctataagggggatgatgaccagtcctagatttctcaccagccacattcaagatcagtaaatggtaggacaaaacctgtagggtccttaagggggaaagaagtagtggatagtccagagtctatatacagccaactgttcttgaagaaaaaaggctgctgaaaaggagttccaaacattctataatccataatctcatgatgaaactactagaggaagaccaccagccatcaaaaggtgcttggagaacccagggccaagaaccaaaagtaaatattaagtgtccttaactgcgagactaagatagaaatgactgtgggggaccatgtggcctcaacagaggtgaaatggtgtctgcctgacaaagtggacattttacaatgatcaaaacacagaatatgagatagagagcacttctgaattactgcctcactccaaataactctcagccaaaggacttcagtaaaaccaaattgggcatattagacagtacaaacaaattctaagaaaataatattactgattacaatcacatgatgctagagatggaggggaaaaggaagaggaaaccaggtaatttcatactcgtatatagtaaagaactaaagtacattgtccaaagaagaacaaagaatattttggaaagttataaaggtagccactacacatagaagatagcaaagaacaagaaaacttaagatggaaaactttttggaagcataaaaatagaaaatataaactactaagataagattgaagccaaacagatctatgaaaacaacaaacatcaatggccttaacttgcctattaaaaggaagagactttcaaattggaccacaagataaaacccaactctatatagcatatgagtattacacacaaaatgggaaaagctgaaaaaacttgggcaaaattcaccccaagcaaattccactgtttcctttgggacaaaatgccaagctccatgccagggaagatgattctcctcagaccttctcctcactctcccagtcctcttagggaaggaattgggtgttagaggagggagactctgtcgattatcagctgaagcagtggtgtgctcctgcgttgcttctgacctgggaaatgaagcagcaagactctttctgctgtgtctttgcccagaagggccatccccccagagcagagtacccaggccggcaggagcagtggtggaagcgtggaaaccacgtctcctacagcagagaccatcagaagcggagcctcgggtataagggaaacaacgcgttctccctaacctgggagtgacagacagcgtcattcctcacagtgataccctgtgttctagccatctggcccatgacagagccagcccagagccagcccagagccagcccctcaccaacctggagcctggccagctcgccaagctgcaccataggcctggaaggcgtggagacctgcggcagtgccctgtcctcccgtgaggcctgccatccctgccaggggtcgcctctggcttctccttctccaggaccgcacggtccagaggctcagtgcctggagtaggtgttgcccccctgcttctaggcccagaccctcccttgttcctgaccccgggcctttccctctggcttggacatccagggccctgtctcagctggggagctgctcctgctcaaggactgtcttccgcgggatcgaaaggccgcgtcctgaacaatgcgtgggccacgtgagcggagcaggctctaaaggccgcgtcctaaacagtgcgtgggccacgtgagcggagcaggctctaaaggccgcgtcctaaacagtgcgtgggccacgtgagcggagcaggctctaaaggccgcgtcctaaacagtgcgtgggccacgtgagcggagcaggctctaaaggccgcgtcctaaacagtgcgtgggccacgtgagcggagcaggctctaaaggccgcgtcctaaacagcgcgtgggccacgtgagcggagcaggctctaaaggccgcgtcctaaacagtgcgtgggccacgggagcggagcagactctaaaggccgcgtcctaaacagtgtgtgggccacgtgagcggagcgccctctccactgccctcggggccgcagctcccagctcagctcccagccctgctcagggcagccaggccaggaggtaccatccaggctaagtgaccctcaggggggacaggtgccccaggagatgccagctgttgggagaggctgggggaccaactcgacctggcctgtgggccctgccctggccacccattgtaggatccagccgccacgcctgtgacactcgtgtgctttccctggtgtgtgcttgtggcaggtgggggcagagggtcctcaggccagagagccactcccccagcgccagaccaccctcttcctcactcccccacctcaccccctcacaggtgcctcccaggccatcagggcccaaccacccctaaacaaatgggttctcggcccctcgtggctggaggtgggttctctcaccattcccagcctaagactccatccccatgctggcagctgttcaaccatgtctagagagatccactgtcccagacagcacctcagggtcccccgtcctgcctggaaccctgtaggaaactccacaaaccgccgccattctgtccacacccctacaggagccccaaccctctccccacatccaggcttccctcccagacccctcatccctgcccgcacggtgcctgagggggccttcttgggcagcgcctaagcaagcccccagcacccttcggccccttcaaggcacacaggccccctttccacccagcctcaggaaaccacctgtgtcctccaacgacaggtcccagcctcccagcctttgccttgcctgttcctctccctggaactctgccccgacacagaccctccccagcaagcccgcagggcacctcccctgcccccagacaccctgtgcccatcagttcatccccagcagaggccctcaccaggcacacccccatgctcacacctggccgcaggcctcagcctccctgagggccccacccagcccgcgtctggccagtggtgcgtgcaaagcccctcacccagactcggcggaaggcagccagtgcaggcctggggaggggctctccttagaccaccttgcaccttccctggcacccaccatgggaagagctgagactcactgaggaccagctgaggctcagagaagggacccagcactggtggacacgcagggagcccacgccagggcgccgtggtgagtgaggcccagtgccacccactgaggcctcccgttcagtgggacgacggtgaacaggtggaaccaaccaggcaacccccgccgggccccacagacgggatcagagcaggaaaggcttcctgcccctgcaggccagcgaggagccctggcgggggccgtggccctccaggcgaggaggctcccctggccaccgccacccgggcctctctgctgctgggaaaacaagtcagaaagcaagtggatgagaggtggcgtgacagacccagcttcagatctgctctaatttacaaaagaaaaggaaaaacacacttggcagccttcagcactctaatgattcttaacagcagcaaattattggcacaagactccagagtgactggcagggttgagggctggggtctcccacgtgttttggggctaacagcggaagggagagcactggcaaaggtgctgggggcccctggacccgacccgccctggagaccgcagccacatcagcccccagccccacaggccccctaccagccgcagggttttggctgagctgagaaccactgtgctaactggggacacagtgattggcagctctacaaaaaccatgctcccccgggaccccgggctgtgggtttctgtagcccctggctcagggctgactcaccgtggctgaatacttccagcactggggccagggcaccctggtcaccgtctcctcaggtgagtctgctgtctggggatagcggggagccaggtgtactgggccaggcaagggctttggcttcagacttggggacaggtgctcagcaaaggaggtcggcaggagggcggagggtgtgtttttgtatgggagaagcaggagggcagaggctgtgctactggtacttcgatctctggggccgtggcaccctggtcactgtctcctcaggtgagtcccactgcagccccctcccagtcttctctgtccaggcaccaggccaggtatctggggtctgcagccggcctgggtctggcctgaggccacaccagctgccatccctggggtctccgccatgggctgcatgccagagccctgctgtcacttagccctggggccagctggagcccccaaggacaggcagggaccccgctgggcttcagccccgtcagggaccctccacaggtagcaagcaggccgagggcagggacgggaaggagaagttgtgggcagagcctgggctggggctgggcgctggctgttcatgtgccggggaccaggcctgcgctttagtgtggctacaagtgcttggagcactggggccagggcagcccggccaccgtctccctgggaacgtcacccctccctgcctgggtctcagcccgggggtctgtgtggctggggacagggacgccggctgcctctgctctgtgcttgggccatgtgacccattcgagtgtcctgcacgggcacaggtttgtgtctgggcaggaacagggactgtgtccctgtgtgatgcttttgatatctggggccaagggacaatggtcaccgtctcttcaggtaagatggctttccttctgcctcctttctctgggcccagcgtcctctgtcctggagctgggagataatgtccgggggctccttggtctgcgctgggccatgtggggccctccggggctccttctccggctgtttgggaccacgttcagcagaaggcctttctttgggaactgggactctgctgctggggcaaagggtgggcagagtcatgcttgtgctggggacaaaatgaccttgggacacggggctggctgccacggccggcccgggacagtcggagagtcaggtttttgtgcaccccttaatggggcctcccacaatgtgactactttgactactggggccagggaaccctggtcaccgtctcctcaggtgagtcctcacaacctctctcctgctttaactctgaagggttttgctgcatttctggggggaaataagggtgctgggtctcctgccaagagagccccggagcatcctggggggctcaggaggatgccctgaggcaacagcggccacacagacgaggggcaagggctccagatgctccttcctcctgagcccagcagcacgggtctctctgtggccagggccaccctaggcctctggggtccaatgcccaacaacccccgggccctccccgggctcagtctgagagggtcccagggacgtagcggggcgccagttcttgcctggggtcctggcattgttgtcacaatgtgacaactggttcgacccctggggccagggaaccctggtcaccgtctcctcaggtgagtcctcaccaccccctctctgagtccacttagggagactcagcttgccagggtctcagggtcagagtcttggaggcattttggaggtcaggaaagaaagccggggagagggacccttcgaatgggaacccagcctgtcctccccaagtccggccacagatgtcggcagctggggggctccttcggctggtctggggtgacctctctccgcttcacctggagcattctcaggggctgtcgtgatgattgcgtggtgggactctgtcccgctccaaggcacccgctctctgggacgggtgccccccggggtttttggactcctgggggtgacttagcagccgtctgcttgcagttggacttcccaggccgacagtggtctggcttctgaggggtcaggccagaatgtggggtacgtgggaggccagcagagggttccatgagaagggcaggacagggccacggacagtcagcttccatgtgacgcccggagacagaaggtctctgggtggctgggtttttgtggggtgaggatggacattctgccattgtgattactactactactactacatggacgtctggggcaaagggaccacggtcaccgtctcctcaggtaagaatggccactctagggcctttgttttctgctactgcctgtggggtttcctgagcattgcaggttggtcctcggggcatgttccgaggggacctgggcggactggccaggaggggacgggcactggggtgccttgaggatctgggagcctctgtggattttccgatgcctttggaaaatgggactcaggttgggtgcgtctgatggagtaactgagcctgggggcttggggagccacatttggacgagatgcctgaacaaaccaggggtcttagtgatggctgaggaatgtgtctcaggagcggtgtctgtaggactgcaagatcgctgcacagcagcgaatcgtgaaatattttctttagaattatgaggtgcgctgtgtgtcaacctgcatcttaaattctttattggctggaaagagaactgtcggagtgggtgaatccagccaggagggacgcgtagccccggtcttgatgagagcagggttgggggcaggggtagcccagaaacggtggctgccgtcctgacaggggcttagggaggctccaggacctcagtgccttgaagctggtttccaagagaaaaggattgtttatcttaggaggcatgcttactgttaaaagacaggatatgtttgaagtggcttctgagaaaaatggttaagaaaattatgacttaaaaatgtgagagattttcaagtatattaatttttttaactgtccaagtatttgaaattcttatcatttgattaacacccatgagtgatatgtgtctggaattgaggccaaagcaagctcagctaagaaatactagcacagtgctgtcggccccgatgcgggactgcgttttgaccatcataaatcaagtttatttttttaattaattgagcgaagctggaagcagatgatgaattagagtcaagatggctgcatgggggtctccggcacccacagcaggtggcaggaagcaggtcaccgcgagagtctattttaggaagcaaaaaaacacaattggtaaatttatcacttctggttgtgaagaggtggttttgcccaggcccagatctgaaagtgctctactgagcaaaacaacacctggacaatttgcgtttctaaaataaggcgaggctgaccgaaactgaaaaggctttttttaactatctgaatttcatttccaatcttagcttatcaactgctagtttgtgcaaacagcatatcaacttctaaactgcattcatttttaaagtaagatgtttaagaaattaaacagtcttagggagagtttatgactgtattcaaaaagttttttaaattagcttgttatcccttcatgtgataactaatctcaaatactttttcgatacctcagagcattattttcataatgactgtgttcacaatctttttaggttaactcgttttctctttgtgattaaggagaaacactttgatattctgatagagtggccttcattttagtatttttcaagaccacttttcaactactcactttaggataagttttaggtaaaatgtgcatcattatcctgaattatttcagttaagcatgttagttggtggcataagagaaaactcaatcagatagtgctgaagacaggactgtggagacaccttagaaggacagattctgttccgaatcaccgatgcggcgtcagcaggactggcctagcggaggctctgggagggtggctgccaggcccggcctgggctttgggtctccccggactacccagagctgggatgcgtggcttctgctgccgggccgactggctgctcaggccccagcccttgttaatggacttggaggaatgattccatgccaaagctttgcaaggctcgcagtgaccaggcgcccgacatggtaagagacaggcagccgccgctgctgcatttgcttctcttaaaactttgtatttgacgtcttatttccactagaaggggaactggtcttaattgcttgatgaagagcaggagactcatttatgtgagtcttttgagtgaccattgtctgggtcactcccatttaactttccctaaagcccatttgaaggagaggtcgcacgagctgctccacaacctctgaatggggatggcatgggtaatgatgcttgagaacataccaagccccactggcatcgcccttgtctaagtcattgactgtaggtcatcatcgcacccttgaaagtagcccatgccttccaaagcgatttatggtaaatggcagaattttaagtggcaaattcagataaaatgcatttcttggttgtttccaatgatgactgttatctagagggaatttaaaggcaggggtttactgcagactcagaagggaggggatgctccgggaaggtggaggctctgagcatctcaataccctcctcttggtgcagaagatatgctgccacttctagagcaaggggacctgctcatttttatcacagcacaggctcctaaattcttggtctcattctcaagatgttttaatgactttaaagcagcaaagaaatattccacccaggtagtggagggtggtaatgattggtaatgctttggaaccaaaacccaggtggcgctggggcaggactgcagggaactggggtatcaagtagagggagacaaaagatggaagccagcctggctgtgcaggaacctggcaatgagatggctttagctgagacaagcaggtctggtgggctgaccatttctggccatgacaactccatccagctttcagaaatggactcagatgggcaaaactgacctaagctgacctagactaaacaaggctgaactgggctgagctgagctgaactgggctgagttgaactgggttgagctgagctgagctgagctgggctaagttgcaccaggtgagctgagctgagctgggcttggctgcactaagctgggctgagctgggcagggctgggctgagctgagctgggctgggctgagctgggctgggctgggctgggctgagcgggtctgagcggggctgagctgagctaggctgggctgggctgagctgggctgagctgggctgagctgggctgagcaaggctaggctgagctgggctgagctgagctgggccgagcaaggctaggctgagctgagctgagctgggctgcgctgagctgggctgggctgcgctgagctgggctgggctgagctgggctaggctgggctgagctgggctgagctaggctgggctgggctgggctgagcggggctgagcggggctgagctgagctaggctgggctgagcggggctgagctgagctaggctgggctgggctgggctgagccaagctgaaccgggttgagcgtgctgtgctgggctgagccaagctaggctgagctgagccaagttgagcttagctgggctgagctaacctgggcaaggctgagctgggctgagctaacctggactggggctgagctaacctgggcagagctgagctgggctgagctaacctggactggggctgagctaacctgggcagagctgagctgggctgagctaacctgggctggggctgagctaacctgggctgggctcagctgagctgagctacgctgggctgggctgggctgagccgagctgaactgggctgagcaggctgtgtcgggctgagccaagctgggccgagctcagcagagctgagccgagctgagcttagctgggctgagctaaccagggctgggctgagctgggctgagctgagctgagctgaactgggctgaacgggctgaggcgagcagggccgagctgagcagagctaagccgaggctgggctgggctaacctgggctgggccgagctgagcagagctaagccgaggctgggctgggctaacctgggctgggctgagctgagctgggttgggcagggctgggctgggctgagctaagctgaactagggtgagctgggccgagccaggctggtttgggctgagttgagctgacctggactggggctgagctaacctgggctgggctcagctgagctgagctacgctgggctgggctgggctgagccgagctgaactgggctgagcaggttgtatcaggctaagccaagctgggccaagctcagcagagccaagccgagctgagcttagctgggctgagctaaccagggctgggctgagctgggctgagctgagctgagctgaactgggctgaacgggctgaggcgagcagggccgagctgagcagagctaagccgaggctgggctgggctaacctgggctgggctgagctgagctgggttgggcaaggctgggctgggttgagttgggctgagctaagctgagctagggtgagctgggctgagccaggctggattgggctgagttgagctgacctcaactgagctgacctaggctgagctgagctgagctgaagtaggctgtgctgggctgagctgggatgacctgggctgggctgagctgatttgggctgggttgagcagacctgggctgagccgggttgagctgagctgaaccaggatgagctgggctgagctgagctgggctgggtggtccaggctgggctgacctggaccaggctgggccaggttgagctgggctaagccgagctgagctgagctgagctgggatgatctgggctgggctgggctgggctgagctgacctgggctgggctgggctgagctgagctgagctgagttaagctgagctgagctgaactgggctgtgctgagctaggctgggctgggctgagctgggctgggctgggctgagccagattgtgcctggctgaactgagctgggctaagctgagctgggctgagctgggctgagctgagctgggctgagtggggcggggctgagctgagccggactgggctgggctgggctcagctgagctgagctgaactgggctgggctgaactgggctgggctgagctgagctgaactgggctgggctgaactgggctgggctgagctgagcttggatgagctgggctgaactgggctgggttgagctgggctgggctgagttgagccaggctgatctgggctgagccgagctgggttaagccgagctgggttgggctgggctgggttgggctgggctgagccggactgggttgggctgagctgagctggactgggctgagctgagctggtctgggctggctgagctgagctgtgttgagccaagctaggctgggctgggctgagctgggctgaactgggctgagcggagctgagctgagctgggctgggttgagcagagctgggggctgagctgggctgggctgggctgagttaagctgggctgacctgggctgagttaagctgggctgacctgggctgagctaagctgggttgagccgatccgggctgggctgggctgggctgagccaggctaggttgagctgggctgggctgggctctgctgtgctgtgctgaacagggctgagctgaactgagctgagctgggctgagctgggctctgctgtgctgtgctgagcagggctgagctgaactgagctgagctgggttgagctaagctaggctgggctgggctgagctgggatgagctgggctgggctgggctgggctctgctgtgctgtgctgaacagggctgagctgaactgagctgagctgggctgagctgggctctgctgtgctgtgctgagcagggctgagctgaactgggctgagctgggctgagctgggctgagttgagcagagctgggttgagcagagctgggctgggctgggctgagttgagccaggctgacctgggctgagccaagctgggttgagccaaactgggctgggctgggctgagccaggctggattgagctgggctgggctgggctaagctgagccgagcaaggttgagcgagctgggctgggttgggctgagctgagctgggctgggctgagctgggctgtgctgcactgagctgggctgagctgggttgaactgtgctgagctgagctgggctgtgctgaactatgcttagctgggctgggctatactgggcttagctgggctgggctaaactgggcttagctgggctgggctatactgggcttagctgggctgggctaaactgggcttagctgggctgggctatactgggcttagctgggctgggctgagctgagatggtcttaggtggtctgagctcagctaggctgggctgagctggtctgagctcatctgagttgggctgagctgagcttggctttgctgagctggggtggggtgggctgggctggattgagctggcctgggctgggatgaactggattgagctggcctgggctgggatgaactggaggacatggcactgggccaatcttcatgatcttgttggacatagatggatagcctcagctgagtctacactgcgttccccatcacacccaccctccctatactcactcccaggcctgggttgtctgcctggggagacttcagggtagctggagtgtgactgagctgggggcagcagaagctgggctggagggactctattggctgcctgcggggtgtgtggctccaggcttcacattcaggtatgcaacctgggccctccagctgcatgtgctgggagctgagtgtgtgcagcacctacgtgctgatgcctcgggggaaagcaggcctggtccacccaaacctgagccctcagccattctgagcagggagccaggggcagtcaggcctcagagtgcagcagggcagccagctgaatggtggcagggatggctcagcctgctccaggagaccccaggtctgtccaggtgttcagtgctgggccctgcagcaggatgggccgaggcctgcagccccagcagccttggacaaagacctgaggcctcaccacggccccgccacccctgatagccatgacagtctgggctttggaggcctgcaggtgggctcggccttggtggggcagccacagcgggacgcaagtagtgagggcactcagaacgccactcagccccgacaggcagggcacgaggaggcagctcctcaccctccctttctcttttgtcctgcgggtcctcagggagtgcatccgccccaacccttttccccctcgtctcctgtgagaattccccgtcggatacgagcagcgtggccgttggctgcctcgcacaggacttccttcccgactccatcactttctcctggaaatacaagaacaactctgacatcagcagcacccggggcttcccatcagtcctgagagggggcaagtacgcagccacctcacaggtgctgctgccttccaaggacgtcatgcagggcacagacgaacacgtggtgtgcaaagtccagcaccccaacggcaacaaagaaaagaacgtgcctcttccaggtgagggccgggcccagccaccgggacagagagggagccgaagggggcgggagtggcgggcaccgggctgacacgtgtccctcactgcagtgattgccgagctgcctcccaaagtgagcgtcttcgtcccaccccgcgacggcttcttcggcaacccccgcaagtccaagctcatctgccaggccacgggtttcagtccccggcagattcaggtgtcctggctgcgcgaggggaagcaggtggggtctggcgtcaccacggaccaggtgcaggctgaggccaaagagtctgggcccacgacctacaaggtgaccagcacactgaccatcaaagagagcgactggctcagccagagcatgttcacctgccgcgtggatcacaggggcctgaccttccagcagaatgcgtcctccatgtgtggccccggtgagtgacctgtccccaggggcagcacccaccgacacacaggggtccactcgggtctggcattcgccaccccggatgcagccatctactccctgagccttggcttcccagagcggccaagggcaggggctcgggcggcaggacccctgggctcggcagaggcagttgctactctttgggtgggaaccatgcctccgcccacatccacacctgccccacctctgactcccttctcttgactccagatcaagacacagccatccgggtcttcgccatccccccatcctttgccagcatcttcctcaccaagtccaccaagttgacctgcctggtcacagacctgaccacctatgacagcgtgaccatctcctggacccgccagaatggcgaagctgtgaaaacccacaccaacatctccgagagccaccccaatgccactttcagcgccgtgggtgaggccagcatctgcgaggatgactggaattccggggagaggttcacgtgcaccgtgacccacacagacctgccctcgccactgaagcagaccatctcccggcccaagggtaggccccactcttgcccctcttcctgcactccctgggacctcccttggcctctggggcatggtggaaagcacccctcactcccccgttgtctgggcaactggggaaaaggggactcaaccccagcccacaggctggtccccccactgccccgccctcaccaccatctctgttcacaggggtggccctgcacaggcccgatgtctacttgctgccaccagcccgggagcagctgaacctgcgggagtcggccaccatcacgtgcctggtgacgggcttctctcccgcggacgtcttcgtgcagtggatgcagagggggcagcccttgtccccggagaagtatgtgaccagcgccccaatgcctgagccccaggccccaggccggtacttcgcccacagcatcctgaccgtgtccgaagaggaatggaacacgggggagacctacacctgcgtggtggcccatgaggccctgcccaacagggtcaccgagaggaccgtggacaagtccaccggtaaacccaccctgtacaacgtgtccctggtcatgtccgacacagctggcacctgctactgaccctgctggcctgcccacaggctcggggcggctggccgctctgtgtgtgcatgcaaactaaccgtgtcaacggggtgagatgttgcatcttataaaattagaaataaaaagatccattcaaaagatactggtcctgagtgcacgatgctctggcctactggggtggcggctgtgctgcacccaccctgcgcctcccctgcagaacaccttcctccacagcccccacccctgcctcacccacctgcgtgcctcagtggcttctagaaacccctgaattccctgcagctgctcacagcaggctgacctcagacttgccattcctcctactgcttccagaaagaaagctgaaagcaaggccacacgtatacaggcagcacacaggcatgtgtggatacacatggacagacacggacacacacaaacacatggacacacagagacgtgctaacccatgggcacacacatacacagacatggacccacacacaaacatatgtggacacacatgtacaaacatgcacaggcacacaaagagaacactgactacaggcacacacacacacgggcacactacccacaggcacacaacagatggacacgcgtacacagacatgcacacacccacaggcacaacacgtgcgcatgccggccggcccccgcccacattctcccagggccctgccggatactctgtccctgcagcagtttgctccctgcgctgtgctggccccggggctttgggcccaggctctgcttgtccttctgtctctgcttggaggtgctgccatggcacccagcttgggctctgcctggggagcggaggccccagggatagcatgtgacccctgctgaggccaggctcctgatgaaggcagcagatagcccccacacccaccggtgagcagaaccagagcctgtgccatgtgctgagagcaggcagtgactaagcatatgggcccagagggcagagtggctgccctgggcagctgctcctcttagcaggaggcctcaggagatgagctagagcaagtctgcccctgcaaataccacctgctccccaacccacagcagggagcaggcgaggtcagacagcagcagcccgggaaggaccgagccccagcagggaaggcagggcccgagtgaggtctccacacccaacgcacagtgctgtctctaactggggccacctccgagtccccgccacactcttggccctttggagtcctgggctccaggtgtctcccaagggcccatctgtgcaggggatgcaaccccccgaatgtcctcatcccactgtggagctcaggtctctgtctgctccctgggtcctggcagggtaggacaagtccgccaggatgtccccatgcagactctgctccaagagggagctggagagtcagggccttggtgagggagtcaggatcgggttccccccagctcagtcctcccacctgccagcccccacagcacagggcagggccacaccccctgcttccccctccaggagagtcaggacatgctggccgctgctccgctggggccccgccctccagcccccaccttggtctgtgtgctgcatcccccacgctctctctgccaccccaggactctgaggaaaagacctcagagtcccagccctgcccagcctcggcctgtgcccccgctgcatcaggctttcaggggcccagcccatgccctgggcagtgcccgagcccccctgcacttgctctccccacccctgggtgcagcacagcctaggggccaagggtgggcctagaggatgggccccgggggggctttgctgggtgccaccccagcctgaccctattcccccgtgctgtgtctcctgcagagggggaggtgagcgccgacgaggagggctttgagaacctgtgggccaccgcctccaccttcatcgtcctcttcctcctgagcctcttctacagtaccaccgtcaccttgttcaaggtagcacggctgtggcacagggaggagggcgcagggcgaatgtggggcccagggagcagcctgggctggacgtctagcccggaggcccccacaccaccccactgggtcatctctgccccggctcccttcccgaccacagggaaagcatttcacactgtctctgttgcctgtaggtgaaatgatcccaacagaagaacatcggagaccagagagaggaactcaaaggggcgctgcctccgggtctggggtcctggcctgcgtggcctgttggcacgtgtttctcttccccgcccggcctccagttgtgtgctctcacacaggcttccttctcgaccggcaggggctggctggcttgcaggccacgaggtgggctctaccccacactgctttgctgtgtatacgcttgttgccctgaaataaatatgcacattttatccatgaaactgctttctggtgagggtttttgtttctttttcaaaactttcatgctacatgggcatctcaagggggaccccagttccaaagggagctgtggaaaagagcgctgggtcagccagcgcagggggttcgaggaaagccacgtgcccaggaaaggggccgcagaagcaggtgggccagactcagactcggggcatgcccagcctgatggaaggaaggggactgagcaggagagggttccaggcctggtcctccaagcacagcctgaattgggagactggggctcaggcctcgggggcctctgtgtgtgctccacatgcctacaactgcccgggtcaccttgccacccttcccagcaagcccagacagttcttggccttgccccaaaccttcatgatgtgtggtgcacgccaccgggatccaggaggtgcaggctgagccctcgagagcatgtgggcctcaccgggatccaggaggtgcaggctgagccctcgagagcatgtgggcctgtctgcacagtgtgggggccttgcactccacaggagcacaggggtggggtagcagtcgcgcccgtggcaggggagtggaagttggagcaaaagtttcaggtgaacgagtgtcttagtctaattgggcagctatcacaaaacactatcggctgcaaagcttgagcaacagacatttgcctcccacagcgctggaggctgaaagtctaagatcaaggcgccggcaacttcaacgtctggcgagggccaattcccagctcagagacgcgcctcctcactgcatcctcgcgcagccgaagatggtgaaggagctctcagggtctctgtcatacaggcactaagcccgtcacgagggtctctgtcatacaggcactaagcccgtcacgagggtctctctcatacaggcactaagcccgtcacgagggtctctctcatacaggcactaagcccgtcacgagggtctctctcatacaggcactaagcccgtcacgagggtctctctcatacaggcactaagcccgtcacgagggtctctctcatacaggcactaagcccgtcacgagggtctctctcatacaggcactaagcccgtcacgagggtctctctcatacaggcactaagcccgtcacgagggtctctctcatacaggcactaagcccatcacgaggtcctcatcattgcccagatgctagggctcccagtgccatccccttgtggatgaggatggggggcgtgaccatgtcgtccttagaagccgttagggaatgcatagtggggaggacaagtctctgccatcaccctgaagatgggcaggtggtggccaggcttggggcagtgccgaaaaatgactccccaggtaggtgggagcaggatcaaagagcaggggattttttcagagatggcagccaagccaaagttgggggctcatgccaggaggctcacttggccatggtgcagtcacccaggggtgacccacagtccgtggcaaagtcaaggacagcagtggctgtgagaccagggtggaggcaggtggctggggggagaggaccaggctggaaggactgggcagaccccaaggccatagaagtgtcctagaggaagcatccaggatggcgtcttgggagggctcataagctgggggcccagaaggaggccatttcaggttctgaggagcagcctggcacttgctctgagccagctgtcatgggtatctgggggctgctgggtacaagttgtgtccctcccactaaatgtgctctccacatggacccggcccgcccttctgtccctgctggatccctgagctggcaccagccctgccctcagagacaatgtccaggagacaggtggaggtgcacgtgtgggtccctggggaaatccatcctccaaccgtgggctccgagtcgcctcccagcctctcgctccagcttcaccccatgtagctcatcacaggctcaacctcccagcctgggggaggatggagtgaggagccccacactgcccagggcacacccagggggctggggagtctgcactgggctggggcagggaggcctcgtgcagcctgtggggctggcagctcaggacaacactcgtatccgttaactgtggccctggcaacactgcaccccagactgcgtggcttaaacaacagacgtttattccgtcctggttctggaggccgggcatctgggatggaggcctcggcggggctggctcctctgtgtcacgggagactctgttccaggctctctccctgctgctgggctttgccggccgtctctggtgctcttggcttatggaagcagcaccatcttcacagggcgttctccccacgtgctgtctgtgcccagattcccccttttcatgaggacagcagtcatattggatcagaggcttgccctactccagggtgacctcatctgaacttgattgcagctgcaaagactgtttccagacaaggtcacattctgtggtcctgggggttaggacttcgacacattaatttacaggggacacattttaacccatgacagtttgccctccgttccccccataatcatgtccttctcacatgcaaaatccctgcatcccatagcaacatctccagaacggctgaccccttccagcaccaactcttagtccacaatctcagcgaaatatcacctgcatcaagtgtgggagaaacccagggtgagattcattctgggtgaaattcctctccatctgtggacctttgtaacttgacaagaagttatctgcttccaaagtacaatgatggggcaggcataggatggacattcctattctaaaagggatacatagaaagggagagaggagccatgggtcccaagcaagcccaaacccagcagggaaagctgcattagatttaaggctcaaggctcatcctcctgggtccgtgctccatcttccaggcccactggggtgaccccatgctcttcgcccatggtggccagagcccccacagcctcctcatctttggctctgatctcaaagtcacccttccttcattttttctggtcttctttcccttccatccaattggcattgtttcttctgttttacaattcacaaaatccttgtcagcttcccatgaaattcatgggggtttgagtcatcagacaagagagccctgcacagttatatcctcaataaccttatctctactcctggtttctgctgagatggttgattggatccataagtcatgattccaatctctttaacaaatggttgcccagacacatccttggccttgtttccagagcatgctattggacaggctgagaattttccagctgttcaagttgtgggtcctgtttactgaacactttctctcactttttactataagcagtcaggagaaatcaggttgtgccttcaacacttttcttagaaatatcctcagctaaaatccaggttcatcacttgtaagtcctacttaccataaatagaatgcaattcagccaagtgctttgccactttctaacaaaggtcacctttcctccaattttcaataacatcttcctcatttctgtctggggcctcaccagaggcatctttaacattcacatttctagcaacattctgtttgtgacaatttatgtattctctaagatgacaggagttttctctatagctctcctctttctttctgagcccccaccaggatcaccttcaatgtccaaatttctaccatagtcttcaaggaaatctaggctttttctaacatgcacctgaaaactcttctcacctctacacattaccctatcccaaattcatttccacagttttaggtatcaattaaatcagataaataaatcattaccctgaattatttcagttaagcatgttagttggtggcataagagaaaactcagtcagatagtgctgaagacaggactgtggagacaccttagaaggacagattctgttcagaatcactgatgcggcgtcagcaggactggcctagtggaggctctgggagggtggctgccaggcccggcctgggctttgggtctccccggactacctggagctgggatgcgtggcttctgccgccgggccgactggctgctcaggccccagcccttgttaatggacttggaggaatgattccatgccaaagcttttgcaaggttcgcagtgaccaggcacccgacatggtaagagacaggcagccgccgctgctgcattcacttctcttaaaactttgtatttgatgtcttatttccactagaaggcgaattggtcttaattgcttctcttaagccaccacttctaaagccaaaatctgttttagtttcttatgagctattgtaacaaagtaccacaactgcatggctgaaacaacagaagtgtattctgtctcatttctggaggccaggtgtctgagatcaagctgtgggcagggttggctcccctgggttggcagggagaatctgttccaggtgtctgtcctggcttttgttggtttgctggaaagctttggtgttccttggcttttggaaacagctcctccgcctccatctttaccttcacatggcattctgcctgcgtgcatgtctgtgtctaaatttccactttgcataaggacaccagccatattgggtcagaggctcacctgcctccagcgtgacctcatcttaacttgattgcatctgcaaaactctgcttccaaagaagggcacattctgaggccctacgggtcagagcttcaacacgtccatttatttggagacacaactcaacccataacaagacccatccctagtgtctcaccagtggtgctgtagagggaggcctggcagggctgacatcccagaacctcagggaaaaatgaaaacagcccagaggggtccaagaggtggctcgaggaagggaattaggaacacactgttcaggtggaagattctgagatgggccgtgaatactgcctaggatgtggagggttgacaatgggttgacaatcctgctcagaaaatcccaggataaaggatgtaaatggggagaagaggagggtcatccagaatttgggaaagcagggcgacagtttctgccccaagggagaagggaaggaggatggggccaccgccacaccagatgaccttgcgtaccaggccaaagaacgggaacacctggccccacctgagcagcaatagtcagtgtggtggtgggcagacatgggtggaggcagggggtgagtagaaggttagactaagacggagcacctggggcctccagggacccaggcaagaaccctgcacttgctcagctgccctgggtacccaggtctccaggaaagtgaggctgagagccaagcccagcaggcagccacacattctgggacctgccaccctacagcctgctgtccatgagtaacaccccttacaaggggccaggtcagctcatgggtttatcccaggcagcagagcccctggggccaggaatcagggagaggagcatccaatcccaccagctcctctggagccactcagagggccagacgcatggccctccacagggaccccatggcccctgcagggcagctgaggacccgtggctgggagcctgggcaggagggtcatacagccctaggcccgttgctcccaggcttgagtgcccctcctcccctcaggggcccaagggaagtgggttccagagaggttgggggcagcagggaaggtggaggtcccaggaatgcccagaggggcaccaaagcctctggagggaagacccctcccttccaggagctctcggcaacaagagcccagggtccacaaagccacaggtcccactcggttattctgactcacaacacaggagcggcagcaggggcattcgtgttcacgggccacttggtcagccccgctcaccctgggcactcctcctgggccccttttccctgccttccctgtcaccctgctgccagggtcctctgccctgccctgccccttgtcctcagagcctccagcctcagactcccactgtgtctgtcttccagcacccaccaaggctccggatgtgttccccatcatatcagggtgcagacacccaaaggataacagccctgtggtcctggcatgcttgataactgggtaccacccaacgtccgtgactgtcacctggtacatggggacacagagccagccccagagaaccttccctgagatacaaagacgggacagctactacatgacaagcagccagctctccacccccctccagcagtggcgccaaggcgagtacaaatgcgtggtccagcacaccgccagcaagagtaagaaggagatcttccgctggccaggtaggtcgcaccggagatcacccagaagggccccccaggacccccagcaccttccactcagggcctgaccacaaagacagaagcaagggctgggctgtgaggcaacccccacctccccctcagagcacgttcctcccccttcaccctgtatccacccctccggaccctccccatctcagtccctccgctccctctctctgaggcccatctcccaatacccagatcactttccttccagacccttccctcagtgtgcacggaggcagcttgcccagcaaaggtgactgtctagtgggcttcccacagccaagctcccaccccatgctgcggcccttcccttcttcctgcttggctgcctgtgccccccacctgcctgtccacaacccagcctctggtacatccatgccctctgccctcagcctcacctgcacttttccttggatttcagagtctccaaaggcacaggcctcctcagtgcccactgcacaaccccaagcagagggcagcctcgccaaggcaaccacagccccagccaccacccgtaacacaggtgagaagccccttccctgcacactccacccccacccacctgctcattcctcagccgcctcctccaggcagcccttcataactccttgtctgagtctccaagtcacactttggtaaggagagggacactgaacggacctctaacaaacacctactgccagccagccccagtctgggggccagcagatgccaaacagccagcagactcccagagcagacctgggccggctccctggcccatggacccagctctgcctcgctgagctgaggcatgggctctcagcgcagcctcacatagagccaccctgccgaggcagtccggcttgcagactcacaggtcacttgggccgcagcagcccctccccgtgaccctcgcctcccgcccgccccagcctggctctctccaagtgttggatcttggtggccagcctgcttctcaccctcaccctgcctgccacctcagaatggcaggggaaagagggccctcaccaagaactttatctgaggagtctgaggcttgtgactctgacctgcctgagatgtccatgtggccggggggacgggttcagtgttcgggagaactcgggtacgtgcctgactttctctgagtagggcaggaagctgttaggagaagcagcagtgaggtgggctggaccaacaggcagaatgactgtccctcagccaccctctgggatgtgggtcaagctctgacaaaggcatggcacagccatggtggcccctgcttggatgagtggccacggtgccctcaccctgggccagaatctgcctccactctgcaggtgcagaaacacgacattcccgtctctaaacacacctagctcctaggcttggggtgggcctatcaaatgcagggagatggacacagcacaagggccagagcttcccatgagaaaggtgagggcagctgctccctgacccgggcatctgcacttgtccctctccaccctcctcatgggcagtggagactcagcaacaaaacaagttgagtgcattagcagccagctctggagccaagtcactcaccccacggccttggctgctggtggaggggccttcccctgggcagcctccaagaagacggccaagtgctcttactcagaccacggcgctgcttcctggcacctcgatttcccacaacaacatggggtgcagacaggctagggccccctgccctggggcctggacggcatccagttaaagatgacccttcacgggcggtgcctgaggtgtgctgacctcagcagctaagccctcaggtctggtctgcactgccccacctggaggacccaactgacccagacacagccagggttatggcatgaccccgtggacggtgacccacaggccagatgcagccaggggctgttttgtgtggcctagaaatgtctttacagttgtagtgggatggaggaggaagaggaagagaggaggggagagaaaagcagggaaggggaaaaagaggagttcaatgcaaccccaaaagccagaacagttttgagctgaaagaacaaggcaggaaacatcccagtacctgacttcaaaacatactataaagcagttgtaatcaaaacaggatcataaaaacagacacacagacccatggaacagaaaagcgagcccagaaataaatctacatgcttgcagtccattgattttcaacaaaggcaccaggaaaacacaatggggagaggacagtttcctcaataaatagtgctggggaaactggatatccatgtgcagactaatgaaactacacaaaaatcaattgaaaacagtctaggccaggcgcggtggctcatgccggtaatcccagcactttgggaggccgagacaggcggatcacctgaggtcaggagttcgagaccagcttggccaacatggcgaaacccggtctccactaaaaatacaaaaattagcacatggtggcctacgtctgttatcccagcttttcaggaggctgaggcaggagaatcgcttgaatccgggaggtgaaggttgcagggagccaagattgcgccactgcattccagcctgggcaatggagcgagactgtctcaaaaaaaaaaaaaaaaagaaaagaaaacagtctaaaggtttaactgaacagataaagctactagaagaaaacatagggggaaaactccatgacattagtctgagcaacgatttttggatatgatcccaaaagctcaggcagcactagtcacaaaagccaagatacagaaccaacctaagcacccctcagcagatgcacaggtaaagaaaatgtggtacgtatggggcacaatggaatacgattcagcctttaaaaacagtgaaattctgtcattggcaacaatgtagatgaacctgaaggacacttatgctaagtgaaataagccaggcacagaaggagcaatactgcatgattgcacttacatctggcaggttaaaaaggcaaactcttagaggcagacagtagagaggtggtgccagggagcgggcactggtggctggggagatgttggtcaaagggcacaaaactgcagttgggaggaattagttcaggacatcccttgtacatggggacagtggttagtaacaacggattgtatccttgaaaaccgctaagaaaatagtttttaagtgttcttgacacaaaaagtgacacgtatgtgagatactgcatggtcattagctggatttagccattccacaatgtacacatatttcaaacattgtgttgtatatgataaacatgtataatttttgtcaattaaaaatttttaggaagaggaggagaagagaagaagaaggagaaggagaaagaggaacaagaagagagagagacaaagacaccaggttttttctgacccctgggctatcaaaacacctattgcccaataactagttggccgttggtgccctaaactattgaagcgattgctgttatgtggatgggccccggacacttagaaactcgtgacccctgaggacccccacgaggacagtcagggtccccccgaactcagggagcactgaggaaggagctcttagaggcgtggggcccctcaggcccctcagagggctctgccacatgggtcaggggcaggctgagggggagtcccaggctccatgcccagcctctgtgcctctgaccagggtgtcccccacaccgcctcctccccagtgccctccactggccacacctggccagaagctggggagaggagagcacagtggttaagtcagtccctgcagggagacggcaccagaaaaacctggcctgtggatgagtcccggcctggcagccacagagcagagagctctagaagcaacgaaggcccgagtctgctcagggaagagcgggcagcagccccagggccggacagtgaccaagagtggcaccgcccatggctcaacgggtctttgcccacagatcccccagcccctggagacagggtctgtgtgcctggccgtgcaggcaggcaccacactcagggggaggccactgtggagctctgtgcagagccccgggcgggagcctactgctcccgaaggtccggccacagctgctctcgtttgctctcccctgcagagtgtccgagccacacccagcctcttggcgtctacctgctaacccctgcagtgcaggacctgtggctccgggacaaagccaccttcacctgcttcgtggtgggcagtgacctgaaggatgctcacctgacctgggaggtggccgggaaggtccccacagggggcgtggaggaagggctgctggagcggcacagcaacggctcccagagccagcacagccgtctgaccctgcccaggtccttgtggaacgcggggacctccgtcacctgcacactgaaccatcccagcctcccaccccagaggttgatggcgctgagagaacccggtgagcctggctcccaggtggggagacgagggtgcccacagcctgctgacccctacgcctgccccagggccatgaccccagctgggccccagcagcaccggtcatcctccacaggaaaggagaagggaggcaccagcaccctggccggccccacttctctcccagtgcccccgtggccagaggctgacagcctcccccacctccccgcagctgcgcaggcacccgtcaagctttccctgaacctgctggcctcgtctgaccctcccgaggcggcctcgtggctcctgtgtgaggtgtctggcttctcgccccccaacatcctcctgatgtggctggaggaccagcgtgaggtgaacacttctgggtttgcccccgcacgcccccctccacagcccgggagcaccacgttctgggcctggagtgtgctgcgtgtcccagccccgcccagccctcagccagccacctacacgtgtgtggtcagccacgaggactcccggactctgctcaacgccagccggagcctagaagtcagctgtgagtcacccccaggcccagggttgggacggggactctgaggggggccataaggagctggaatccatactaggcaggggtgggcactgggcaggggcggggctaggctgtcctgggcacacaggccccttctcggtgtccggcaggagcacagacttcccagtactcctgggccatggatgtcccagcgtccatccttgctgtccacaccacgtgctggcccaggctggctggcacagtgtaagaggtggatacaacccctcgccgtgccctgaggagtggcggtttcctcccaagacattccccacggctgggtgctgggcacaggccttccctggtgtgaccgtgaatgtggtcaccctgaacagctgccctctctggggacatctgactgtccaagaccacagtcagcacctctgggagccagaggggtctccagagacccccagatgtcaggcttgggctcagtgcccagcgaaaggtcagccccacacatgcccataatgggcgcccacccagagtgacagcccccagcctcctgccaggcccacccttttccgcccccttgaggcatggcacacagaccagtgcgcccactgcccgagcatggccccagtgggatgtggtggccacgaggggctgtacacacagcaggaggctgtccgccctgctcagggcctgctgcctatgccccagctgtccaaccaagggaggcatggaagggcccctggtgtaagctggagccaggcacccaggcccccggccaccctgcagagccaaggaaaggaagacacccaagtcaacaaggggcagggctgagggctgtcccaggctcttttggcccgaggggctgccagcagccctgacccggcatgggccttccccaaaagcgaccctgtgaggtggcctcacagagaaccccctctgaggacagtgtctgaccctgcctgcctcacacagatgggccccacagcagtgggcaacctggggggcagcagcccaacctgaccctgcagggactgccccctgcagcagcagctgcttctcagtcccccaacctccctgtccccgccagagggtcttccccgaagctgcagccccaacccatggctgcccacctggaaccgggactccctgtccactgccccctccccttcggggccccatctgtgctggggcccaggttcggcctacagattcccatcattgccatggcctcctgaccttgcctatccacccccaaccaccggctccatgctgaccctcccccaggctcccacgcccagctggccggccatccccaggcacagacagtctgggatctcacaggttagcctggaccatccacctggccagacctgggagaggctggaagctgccctgccaccatgctccagggccccaggttgcagtactatggggtgagggtgtgtgtgcacacctgtgtgtacctaggatatccgagtgtacccttgtgcccccaagcacaagtctccctcccaggcagtgaggcccagatggtgcagtggttagagctgaggcttatcccacagagaaccctggcgccttggtcaaggaagcccctatgcctttcttgcctcgatttcccctcttgtctgctgagccagcaggggccacgtcctgggctgctgtgaggaggaagcaagttggtgctaggaggggctcctgtgtgtgcatgggcgggaggggtgcaggtatctgagcaccccggtctccacttgagagagcagggcaggagctccctgacccacccagactacacacgctgtgtccacgtgtctcccattatctgtggcagaggatccggcttctttctcaatttccagttcttcacaaagcaatgcctttgtaaaatgcaataagaaatactagaaaaatgatatgaacagaaagacacgccgattttttgttattagatgtaacagaccatggccccatgaaatgatcccggaccagatccgtccacacccgccactcagcagctctggccgagctcacagtacaaccacaataaactcttgttgaatgaactctaggaagtctgtgacgtggctggttcttgtcaatgcttcctgcctgcccacaggctcttcctcgtggatggggctgtgcttgccacggaagcgcgtttttcccggcctaggcttgccttgggccccactgccgtctccagctggagatgaccttctatacacacatttgctcatgacagacccttgcttagcccccttccatggctccctcctgctgctgggataaaatcaccttgcctggatatcccctcctgggcccctttccaccctccttagtcagcacccccagttcagggcacctgctttccccgctgcggagaagccactctctccttgctgcccggctgtgtcttgccttccacaccttgtcacagtggccacttcctaaggaaggcctccctgtgtgcaggtgtgcagaagtgccccagcctcccgtcacctttgtcacgggagcccaatccatgagagtctatggttctgtctgtctgccccactcagggcagcgacaagtccaggcggggaggacacagtaggcagagatttgtcgaggggacatatgagcaagagggtgaggctgggagctccctggagataaccacgcctcctgggaagactcgccgtcatttcagctccacgctgtgcgggggtgggtggaggggtagcctggccctcatgaccagggagcttctcactcagcccctgttcctccccagacctggccatgacccccctgatccctcagagcaaggatgagaacagcgatgactacacgacctttgatgatgtgggcagcctgtggaccgccctgtccacgtttgtggccctcttcatcctcaccctcctctacagcggcattgtcactttcatcaaggtcaggggagcggccaggctctcagtgaccctcggggtgggtgtggggcaaggtgcccttccaggggacatgccagagctggtccagggatcctggaccaggcagaggcagggctgagggagcctggaggacatgcaggccctctgtggcctgtggacactgtcgaaggccctcttgaccctgtggataaaggacaacaccccctcccctgctcctctgtctcccctgcccctccacccctcaggcttctagccccctgtctgaccccaggggctgtctttcaggtgaagtagccccagaagagcaggacgccctgtacctgcagagaagggaagcagcctctgtacctcatctgtggctaccagagagcagaaaggacccaccctggactcttctgtgtgcaggaagatgcgccagcccctgcccccggctcccctctgtccgccacagaatccagtcttctagaccagggggacgggcacccatcactccgcaggcgaatcagagcccccctgccccggccctaacccctgtgcctccttcccgtgcttcccccagagccagctacacccctgccccggccctaacccccatgcctccttcctgtgcttcccccagagccagctagtcccacctgcagcccgctggcctccccataaacacgctttggttcatttcacctgcctcctgttctttgtcccagtggtctggattcacctcaagttaaaggacacagggagctaacggcaacggggagggagtttggggtgtcagcagcaacagggaacgcaatagccaaagctgtcacagcaagaactgagcggagaccttgctctgaagttcatgggttaagaaacgcccctccccacaccaaacacaaacatttcacgctcactcgtacatgcacacacatgcacacaagcatctatgcacacatgcacatgtgcacagctcacgaataaacatatatgcacacacatgcagtacactcacatgcaaacaggcagatgcacaggcatgggcacacatgcacaaggcatgcatgtgcaggtctgcagacacacacatctgcatgcacatacacggacgtgcacctgcacacacacaagtgcacataggcatcaaagacacacatgctcgtgcacgcgcatacacacagacatgcacacttatgcatgcacacgccatgacaggatggcacgggaacaaccttgcacatggagcctgttctgtgtgtatcgagagcctgcacctcttactgtctgcatgactgtgggcaagagcctgaactccgtacctccatttcctcatcagaatggggtgaaaatacacctgtcaagtagagtgaggtgagaagtgagtaaaatcctatctgaaaggggctcagcaaggacccaggtattggtcggacctcctgttatcatctgctgtgggctgaacatttgtgtcctcctgaaattcatacattcgtatattcatacctttccccctgaaatcctaacctccaatgtaatggtattagaagatggggcttttgggggtgctgaggtcataaaaggggggccctcatgaagaggattagcacccttatgagaggggccccagagagctccctcaccctttctcccctgtgaggagatgccgtctatgagctgggatgcaggcctcaccagacacccatctgctggagccttggtctgggacattcagcctccagaatggtgggaaataagtttctgttgtttctcagccaccacgtctgtagtatgtggaagtcatcagaatcaaaattgagtcacctgtggttttttttttttctaaatccctgacaaatagagcctaggaaggccaagaagagaagagggttctcatccataaacacttgataacaaaaactatcaccaaggactctacaaaaactgcaactggcacaaagaccatcacaaccttacacagaaagtacttctgtgaggacatcttcccagcaacgggctgtccaacctcagactggcattgcctttgttattggtccttgtagagagggtaattatctcaaagcaatcatgtaatcctcctcatttttcctttgaaagccttggtctccctttgcctccctgaatacgcacatagctgatcatggcaggtgtatcccactgcagtgctctacctccaaatagatatctttttcttttagacggcatttctcttgttatttagattgagatacatggagtcagaagtgggatgtggagaaggatcactgctggaaggagtcagtaattcttgggccggtgtgcagtattcacttgagccctttgagctctcagctttttctgagctactccgtcttctctcaggccaaccctccctctttttggaagatgcttttttaatattatgtggggtttgtttattagactgccttaataaaggaccttatgtccctcctgggatgataaaaggcttttcgtgctttctggcaagtcctgtttagcataaagacattccagcctgagtactctggtttccacagagtttgcattctgtctctgagggatgtcttctctggtgaggtgcctcctttaatactttgttggatatgcatgcctgggtgaacatatttgtgagcacccttatcttgccttcttttgctgtggttatgtgtatctgtaaatgacctggctcttttcctctgcttgcttctaaaaatctttggagagcaaaataaacattctaaatggtgggcacaggctgtctcattagaagctgctacagcagtcaccaccgtctaaagcaccagtccaaactgccggcgtggcctcatagtatctgtagaatgttctttactgtaaaaagattaataagaagggggatggtttttaaatattaaggcacagtaagttttctggaactcccgctggctacgtctttgtgcacatttttaaactaatgggcaaattacgtcaaggaaaatttagagttccaatggttatttttcgaactctaacaaaaaccctgcaacagtagtcatcatgcagtgcctcctaagtcctctatctctctattttgtttttctgcctactttaaatctgctgacttttttactcatgttgcaataaaactcactggttacagcattccagccaagatatttttggttttttgtttgtttgttttttgttttttgtttttttagatggagtctcgctctgtcacccaggctggaatgcagtggcgctatcttgggtcgctgcaacctctgcctctcgggttcaagtgattctcctgcctcagcctcctgagtagctgattacaggtgcccgccaccatgcccagctaatttttgtattttagtagagacaggctttcactgtgttggccaagctcgtcttgaactcctgacctcaagtgatccacctgccttggcctcccaaagtgctaaaactataggcgtgtgccaccgtgcctggcccaagattttttaaagtttcctaaaggttttaaattagtggctttacaaattacaacagctctatggtaaccaatgacctagatgtaagagtcatttcttttgaaaatgtagattagctttgcttggctaacaactgcttaggctgatggaatagctaactgaaggactgatggtctcaaagaacagaactaggtaaatatttacagaaattgggctttcagatcgaacaggccaaaatcttgagcttagagcagtaatataaggtatctctgtctgccataaaaattttgctttgccacaggtgccagaaaaaggaaaaacactgctaaatgcttccctgcatgcattgtctagtccagaaaatcagaccagcaaccaaaaaatagatttgttactagtatagacgagttgaagattttgtttttcatatacaattcagccagtcctagctaaaacgcaatcactggaaatttaaccttaaattcatttaaaactgaaaaaggtcttttgaaatcaaactaatgcagaaactgctttacccaaaattctgatccatggccctcattagacgacccatcaggacaaataaagtttagcttgtgaacaagtcccagttttgtcaaaaatataatttggattgaagtgtcttttagaaactgacacatttgtgttattatctcatgaccaaaattctaaaatgaaagctacagtgtctttatttgtgtgcgtatgtggttaagtgtgtttatgcatatgtatgtgtattatgttgtatgttgttatctacatggtaaaatctggcatcatcaacaaaaaatctattaagggattctatttagattggcttagataaataagcattcataaaaaatatgtactaattaacccaaatgccttttagttcatgtgacttaggtatatctttaataaacaaatcagttttaaaattgttggtaaaataaaaatacaaatgttctcagaattgtcagcatatatttttccctgagtttactcgtcagacagctttatatttgtctctgatagatgttttaagatgtcagggtttgacacaaagatgataaaactataaacccatcctaaaacagaataatctttgtatgatctttgataaataagactaatttggctgagtgcagtggttcatgcctgtaattccagcactttgggaggccaaggtgggcagatgactagaggtcaggactttgagaccagcctggccaacacagcaaaaccccatccctactaaaagtacaaaattagccaggtgtggtggtgggcataatcccagctacttgggagcctgaggcaggaaagtcactggaacccgggaggcagaggttgcaatgagccaagagagcgccactgcactccagcctaggcaacagcgagactccatctcaaaaaaaaaaaaaaaggctaatttaatattgcaggcttaataaaaacagctgtatcttatgagctatcgacaaaatacccatacacttcactaagtttcttactaagtgaacatctaataatcacaggctataaaaatggttaaaagggaaataactttaagtaatggctagctttgtctaatatctcaattttcataagtaatctaggtaaattattaaaaataaattaattaagcctggtgtcatggcacacgcctatagtcctagctactcaggaggctgaggtgggaggattgcttgagcccggaagttcagaccaccctgagcgatgcaacaagacccccatcactaaaataaataaataaataagataaatgtcaagaaaataaatgtttataaataagcttcttatgtaatttaagatcttaaaattatgttatcttcagttaaataatagatactcattaaatgtctgggtcatttccaaataagatttttaaaactaacacaaattactgaacataaatgtttgttcttggcttcttaaattttatagaaattttgtagaaagactaaatttatttgggtctattaatatatgtaaaaattatgtcatagaaatatgttttcaaaaattataaaatttttctcatctataaaatagtgatatgtgacaaatggttaaaatttgcttgctagaaaataaggttactaagagttaaaattctaattaatatatataattctgtctacaaagtataccacaaaaaataagatgtgtttttcatttttaaaaactataagacaggcatttataatttattttactgcaaaaaaaaatttatctaatttggagtttgtttaaaggttgtttcaaagcacagatttaggaaaaaagtaaaaacaagatggaaaagaaccactctcatctgcccccacgtaagacgtacctgctccccttccaccacgactgtgtttcccaaggcctctccagccatgtggaactgaatttaatctacaaatagagttgatcaagtaactttaaggtatatggacaataatatgctttgcagcataaagacctgaaaacaaactaaatgcccatcagtgggaaattgtttcaataaaccacagaacattccgtggaaaactccacagccattcaaaagaatgaagggggagagatcatcatggtggacaggagtcaggactagattgcagtccgactgggatggacagagcacatgtggaggctggcaccgtgaattttagctccagaacaactgcaggaataaatcaggaatcccaagaggatccacagaccatgtgaaggaagcagcctgctcctgcaggacccagagacaccccaaatactgtgagtgcccaaactgtggaagtgggaatgggagatcgtccatcctgcacacacaccctcactagagaaaccaaaggtctagttggtgggaaaaggttccaaccttacctggagctgagtcaatttagaaagctgagcgaaatacaggggtacagggagcagcgggaaaggccctgggagcttcctgggtccccaggcaggccattcctgcatggcaccatatgaatactttgggagggtggccagaggcacagggaaaatgtcacagggagaaggaagtctccagctgaacgcaggggagggcacgaatcctgcagaccccactggtagaggaacaaccaaagcccttcttcatagctgggaagtaggtagcctggggcaagttctctgcttgcccaatgcctggaaacagactcagtgctgttggcgaggggcatggtgtgagtgagacccaccttcagtttgcatgggagctgggtgacacctgtgactgccggctttccccacttccctgacaacctgcatgactcagcagaggcagtcataatcctcctaggttcacaactccattgacctgggaacctcacagccatcccccccagcagctgcagcaagaactgtccaaggagactctgtgagctcagacacacctagccctgcccgcatctgatggtccttccctacccccccttgtagttgaagacagagggcatatactcttgggagttctagggccctacccactgctggttcctctccatactaccaccactgatgctctctggaaaacgccatctcctggcaggaggccaaccagcacaaaaacagagcattaaaccaccaaagctaagaaccttcatggagtccatttcaccgccccaccacctccactgggacagttgctggtatgcacggcggagaaacccacagacagttcacatcacaggactctgtgcagacaacccccagtacaagcctggagcctggtagacttgctgggtggctagatccagaagagaaataacaatcaccacagctcggctctcaggaagccacatccacaggaaaagggggagagtgctacatcaagggaacaccccgtgggacaaaggaatctgagcaacagccttcagccccagaccttccctcagacagagcctactcaaatgagaaggaaccagaaaaccagctctggtaatatgacaaaacaaagctctttaacacccccaaaaaatcgcactagctcaccagcaatggatccaaaccaagaagaaatccctgatttacctgaaaaagaattcaggaggttggttattaagctaatcatggaggcaccagagaaaggcaaagcccgatgcaaggaaatccaaaaaaagatacaagaagtgaagggagaaatgttcaaggaaatagatagcataaagaaaaacaataaaaacttcaggaaacattggacacacttatagaaatgcaaaatgctctggaaagtctcagcaacagaactgaataagtagaagaaagaaattcagagctcgaagacaaggtctttgaattaacccaatccaacaaagacaaagaaaaaagaataagaaaatatgagcaaagcctccaagaagtctaggattatgttaaatgaacaaacctaagataattggtgtccctgaggacgaagagaaatctaaaagtttggaaaacatgtttgggggaacaattgagggaagcttccccagccttgccagagacatagacatctaaatacaagaggcacaaagaacacctgggaaattcatcacaaaaagatctttaaaactaaaactaaaacaagcaatctacaaaacctaggcacattgtcatctggttatctaaagttaagatgaaggaaagaatcttaagagctgtgagacaaaagcaccacatgcttagtttcactggatacaaaattcttggctgataattgttctgttggaggaggatgaagatagggctccaatctcttctagcttgtagtgtttctgctgagaaatctgctgttaatctgataggttttcgtttataggttacctggtgctttcggttcaaaaatttttttaatttccatcttgatttcgtttttgacccaataatcattcaagagcagtttatttaatttccatgtatttgcatggttttgaaggttccttttggagttgatttccagttttattccactgtggtctgagagagtgcttgatataatttcaattttcttaaatttattgaggcttgctttgtggcctatcatacggtctgtcttggagaatgttccatacgccgttgaatagaatgtgaccatatgataggaaataaactccaaaagaagccgaacaacaacagtgacacaacctgttgaaacctctgggatacagcaaaggcggtgccaagaggaaagttcacacccctaggcgcctacgtcaaaaagactgaaaaagcacaaattgacattctaaggtcacccctcagggaaccagagaaacaagaacaaaccaaatccaaacccagcagaagaaaggaattaatcaagatcagagcaaaactaaaggaaattgagacaaaaaaatacaaaagataaatgaaacaaaaagctggttctctgaaaagataaataaaattgatagaccattagcaagattaaccaagaaaagaagaaagtcccaataacctcaataggaaacgaaatgggaaatattacaactgacaccacagaaatacaaaagatcattcaaggctactatgaacgcctttacacacattaactagaaaacctagaagagatggataaattctcaggaaaatacaaccctcctagcttaaatcaggaagaattatataccctgaagagaccaataacaagcagcgagattgaaatggtaattttaaaattaccaagaacaaaaaaaagtccaggaccagattcacagtagaattctaccagacattcaaagaagaattggtcctattggtactattccacaagacagagaaagcgggaagcctccctaattcattctatgaagccagcatcaccctaataccaaaaccgggaaaggacgtaaccaaaaaagaaaactacagaccgatatccctgatgaagatagatgccagaaatccttaacaaaatgctagctaaccaagtccaacaacatatcaaaaagataatccaccccaatcaagtgggtttcataccagagatgcagggatggtttaacatacgcaagtcagttaatgtgatacaccacataaacagaattaaaaacaaaaatcacatgatcatctcaatagatgcagaaacagcatttgacaaaatccagcatcgctttatgattaaaactctcagcaaatcagcataccaagggacatacctcagtgtagaaaaagccatccatgacaacataattctgaatggggaaaagttgaaagcattccctctgagaattgaaacaagacaaggatgcccactgtcaccactcctcttcaacacagtattggaagtcctagccagagcaatcagacaagggaaagaaataaagggcatccatatcgataaagagaaagtcaaactgtcactactgatgatatgattgtttacctggaaaaccctaaagactcctccagaaagctcctaggactgaaaaaaaaattcagcaaagtttccagatagaagattaatgtacacaaatcagtagctactctatacaccaacagtaattaagcagagaatcaaatcaagaactcaaccccttttacaatagctgcaaaaaataaaataaaatacttagaaatataccttaccaaggaagggaaagacctctacaaggaaaactacaaaacgctgctgaaagaaatcatagatgacacaaacaaatggaaacacataccacgctcatggatgggtagaatcaatattgtgaaaattaccacactgccaaaagcaatctacaaattcaatgcaatccccatcaaaataccatcatcattcttcacagaattagaaaaagcaattctaaaattcatatggaggccaggcatggtggctcatgcctgtaatcctagcactttgggaggccaaggcagtaggatcacttgaggtcaggagttcaagaccagcctggccaacatggtgaaaccccatctctactaaaaatacaaaaactagccgggtgtggtggcatgtgcctgtaattccagctactactcaggaggctgaggcaggagaatcacttgaacctggaaggtttgcagtgagcccagattgtgccattgtactccagcctgggcaaaagaatgagaatctgtcacaaaaaaaaattcatatgaaaccaaaaaagagcctacatagccaaggcaagactaagcaaaaagaacaaatctggaggcaacacacggcctgattccaaactctactataaggccatagtcaccaaaacagcatggtactggtataaaaataggcacatagaccaatgtaacagaatagagaacccagaaataaacccaagtacttacagccaactgatctttgacaaagcaaacaaaaacgtaaagtggggaaaggacaccctattcaacaaatggtgctgggataactggcaagccacgtgtaggagaatgaaactggatcttcatctctcatcttatacaaaaatcaactcaagatggatcaaagacttaaatctaagacctgaaactgtaaaaattctagaaactataaaaatttccaataacattggaaaaacccttccaggcattggcttaggcgaggacttcatgaccagaacccaaaagcaaatgcaataaaaacaaagataaatagctgggacataattaagctaaagagcttctgcacagcaaaaggaacagtcagcagagtaaacagacaacccacagagtgagagaaaatcttcacaatctgtacatctgacaaaggactaatatccagaatctacaacaaactcaaacaaatcagcaagaaaaaaacagacaatcccatcaaaaagtggggtaaggacatgaatagacaattctcaaaagaagatatgcaaatggccaacaaatatatgaaaaaatgctcaacatcactaatgattagggaaatgcaaatcaaaaccacaatgcgataccaccttacccctgcaagaatggccataatcaaaaaatcaaaaaacattagatgttggtgtggatgcagtgatcaggggacacttctacactgctggtgggaatgtaaactagtacagccgctatggaaaacagtgcagagattccttaaaggactaaaagtagaactactatttgatcctgcaatcccactactgggtatctacccagaggaaaagacgtcattctacgaaaaagatacttgcacactcatgtttgtagcagtacaattttcaactgcaaacttgtggaaccaacccaaatgcccatcaatcaacaagtggataaaggaactgtagtatgtatatgtgatggaatactactcagccacaaaaaggaatgaattaatagcattcacagcgacctggatgaggctggaggctattattctaagtgaagtaactcaggaatggaaaaccaaacatcgtatgttctcactgacatgtgagagctaagatatgaggatgcaaaggcataagaatgatacaatagactttgggaacttgggggtgagggtgagagaggaaagagggagaaaagactacaaatatggtgcagcatatgctgctcgggtgatgggtgcaccaaaatctcacaaatcaccactaaagaacttattcatgtaaccaaacaccacctgtattccaataacctatggaaaaataaacattaaaaaaattaagaagactgaaagaattaaaaaatttaaaaaacagtaagtagaagagaggtatttgaaggaagttatgggtatgaagatgtatttttggtacggaaggttaaaaagaaaagagaatttttttaaaaaaggaagaatcttgcgtgataaatttttgtcataaagtaaaatgactgcttactttaaaaaaagaggtatcacacacaccagggcctgttgtggggtggggagaggggggagggataggattaggagatatacgtaatgtaaatgacgagttaatgggtgcagcacaccaacatggcacatgtatacatatgtaacaaacctgcacgttgtgcacatgtaccctagaacttagagtataataaatatatatatatataaagaaaattccacacctgaagccatgtgacaggctacagacaaaacacagttaaaactttgtttcatgtacaaagttatttaaaatattgtacaaaatcaccttcaggctgtctgtataaggtgtacatgaaatacaaatgaattttgtgtttagacttgggtctatccaagatatctcattatatatatgcaaatatcccaaaatccaaaaaatataaaatctgaaacacttctggtcccaagcatttcagacaggggatcgttagcctgtaatgagagggagtatgggtcaattatgacgttgaagattcaaaaaaaatttttttttaattttcagtcaagctctaccaactacactaactagaaaacactcaggcagattgctttttgctaggttaatatggcatgattacaactgtgcatatgaataacatgtatcagattccttttgtttgggaattatttcattacaacactaaacactgcttatgtacgctgggtctctttttcaaagactacaaataatgcttggttctttgctttcaaaatataccaaacatgaggtacaagaatgtacccatccatatttgaccaggggtagaattaaaaggtttgggttgaagaagatgacataacatcccaagagggttgcatccctaggggtcatgggaacaaatgtggccaagtccctttttaactggaaaggatttcagatccctgaacaagacaattcatcagtcttaagcgtagtaagtcatcagcaaataagagaatgataaacactagaaaaataatcaaatcattgtctaaattcattataaaactatatgagaaaactataaaactatatgagagagataaacagagacaagaagacaaggataaaataaaaaaagaggtatcaaacaaagcagaacgcctcaacatgtcataaaacatctgagtaagtcataataaggtttgcaaataatgaatttacgaaaggaattttgcgtgtgatcaagatggctataattagaagggaattatttataagtctttctaaagactgaggtttgctattaaaaatatgctaatataaaactaaagatttagtttcctgtgttagaacaacaaagttatcttgaagtattgatctgttcttaaaactacaagaagtttttatttttaattctaaaatctgtttctttaacagaccatttctattgcttcctgggatccatttactttccctagtttcaggttggaagtcctcttcatgtaaaacgagaatttcatttcttgacatagtcttttccccctaaagcttctcagttttagatttcagaacttcaacttctgttgtatttcacagcacatgatttatagatcatgtatataaatatggatttatagatcatgtatataaatacagacttatccatcagtgccttcagctcttcctccccatgagatggcctggggtgatagctctctctttcaactttttttttatcaactcctataacattttttctcccattacaactctgttgttatggctcgatgctgaaatgtttatcccgaaagtctagaaaacaaatgttctctccagtataattccagtataattgaattttcccttgtaaccaggaagtttctcatgctgttgctttttctatgtgttcccctgctcaggtactagttatcttgtttacatttctctactaatggtttacacttatagccttggacatactctttctctgcctaattaaactcagtgtctttttcatcagatttgacttccagtttatctacatgggcttcccaagaggagacacaatcacactgcaggaggcatttctttaacttttgggtaagtagcctaaaaaaaacaaagattttgtattttattaggataattttttgtgttgtctttatgaggtttttggttacttaggtaacttgagctttgaagaagttaggtccttttaatccatgtaactttccgtattactcttcaagtcttttgatgatcactggttgaatacatggctatatttaatagtgacctgagattctgctttgattagccatgttgaacctttgacatctttggcaggcttcctcaggatcaaaattctaaaataagtctttttttatctagaattgacttagggattttacagttagacccctggaaagcctcaaagaatttatctctcatcctatagagaaaataaatgattaggcttatttggtaaattatatgggaaacattgtcaaataataagtgatattagatcttctttcagttacatttgtgggtatgctattgatatgatgtttcaaagattatataaattcatatcagtctataacgttatcagccataattttggttatgctacatcttctttaaagctatatttgtatggagacgttactgatgtgagtatattctaaagattatgtgaaatttataaaaccctgatggttctgatgtgatgctatcagtcacagtcatgattctgtttgctaccttaaaacactatagtaatttttaaaaagtcaatttccttatcaattgctgattataatgaatttttatcagatgtttaaccatggccattttgtttttgtgacccagagttattgttttgatttttctccaaaagcatttgtaatcagctattgtccaaaattgcttttcatggaagagactcaaacaggaactcttaaatacggtttcccgataaaagatcaatggactcaataaaaaattttcagaactctaataaagaaactgagaaattcaaaaacctccaatcaagctcaagcagaaaagctgacttcatgatattgaagaagtgatgaggggaatatttttatgaattttatttgaagcatcgttcgttcttaaatgttttgtttgccagatttaaggaaattttctctcgtaagtcatctatagtttacagtaatttaatacagtatactttttgtgaacaaagatgaaagcaattattttcccccctacgtgactcctccaaaatttagaaactattcacaagtgttcttatgacgatgtggccatttgtataagtccagataaaaactagttgtctcctcactgcaggatgtaattggaaacatcaggtatattactaaggctttggctgaaataccatatttgaaaaatatacatagaatgcctagtttcagccgggcggggtggctcacccctgtaatcgcagcactttggaaggccaagccaggcggatcacccgaggtcaggagttcgagaccagcctggccaacatggcaaaaccccatctcaatcccgtctctactaaaaatacaaaaattagccaggtgtggtggtgggcacctataatcccagctgctcgggagactcaggcaggagactcttttgaacatggaaggcagaggttgcagtgtgccaagatcacgccactgcactccagcctcggcaacaaagtgagactccgtctcaaaaaaagaaaaaagaatgcctggtttccagggttccttataatgagtaaaaatcatcacttcctggcaagcccagaaaccttaaaactgtaagtaaaagctaaagcctgtcttggtttggcttaccagcataaagaggtattgaagtacgagattcctatgtgatcaatgtacagaggaaaacttatgcttccaaagaaaagctgtaacacacctgcttttagattgtagctctgtgcattattttcaagttcttgttttctacctatagactagatcctgaattcttctagattattccaatccaactttcttccatggagaaaaatgagaactgctctgttcctgaagccctataagctgaagctagataaatgctaagaaacaagtctcatgcttgatgtccgagccagacagaaagttcaccagactgcccaatgccacgactagagacattcaaactgcaaagcaagatgaggaatttcacattttcactctgtagacagcttctcccaagtcatgggaacaagactccatatcataatgggactcttacctgtcctagggcctacagtttttacttagcttcctattttatttattcaattaattgccttgaatcctggattcattatttattcaattaattgcctttaatcctagacattgcataatcctattatgcaaactaggattgtcatgttattactaattttactttttattttccctttttaaactttgtatctgttacttgctgaattttttcagaagtacaacttctaacagaataatgctagcccagcactttgagataatagcaaaagaccacaccacagacaaaattgaacttaatcatttactccaggtagacttagcctgaaagccactgtcttcaaacctcctttgttactcaaatgtggctaaaaggattttgacactgactcctagacatcaatcactccttcaaacatgtgaccagaccagacacctgggacaggcccatccaaatactgagggacatcagaacctaccacagcatggtccatcagtgaggcttccagagaaagaccttgaccaaagggagaaaatatgatgaaagtcgtcagaatcaaaatggagtcccttgtgttaaaaaacaaacaaacaaacgaaactctgacatataaagccagagaaggctgagaagcattctcatgcataaacacctactagcaaaaactatcacaaaagactataaaaaacacagccttgcacaaaggccattgcaaccttacacaaaaaaatacttctgtgaggacagctgcccagcaactgcctgtgcgcctcatactggcatcacccttgttattgatccttgtagccaaagattatttcaaaacgatcatgtaatcgtcctcatttttcctttaaaaacctttgtcgtcttttacctccctgaatatacacatagtttatgatggtacgtgtgctcccactgcagtgcttggggaccaagctccctccacacctcactgttcccaaataaatattttctgttagagcctctctctgttcattatttagctcgacaggtatttggtacagcagccaaaacaggccaagacattgcccggaatcttccagcagtagactgggggcccggatttgaccctggtcagttggacacgggcttctctcactccaccagatgaggaacaaatagtgaggtgtggcgggagcttggtccccaaacagctcctccggccatttgccctccccacccacggaccagagacaggacgagggtgagccccggtgtcagccatgtgccccaaccccggtgcctcatttgctcctaggatgcgtcctgtaggtcatcttcttgcagctgtcccgctcagtctcccctcaacccctgctcatgctcttggtgagcttatcaatattatggtttccaatagcttctgttcatagtttcaactcatatctgtccctaagtgtggacttttattccacgcgttggcactggcagtcagctatgtgcctcctactcaaggcatctgaaactgcaggtgggtagttggctaagtcaggccccaaaagtgtcttcatccagattcccagaactgtgactctgagatcttacatggcaaaagggactttgcagatgagattaagccaatgatcttgagatgaggagaggggcctggattacttgggtggctccgaatgtgggcacaggtgtcacaggagggaggcagagggagacgtgagaaggagaaggtgccatgactccgaagccagaggctcctgctgatcctccggccccacccccaccccacggaccatgtggtctttttaaaacatgaatctatcaggacggcccattcaaacccacagagaggttcccactgcaccaagaacaaagtcagaactctcaggcctgacccactgccctcggccaccctggagccccagtgcccccagacccggtcctggcctcagagtgtaacaggctcgctcccaccacccatctgcatggcaggcgccttgccatcgcctcccctctgagagcacagacagccacagctggcctccgggtgaaaggatggatgaacagtcaggccgggcgagtgctctcagagcctgctggccaacggaggcagccgctcaggcctctgcctgagccatgtgcgatcacagctgctgcccagctgtcccaaggaggcagctcttggcttttcccctgggagtcgaattcgcagggagtcccatccacaggcccctgggaggcgggaagacatctcggtctccaaagccagtaacctgtgattcccctgaggatggtgggaacctggtgtggggcagatgatctgtatttgagctttgtttctctctagcaattatacctaggaaataccctaaaatgcacgacgcaatgcacattgaccccagcaaactccccaccctgcgcctgtttctagtgccggggctgctccagcacagcctgtgcacttgaccgaatgtctacagccctggccctcagccacactgtgttgttttcatgcaccttcacccaacagaattgctccaacagagtgattcagggggctgccctccagcaccacttcccctttccatgttacataaatgtccattgagtcctgactgactacagaaatctgtcttctgggggcatgtgatgccccaggtggcccagggccccgcacaggaatgtgtttacagctttcccggcactgaagccacagtcgtaactcagcctcctgacatgggccagggccctcgcctccgcacgctctgcagctcacccgtgtcgccacagcctgctgggcctggacgccaccctctgaggtggcactcggggcagaaacatctgtttccagctggtaacaaacaggacatgtctgcctcccacacctaaatcaatgcttgacaagcctggcctgatctcggggcgctcaccaccagccacctgcctgggcccagccgacctcctctcccttggtattttgagggaagggtctgagccctttctgcccccctagacttgtggacagaggccccccaagacctggacagaaatcaggccatagtctccagccccaaagagacttccagaggcctgcacctctcctctccagccgaggccctgatgtctgtggctgtggccacagccggctctatacctgccaagtttattctagaaaacattggtttggacaagacctcaaaacggaattgggaaaatgaaagagaaaagagaaaggatttctgctctcattgtaaggacaaaaagcaaattgaagaccagcactgatacagatcaataatcacaccagaaaaaaatatggcaaaatatctatattctcttaaggtgaataagtgttctctcagaatgaggctaaggccaggaacagtgaaaagtaagactgataaatttgcccacaaggaaaaaaataaagtctctataaggacaaagccaccaaaaacaaagtaagcaccccaggaaagaaagtgaccaaagtatctaacatgaaagagagcctgtattcgcatgagctcccgagaaacagaacccatagatgtggatgtggatatcgacagaaataggtatcaacatagacacaggctatggccacaggtatggatagagggagagatgcgagagagagattttaaggaattggctcacacagttgtggagacgaatgtccaaaatctgcagggcaaaccagcaggctggtgacccagagaagagctgaggctgctgctcccgtccaaagttcagcctgctggcagaattctgtcctccttggggactgccgtctgttttctcttaaggcctccaactgcctggatgaggcccacccacattatggatgatgatctgccttacccaaagtccacaggttgaaatgttaataacatctaaaaatcacctgcactatctagactggtgtttggccaaatatctgggtagtatggcctgcccaagttaacacctaaaattaactatcagagtccaagtaagtgaatgtaaaaaacaaacaaacaaaaaaaaaaaaacatgatgaatgagacaagctcgaccttgaagaagttttcagtggaacgtggggaagaggagttctctttagccagctgcagacacaaatagccaatagaacacatggagagtgttaaaagtcacaaatcgtcaatggaaagcaacttacaatgtgatgttcattgaacatctactgtgtgccaggccaagggctaaggtggacacgtgcagtgtgtctgcactgcggcactaaggtcctggtggggaatggataatacaattaaaaacaaatcacaaagaaaccagaagaggaaaaaaagcaattaaaaacaaataaatgctccataaaggacaacagcgccagctgagggtgtggccatcaatgccaggcatccagaatatgtccttggggacatggaccactgggaggtgcatcccaggcaaaaggagcaggaggggaagggtccaggccagaaacatgcttgccaagttcaagagcggtgggaaggccagtgggcttgggaaggagtgggctggaaggacaggccagaggccagactgcatggggccagactggccctgattccagccttggacttcactctgtggtgataggagaccctcagagggacttggggaggggttgtgtgttttcctgggagccacagaaaagtgagtgacactgggctgaggaaggaagtcacaggacccaccagtgtctgcgcaggagtcccagtggaagagcagaaaaaatccaggagaagatacaaaagtattcaaaagtaattcaaaatagcaaaaatccaaaatattcaataatttaaatggtattacttaaaatagtattataaataataaaaatatattattaaaaataatagattactggctttaataccaatgtacagaaatccgttttatttctatagaccagcaacaaacggaaaatgtgattcttataaagatgccagatgtctgcttctattaagggcatacagggaactcggaccagttagcaaatctgaaagaagtattttaaaaatctgtttgaaggtaatggagagataccagagtggtgaataatagccaccaaagtagctgccatttgcagtcacttccccctgagcccctccccaaaagcatttgctgattctgggatagtcagtgagaagctgagcagaaatcctgacaatcttagagctagggagaaaaactcagaggccaggactcaccaggagaaaggcgcttgggaagtacatgcactttggattagaaacccatggactttccttataggagcaaaggtgaaggaaatcatccctcacaggaactgcaaccagatgcactttattcaggtccttagaaaagctcaacctctaccactgggttaagttgatctcagattttgaattccaccaggaaccagccagaagcatatgaaaaccgtctctggaaaattataacgtcattttaggttcagttgctcaacccaatacttctgaatacagtatccagcacacaatcacaaagaaccacacatacaagtagacgaagcaacatgagtaagaacagcaaaaacggaagatcaacagggactccagacctcagctatgggaattagcacatgaagactttcttaatattttttatttcaatagcttttgggatacaagtagtttttggttacacggatgaattctatagtggttaattctgagattttagggcacccatcatccaagtagtgtacactgtacccaatatgtagttttttatccctcacctcccccacccacttgtaatcccagtgctttgagatgccaggaggtttgggaccagcctgggcaacatggcaagaccctatctctacaaaaaatgtttaataattacctgggcatagtggtacttgtctgtagcccccactatctgagaggttaggtgggataatcacttgagccagaagtttggggctacagggagctgtgattgaatcactgcactccagcttgggtgacagagtgaggccccatctctgaaaaaaaataaaaataagtaaaattttaaaactgataaaataacagtgctactaggtttgaagagtttaaacacaatctgaaaatttcatcataaattgaaaactataaaacacacatagcagatcttttttaattcagaattttagaacagaagtatacaatgaagagctcaaatgatgggtttaagagcagacttaacacagctgaagaaagaattagtgaatcagaagttggatcagaagaaaatatctagaatgaaggatagacaaaaacacagcatggaactggagggttaaaagaagagagtatccaccgataaggtctaacatataggtagttagagtcccagaaggagaagtgagaaggaagagaagaaacatttttaaagaggcaattgcagaaatcttcccaaacttaaggaaatatcctaccccatcattcatatggaataaaatacgtagaaaatctcatctaggccaggcgtggtggctcatgcctgcaatctcagcaactttgggaggctgaggcaggcagatcacttgaggccaggagcttcagaccaacctggccaacatggtgaaaccctgtctctagtaaaaatacaaaaattagctgggtgtggtagtactcatctgtaattccagctgcttgggaagctgaggcaggagaatctcttgaacccgggaggtggaggttgcagtgagccaagatcgcaccactgcactccagcctgggtgacagagcaagactctgaagaaaataaaataaaataaaaccacatctatccataacattataaaactcctgaagactaaaaaaaaaaaagaggctatcttaagagtagccaaggtcggggaagctcacaatacctttaaaggaggaccagtgaggctggcagctaatgtcgtaacagaaacaagaacagaatgagatgctgtcttaggctggcagctaatgtcgtaacagaaacaagaacagaatgagatgctgtctttacagtgctaaaagaaatacctgctaagccagggaaactatctttggaaaataaagatgacttttctttttctcttcttttcaattttcattccctagggctatcctaacaaggaccgtaaagaacagaagtgtattcttgcacagctctggaagctggaagtctaaactcaaggtgtcaggagggctgggctctctctaaagcctctagggtaggatgcttcttgccccttctagcttctttttttttttttttttatttctaaaacgactttattgctaagaaccatgattattacttaaaatagatttttcagttactgatataaaatatgttccttttgagaacacatggacacatagaggggaatgacacacactggggcctattggagggtggaggccgggaggagggagagggtcaggaaaaataactaaggggcactaggcttaatacctgggtgatgaaatcatctgtacgacagatccccatggcacacgtttacctgcgtaacaaacctgcacgtgtacccctgaactcaaaataaaaggttttttaaaaaatgttctttgtgcttctaaaaatgtctaaataatcctatatgcatttttcttatttgcctcttatgcgtagcttacagatttaaaagtacaatgttgcttgttttgtattcatcttggtggatctaataatttacaaataggacataggcatgctgatacagtcagcagttaattcctccttctgacagtggggtttggacatacaaccagcaatgcgtgcaggtggagagacatagaggatctttttttttttttttttttttgagatggaattttgctcttgttgcctaggctggagtgcaatggttcgatctcggttcactgcaacctccgtctcctgggttcaagcgattctcctgcctcagcctcctgagtagctgggattacaggcatgcgccaccacgcccagctaattttgtatttttagtagagatggggtttcaccatgatggtcaggctggtctccaactcccaatctcaggtgatccacccgcctcggcctcccaaagtgctgggattacaggcgtgagccaccacgccctgtacgaagttttaggtcatctgtgattcacaaacgaccggcttcgagaagctctggaacgtgccaaacaaggcactgtggagtagtttggctccatgtgacctaagagaggaaaatctgttgtctttgggaacattacacaattcaggtaagatatgtgcatattctcaagggaaatttaaggtgctcatactcaataaataaacacaagagcagcgttacagataatattcaaagagacagaggcttcttcatacctgatgtggtgggaagaccactggatgactggacactgagatacgtggttgacagtctcgtctctgaaacacatgatttgagttttgagcttagacaaacttgtttttctccagcatcagttttttcatcagtaaacaataataataatactgtgtttatgccaacatcattaggaagatcactttaaatggtgtatataaaaggatccatcaactttaaagccagtacccaatatacactcatagatatcagcgtattacagaaaaatagtatttattttgtggtcaagcatatctggattctaatcccaattctactaattgctcccttatcttttgtgtcccgtgatcatcaatgtttttatcattagaatcttgataatatctagctcaccatgtttttctggaaattatatgagataacatatgcaaaggacttagtgcagcaccagatgtgactcttccagctcctgtggttgccgactgccctgggtgttcccgggcctgcagacgcatcgctccagcctctgcctctgtcttcatgcagtgttctccctgtatctgtgtctaaatgtttctcttcttataatggcactggccatagtggatctaggacccactctactgtagagtggcctcatgttatcgtgattatatctgccaagtccctctttccaaataaggccacattctcaagttcttggtggacataaatttgggggtgactctattcaacccagtatactttctcttcctgagaagagcagtttggactcaaagctgttcggtgggcagatcaagggttggggggtgtctgcatggtgggggtaggaggagagatgcaggggcccagagcgggaagccagtgtggagtccaggctcggagcacccacatgagcagaggtgggcagcctgatatagaaagtcagatcttaagtggggtgagaagggttccagatggggaggagtgcacactagaatggagggggagccagaatggcagaggggaagggagtactggcagagagggcaggttggtcacacaaggggattggtcaagtaagtaaatacaccgaaaagaatagaaaagagagaaggcagttccaaataccaaaagggagtgatatggtttggatctgtgtccccacccaaatctcatgtcgaattgggtttcaatctgtgtccccacccaaatctcatgtcgaattgggtttggatctgtgtccccacccaaatctcatgtcgaattgtaatccccggtgttggaggtggggcctggtgggaggtggttggatcacgggggtgggttctcatgaatggtttagcaccatccccctagtgctgttttccttatagagtcctcccgagatctggctgtttaaaagcacgtggcacctccctggtctccttttctcctgctccgggaatgtaagacatgcctgcttcccttcaccttcaccttccaccatgattttaagttcctgaggcctccccagaagccaagcagaagccactatgcttcccggacagcctgcagaaccgtgagtcaattaaacctcttttccttataaattacccagcctcaggtatttctttatagcagttcaagaacagactacagggagaaactggaatgaatcctatggtactggattggaatttgatccgtaagtttgaattcatggtttctaacataaatagccattatataggagttgtcctgatttgtagaaaacacactaaaatattcatgaaggaggaggtgtcaggtcaaaaaaatactctcttgaatgattcagataaaaattgtttgtacttttcttgcaacttccaatttttggctgaagctaaagaaatattttcagacaaaacagaatatttgttgccagaagacacacactaaaggaactgcttaaagataggtttaagaaagaaggaaaatgatcccagaggaagcctcagagatgaaaaaaagaatttaagagtgtaaagtacacaggtgagtacattttaagagttattaactaataacaatgatgatgtgatggatagtgaggatagaaaattaaaacaattcagatgcatagcaataacatataagtaatgaagggctaataacactgcatcatcatatctgaaaagaagatcaaagaattagtgacaaatttcttgataaatttaactaatagaaaaaaatgcaactgtaagaaagtccatccaaagggaagcaaggaaaaagggataaaagaagaccaacaaggacagcattatctcacttatttgtggaatcttaaaagagttgagctcataaaagtagatattagaatggtggttaccagaggctagaggcagagagggagagaatggagcgtggttggtcaaagggtacaaagtctcaggtagacaggaggaataagttctgagatctattgcatgacagagtgactatattcagtaataatgtatattttgagataactaagagagtaaattgaaagggtctctccacaaaaaaataagtaaatgaggtaacagatatattaattagcttgattcaatcattccacgttgtttacatgtatgaaaatattgtggctgggcacagtggctcacacctgtaatcccagcactttgggaggccaaggcgggtggatcacttgatgtcaggaatttgagaccagcctggccaacatggtgaaacctagtctccactaaaaatacaaaaatcagctgggcgtggtggcacatgcctgtaatcctagctacttgggaggctgaggcatgagaatcacttgaacccaggagacagaggttgtagtgagctgagatcatgccactgcactccagcttgggtgacagagccagactctgtctcgaagaaacaaacaaacaaacaaaaaacattgcattgaactccataaatgtatctaattatgatttgtcaattagaaattatattaattttaaaaccacattgctagataggagatttaggctcaaatatatcagtatttacattaaatgtaaatgggctgggagtaatgtcactgaaaatggcagctccaaaaatgtgtcccttcacgaaagcaacaattaagctggcaaaaaactgacagaattcattttttcataactctagaatataaccaaaaacttaaaacaaagggtgcttaatgaagaaagaaactgctaaatttgggtaagagagaattgtggaattttcttacctgcctataaagccctcattttccagctcagaagtagccagggcaacagcagcccatcttcccggtgtggtttgctggtgccagagggagtaaaaaagccgttgtcatcaaagaattgtgcttgcgaatctcaacctatctgacagctctctgagggatcagctcaggatcttgcctttgttttgctcaccctgctcctgcccttcctcccctgtgtcctacccccaacaaacacacacagaattctctacaggatggaacagcctcctgggcagcatacatggaaagtatttaaaggtatatacttgtcacaaccatctaggtcaacagataatagaaagggaaaacagtagacaggctaaaacgcctaggaagaaaaaggctaaggaaggaaacgtggggaaatgagaactttaaaaaactcccacatatactaaggaattcaaacagccacatgtatttctagatgtatgctcagataagacctgagaagaccctaagcttttacctctggctggtcattaggcttcacatgagcaggaagtaaaggctaaggcagagttgtaaatgacctggttaagtgttgcagcagtgctctaacccagagccagcctgcaaagaacaggagggtcttcttcctctttctttctttctttcttcttttggcttaagaaatttaagaagatctgtgaaaacactagctgaccactaaactaacataacaaagatttcagtggccacatatgacaaaagtcttcacaaaagtagtttagacaagtcactaaacaactataacacaaaacaagcagcaataacaaaccctagggagaagaaagaatctagtttcccatattataatatttattcaaattttccagtttttaacaaagaagtatgagacatgcagaaaaacaagaaatatgaccctttcacaggaaaaggtaaattaacggaaacttcccctgaggaagcccaggctgtgaacttactagaaaaaggccttaaatcaactgtcttaaatattctcaaagagctaaaggaaaccaggagaacaatgcctcagaactagtgattatcagtaaagagatagaaattataaaatagcgccaaatagaattcttgaaatgcaaagtactgtaactaaagtgaaaaactcactacaggttcaagaggaaacttgagcaggtagaagaatcagtgaacttgaaggtaggccaattaaaattctcccaactaaagagcagaaaaaagataaggaaaatgagcttaatttgaacaatatgatcaataaatttgatctactaggcatatacagaccttagaaagagcagctacagaatgcaccttcattttgagccaggtggaatattcacacattataccatttatgaccacaaaggaagatttaacacattttgaaaggctaaaagtatttagttatgatgtgatcacagtgctaagtcagaaataaataacaaagaggtaagttaaaatacacatatgcttggaaaataagataaaaactgctaaataaccctgaagctaaagaagaaatcataatggaaacattaaaattttaaaaagtttaaaatatttttaactgaataataagggaaatactacatatcaaaacatggtgagatgcagcctaaacagtgcttagaggaaaacttatagccttagaagcatgtattatgaaagataaaatcctgaaagttgatgaactaaaaattcacccgaagaagttaaaaaagaatgtaaaaccaactgaaaatagaaggaaagagatcattaaaataatataagaaaatgattgaactgaggataataaagcaaagaaatgatcaaccaagtgaattaacaaaattgataaatctctgataacacttgttggggaagaaaagagaaaatgcaaataactaatgtcagaaataaaaagggacgacacacacatcctgcagatgtttaaaatgtaaaaaagaatatttgggaaagctttaagctactaagtgtgaacaattggatgaaatctaactggataaatgtaagtatttaaaaagtttaatctacaatttataaccttaccccagagaaaactgtgaaccagacatgatttcataggggatttctgatcaatatttagggaaatatcaacactcttagacaaactcttccagggatctgaagaagagtccatgccctgtaagctactgtatgaagccagtgtaatctgagttccgttgggactgcaaccgataaagtaattcatcacagaaatgacctcaggaaactggccttcagaacgggcttctgggaagttgtctcacatatttgaggaccacaggcataattcattgcccgcaggaaatggggcagccatacatgacatgtggtggcaccatgatgtctcagactgtcactgacaggagtgcatccaaagtacaaggagagaaaaaggcatgggcaggtcaagatgcagtagcactttgttgtcatggcaacaagagggctgctaaagattatggagtcaccaactttttctcatgaccatagagagtgtacacaggggaaaagaaacagtgaaagctatgaacatagcaaaaagaacatatacagagagccatggacgcttgaaggagtcccttacctcctggtcatgggtcagatagagctgatacccaaccaattcactacagatgaaagtcttagaaattgtggggctacaacatgcaaaggtttatcatcatcccacataacactaaacaggaggctctaactgcattcttgttggacatgtatccaatttcagaatagtgttccaagaatctgcctcctaggaccacttttgttggtgtcagggatccccagaagctgatcttgagagaatattttaagtggacagtttgtttgagaggtgatgccaggaaacactggtggaagagttggggatgaaaggaagccaataaaaagtgcactaataagcatgttaccatggaaataactgtaactgaaattcaccagggccctcaggaagccagtgtcaaacaaacaccttctcagtacgtccccccaacacacaccagcagcaagggagtttggggtatttatatgctaacttattagtcattggttgatggcagtttgtgcagagcaaaatcctgtgcaacttcaggcctgttgtgcacagaaaccctgactaccagagaaaaccctcaggcaagaagatgcagatgctagcagtttgaggttacaccagtatacactaaagtgtaaaggcccaaggcacctggagtgcaccaaaaactattgccacaggtgtacaaatgttcaaattaacaagaaaatgccatgtcatcctccaaagtcatggcaccaattcacattcccatcagcaaatctgagaccttatccaataccaatatcctgacctgaaactagatcatcatttatttgcatctgtgtttccttcttttatgtatccttttgtctcttgatcagagttagccacactctttattttgtatgcatcattccctccctttccataaaaaaaatttatcaaatatggccgggcgcagtggctcccatctgtaatcccagcacgttgggaggccgaggcaggcagatcaccagaggtcaggagttcaagaccagcctggccaacatggagaaaccccgtctctactaaaaatacaaaaattagctgggtgtcatggcacacacctgtagtcccagctactcaggaggctgatgcaggacaatctcttgaaccttggatgtggaggttgcagtaagccaagatggcaccactgcactccagcctggatgacagaggcagactgtctcaaaaaaaaaaaattatcaaatatgtatgtatatctgaacttgtctgattctgtttgcccttgagctatgtaaaattatatcatactatatgcagttgtctgcattggcattttttaccaatttttttacatcttgtttccaagattcatctatgttgttgtggggagttgtaatttattcacttttactgctgtataggtttccagaatttattttccttggataattgtttcaaaatttttctattattagctgccttactattgcattcttgttcctgtctgttgagatcctgttataggctgaatatgtcctcacctctccccaaattcatatatggaagccctaatcctcaatgtgatggatttggagatggggcctttgggaagtgattagtttttgatgaagtcaggagggtgggcgcccacggtggtggtggtcatgagggtggtcctcataggaagaggaagaaacggaagagcctcactctctctgccatgtgaatgcaccatgagaaggtggccatcttcaagccaggaagacagccctcatcagaacccagccacgctggcacccagattctggacttccaacctccagaacaaagaaaactaaatttttgttgtttaagccacccagtctatggtatttttgtcaggacagcccacactaagatggatactagtgggagagtttctctatgaaatatgcacaggagtggaagtactgaggtatagaatattatccctatttagttttctggaaagtgttttatcaagcatgttaccatgacaattaactagagtctaacacctctggggaattttgattatcgttgtagaatatatgccttagaattatcaccagggacaagtgacctcaggcatttacacacacaagctcccatcagccatgggttaagagctgctccaatgagtactaattcctggcacttctgttctgtattcatttaggctctggaagccacaggaagcaatcagacaaaaagtttcaggtgtcgtggctgggcatagtggcttatgcttgtaataccagcactttgggaggctgaagcaggaggatcacttcagcccaggagttcagaaccagcctgggcaatatagtgagaccacatttctacaaaaaatttaaaaattagctgagtgtggtgatgcatgcctatagtccctgttactcagtaggctaaggcagaaggatcgcctgagcccaggaagttgaggttgcagtgagccgtggtctcaccactgtgtgcattccagcctaggtgacagagcaagactctctctctctctctctctctctctctctctctctatatatatatatatatatatatatatatatatatatatatatatatatatggctgggtgcagtggctcatgcctaataatcccagcactttgggaggccaaggcgggcagatccctgaggtcaggagttcaagaccagcctggccaacgtggtgaaaccccacctctactaaaaatacaaaaattagccaagcatggtggcgcatgcctgtagtcccagctatttgggaggctggagtaggggaatcattgaacccagaaggcggaggttgcagtgagccaaggtcatgccaccacactccagcttgggcaacagagcgagactctgtaaaaaaaaaaaaaaaaaagaaaagaaaagaaaagaaaaaagaaaaaaaaaggaacacagaaggcacaaacagcatccactacagtcacccctcgcatgtctaaggtgcacttgcaccccacagtgatgtcaccacttcctattatttcctctgaaaatgaacccattttgagatgggcttgggccagaattacccttacccactgatccctgtaaacactcactctaacaggtgaggagtgaagagaatagggaggcttctatggtattctggtccctcaattcattatctgggttcgtggaacaactacagattctgctgttgcaactgatcccgaggccttcattggcctttgtcatctcccttttggagataggtttctaagggtttcccttgaccatggcaagaacttctgctgggctatgctctatgcctggtgggatgatccaaacctccattttctgcagaattacagaccccaacaaaaatgtccttattccaggtcttgaggtcccactccttcattattggggtgctttccttagtggaagagaactttgagctcctggattcagccttctttgtaatcccactactcttacaatcaggttctgggcccaattttcagtagtttcttctccagctgcaggagatggagttttttctaatgctgtgatgaaggttttctgaaatttgcaccatttcctgagttgaaaggggttcaactgagcctgttgttatatttcttcagtgattcaatttcactaaacaacaaccaaactattccaccattcttatgatcctgtctttctcaaaggccagagaaattacataaggagcacatcccccaacactgtaacactttctatctatgtcccattatcataatgccaggagaagttatttacaaagggttatttacaaaagtgcaagtgagatgtaagagaaccactagggatagtgcagtaagccaggttaggtaacaggagggctgttgctgcccacaaaaccaaatctcaaggtgttttagacaagacacaaactgtaaaagacttattggtaaatttaactatacaaaaattaaaaagtcatgtccatcaaaagataaagaaagtgaaagacaagtcacaacccgggaaaatacatatgcaacacctaaacttaacaaaggaatattatcaaaaatgtgtaaactcctacaaataaagaagaaaaggataaatatcccaatagaaaataaaggccaacagcttaggcaacatggcaaaaccccatctctacaaaaaatacaaaaattagctgggcatggtggcacacacctatagtcctagctacttgggaagctgaggtgggaggatcgcttgaccccaggaggtcgaggctgcagtcagccatgattgtgccactgcactccagcctgggagacagagtcagaccctgtctcaatcaatcaaccaatcaatcaagtaaaataaagaccaaaagacacgaacaggtatttcagagaataaaaaaaatacataaggccaataaacagtttagaaggtgtcagcttcactagcaatcagaaaaaaagtcaaatcaagagaagaatattcaagaaatcatgttagcaaaatgatgttggcaaaaattaagaagttgaaccataatcattaagacatagattcacagcctccaagtacgaatgatcctccgacctcagccccccaagtaactgggactacaggtgcatgccaacatgcccagctaattttttttcttttttgtttttttcatttatttgtagagactgggttttgccatgttgcccaggctagtctcgaactcctgtgctcaagcaatccgccccatcttggcctcccaaagtgctgggattacaggcgtaagccaccccaccgggcccagaatgctttcttaatctaaaaactcccctaagtggccaggcgcagtggctcacgcctgtaatcccagcactttgggaggccaaggcgggtggatcacgaggtcaagagatggagaccatcctggcaaacatggcgaaaccccgtctctactaaaaatacaaaaattagctgggcatggtggcgcgtgcctgtattcccagctactcaggagactgaggcaggagaactgcttgaacccaggaagcagaggttgcagtgagccgagatcacaccactgcactccagcctgggcgacagagcgagactccgtctcaaaacaaaaacaaaaaccaaactcccctaagtagggctattttcctgtccctgatgccaccttgacaacataagtcaaccactgttccacatttgtcttttaggaacgccccaggactgttggctgctgtccatggtgctgccttggtcagacacgtggtgtccaagctgctgtccgtggttttgctttcatttttctgtgtagcataatgatttttttgtttatttctttgtttaattaattgattttctctttttagaacagcgctaggtttgcaaacaaattgaacaaaaagtccatagactttttacatacccagcgcctctctatacatatacagtgtcacctactgtcattgtgcatctgtatggcacatttgttacaaatgatgagtcgatattgatacattatcattaactgaaatccgtagtttaccttagggttcactacttgtgttgtatagttcatgagttttgacaaatgtgcaatgtcacgtatccaccatggcagtgttatgcagaatagtatcccctatatttcactattcattcctgacccctcaccccaaaccctggcaactgctgatctttctactctctctgtagttttgcctttccaaatatatagtttggaaacgtacattatttagccttctccaactggctgctttcacttagcaatatgtatttaagattcctccatgcgttctgtggtttaatagttttttgtttttgttttttgtttttgatagggtcttcctctgtcacccaggctggagtgcagtggtgcaatcatatttcactatagcttcagcctcccaggctcaagcgatcctcttgccttagcctccaacacagctgggattacaggcaccaccatcatgcccattttttaatttttcatagagatggtatctggctatattgcccaggctgatctagaactcttgggctcaagtgatcctcctgtctcaacctcccaaagtgctgggatcacagtgtgagccaccatgcctgcccttgatagctcactttttattgctgaataatattccactgtccggatgtaccacggttaactgaaccattcacctgtgaatggtatcttagttacttccaagtttggcaattgcgaggaaagctgctataaaagctcacgtgcagatttttgtgtggacataagttttcaactcatttgaataaatacctaggagtgtgattgtatggtaagataagatttagcttttaaaactgtcaaactgtcttccaaagtggctgcaccatttgtattcccaccagcaatgaaagagagttctttatgcctcacatcctccacagcatttggcgttgagagctttttgtttcatttgttttctttgggattttctccattctagtagctggtcgtggtagctcattgttgttttcatttgccatcccaatggcacaccacgtggagcatattttcatgtgcttatttgccatccgcaagccttctttgctgaggtgtctgttcagatcttttgcccatgttttaattgggttgcttgttttcttattgtttaaatttaataatggttctttaagtgttttagatacaagtcttttatcagatatatattttctcctcccagtctgtggcctgcctttttcattctcttgacaatgtctttcacatgtagacattttttcattttaataaacctcagttaactaatttttctttttatacaaattgtgatttttgtgttatatctaaaaactcattgccaagcccaagatcatctggattttctcctgttatcttctaaaatttcatagttttaggctttacatttgggcctatgatccactttgagttgatttttgtgaaaagcataaggcctgcgtctagattcttttttttttttttttttttttttttgctttggtgccatgtagtgaaaagatgacgctttctccattgaactgcctttgctcctttgttgaagatcagttgactatgtttatgggcgtctattatcagaaaattttgttctatggatttatttgtctatcctttcaccaattccacactcctgattattgtggcttcacagtaagtcttgcataaaagttgggaagagtcagtcctctaactttgttcttcttcaatattgtgttgtctcttctgagtactttcccttcccatataaactgtagaatcagtttgccaacatccataaaataatgtggtgggaatttgattaggattgtgttaaatctatatataaagttgggaagaactgacatcttaagaatattgtttttcttttcatgaacgtggaatatctctcgactgatttagatcttctttcatttcttttatcacagttttatagttttcctagtatatatcttgtatatgttttattagatttatacccaagtatttcagtttctggtgctaatttaaatggtattcggttttccactttaaatcccaattgttcattgctggtatatagggaaaaaatggcttttgcccattaaacttaacgtccttcaaatttgcttttaggccattcttgcgttgctataaagaaatacttgaggttgggtaattttttttttttttaaaagaggtttaattggctcacggttctacaggctgtacagaaagcatggcagcctctgcttctggggaggcctcaggaagcttccaatcatggcaaacagcaaagggagagaagccatatcacatggccgaagcagaagcaagaaagagactctgtggagggggaggtggcacacacttctaacgactagatctcgtctgaactctgagcgagagctcactcatcaccaaagggctggcacaaaccattcatgaggatctgcccccatgatttaaacacctcccagcaggccccacctccagcattggggattacatttcaacatgagatttgggtaggaacaaatacccaaactatatcattgctataatcacttattagttccaggaggttttttgtcgattatttgggattttctgcagagatatcatgtcatctgatgacaaacgcagcttcatttcttctcctccaatctgtatatcttatacttgcttttcatgttttaatgcattagctaagacttccagcatggtgttaattgggactggtaaggggacctactcacctgttgcttctcaccatgaagtacaatgttagcagtaggttttttgtagatgtcctttataaatttgagagtattcccctttattcaaagtttgctgagagtttttatgataaattgagttgtattttgtcagacacttttttgttatctattgatatgaccacatgagttttcttaatcttttgaagagatggattatattaattgacttttaggtggaaagcttatattaattgattttgaatgtccaatcagccttgtttctattactgagagttctccagattaacagaaccaatagaatagggtgtgtgtgtgtgtgtgtgtgtgtgtgtgtgagagagagagagagagagagagacagagagagagagagaattttaaggaattggctcacatgggtgtggaggcctgcaggtccaaaatcatcaaatcggtagtgtggaacctgacctagggaagagatgatgttccagcttgagtccaaagatcttctggaggcaaaattccatcttcctcaggggacctcaatctgtcttttttaatagtcttcaactgattggatgaggcccacccacattttggaggatgatctgctttacttaaagtctaacaacttaaatgttaatcctgtctaaaaaaataccttcacaacatccagactgatgtttgaccaaatattgggttccaagacctagccaagttgacaagtaaaatcagccatcatatttgcatacctgggataaatctcaatgggtatattattttttatacatggttggatttcatttgctagtatttcattaacattagattttacactgtcgatattgaaggtaagcaatctttgaaaaagactactagaactcacccatagctgtttttctccttcctttgactcctgctagactgtgtttcccagtgccatcacatgtggatggagacctgttaccagttctgttcaatgagtaatgtgaataagtcagacagtactttgaagagttgtgatgctgtaacaaaaaataatattatgtggctcatgcctgtaatcccagcacttcgggaagctgaggcaagaggatgatttgaactgagtaattcaagatcagcctgggcaacatagcaatactccatctctagaaaaaaaattaaaaattagccaagcatggaggcacatgcctgtagtcccagccaccagggaggctgaggtggaaggatcacctgagcctgcagaagcagagggtgcagtgagctgagatcataccactgcaccccagcataggtgacaaagtgagactctatctcaaaaaaataaaataaaaaacttgccttagaatatgagaagcagttagcaaggaagctggtgtcaggctggaggactgcagatccttgtcatgccttaataaatcagttgttaacatttggaaggcagagtccctgcctattcagcctgcagctctagggtaagagattgcaaaatcaagtattaagagtttgttggctactattagctcccttcattaattaactagagaaaagaggttaggtcagagaattggtggctttgtaagcaaaaattttaaaagaatagagaaaatccaaaacttacaaggagggagtggaaaagctggcttcttctagaacccaaacaagacaggacaccaagaaaggttttagatgacgaggatggccaaggtgtgatttgcagtgtggccttcccatccatggcctctttcacagataatctaatttttaatttattatttttgtggatacataataattatatattaatgtatttatggggtacacatgatattttgatacatgcctagaatgtgtaatgatcaaatcggggtagttaaaatatctatcacctcaaaatttatcatttctttgtgttggaaacatttcaaatcttctcttctagctattttgaaatatacaataaattattgttaactatagtcaccacactgtgctgttaaacactagaacttattccttctaaccaactgttttgtgtgtgtgtgcgtgtgtgtttttttttgagacagagtcttgctctatcatccaggctgaagtgcaatggtgcaatctcgactcactgcagcctccgtctcccgggttcaagcgattctcctgcctcagcctcccaagtaggtgggattacaggcacatgccatatgccctgctattttttgtacttttactagaaacagggtttcaccatgttgtccagattggtctcgaactcctgacctcaggtgatccacccacttcagcctcaaagtgctgggattacaggcgtgagccacaacacccaacctacccaattgtatttttgtatccattataccaacctctcttatctcctccccacagcagtgatccttcccagcctctggtaaccaccattctcctctctacctctatgagatccacatttttagctcccacatatgaaagaggacacatgatatttgactttctgtgcctggcttatttctctttaacataatgacctccctttccatccatgttgctggaaattataggatttcattcttttttatggctgaatagtattccattatgtatatataccacattttctttatccatttatccattgatggacacttaggttgataccctatcttagctattgtgaacagtgctgcaataaatatgggagtgtagatatatctccaaaatattgatttcctttcttttggatatatatgcatcagtgaaattgctgaattatatggtagttctatttttaattttttgaagaacttctacactgttttcaataatggctgtactaatttacattccaactagcagtgaatgagcattctcctttctccacatcctcatcagcatctgttcctttttgtctttggtaataactattctaaatggggtaagataatatctcattgtgatttcgatttgcatttcctagatcattagtaatgttgagcattttttcatgtacatgttggtcacacttgcatgtcttcttttgagatatgcatattcatgtcttttgtccattttaatgggatttttcttgttgtggagttgaattccttgtatattctgaatattagtcccttgttggatgaattttatcccatcaaaaagttgactcttcactctgttgactgtttccttgctgtgcagaagctttttagtttaatatagtcccatttgtctatttctgtttctgttgccagtcattttgaggtgttagccataaaatatttgcttatgacaatgtcctgtagtgttttccctgttttcttctagtagttttataatttttagtcttatgtttaagtctttaatacattttagttgtttttttaattcagtgagagattgggacctagttttattcttctgcatatgaatatccagttttcctagcatcatttattgaagaggctgtcctttcccagcactttcattgaaaatcagtaggctataaatatgtggttgttttgtttctaggttctcaattctgttccattggtctgtgtctatttttataccaatgtcatgctgttttgtttcctatatcctcatgatatattttgaagtcaggtagtatgatgcttccagctttattctttttcctaagggttgctttggctatacaagctcttttttggtttcataataattttgggattgtttttccatttctttgaaaaaatgacattgatattttaatagcgattacattgaatctgtagattgctttggatagtatggtcattttaacaatattaattctcccaattcatgagcatggaaggtctttccatttgtttgtgtcctcttcaatttctttcatcagtgccttgtagttttccttgcagaagtctttcacctccttggtgaaatttatttatatggatttttgtagctattgtacatgggattgccttcttggtttctttttcagctagttcattatcagggtatagaaatactactgactttcatatattgatttgtatcttgcaactttactaaatttatttatcagacctaagagtttttggtggagtctttgggttttttcctttcagccagtatatatcttttaagtggaaaattctatctgtttacattcaaggttattattgatacgtggggacttatttctgccattttgttggttgttttcttgttgttttgtctatcctgtgttcctttctttctctcttattgtttatcattgtggcttggtggttcctgtagtggtaacatttgtgtcttttctcttcctctttttttgtatttgccgtgcggctgtaagttttatacatttatgtgttttcacgatggtagagatcatccttttgcttccaagtatagaactcccttaagcatttcttgtaaggccaatatagtggtgatgaatttccccaggctccagtggctcacataggtgctggctgtggtgggcaggatgggatgatcctttgccccacccagtaacagtagcagtgtgacgggagagcctgtcctcagggcatgtgaagtgcacagtggccctgctatggggtcactgcccgtggcatgtacttcagccctggaagcagcagcagcttcatcatagcttatttaattcagcggaccaagagcataaacacctgagcttcctctttttatctgctcattctgcttcccaagttctcaaggacttatgtggacagtcttcccgcacttgccaaaaactcagttcattctgttataaatctcagtgcctctacctgctacagacacggagctcaccccgtcagtggcaccccttctgacccagaagtgtccctaggtgtcttcgtggcctctgccatgggtgctggtatgccattgtgggaggtggggggcagtgggagtcaggaggttgctcctctgggtggagctgcctgccaatcaagatcctgactctacctccaccccatgtgaccaggctgcaggggcaggccttagtgggcaccggtggtgccctggtcacaagacaccctggaggtgaagggggccttccaattctaaagctgtagctgcagacttgggcagtgcaaatcctgtcaggaccaaacaccaaattctatcacccactcaagcttgaagttaagtgggagggagagagtccctgcaggacccttgctatagttggatgtttgtcccccaagacttcatgttgaaattcgacccccagtgttggaggtggagcctggtagaaggtgtttggattttgggtgcagatcccaaaatgctctcctttgagggtgagttctcactcttattcctgctagagctggctggtgaaaggagcctggcatctcccctctttcttgcttcctctctccccatgtgatctctgcacataccatggttcttgtacagcctgcagaaccatgagccaaataaacctcttttctttataaattacccagcttcaggaattcccttatagcaatttaatggacaaagacaacacctgacagccactctcccacatgcctccagcaatgctctgtgggtttgcacctccaactaagtcatttaggcaggatttaatggaaggacaccttgctgacacagatctgggctcagtgcaagagcccctgggacactgaggactccagagctggctccggcagagtgaagagtagcagaatatgccactttcaaacaagaataattttgagccgaagacaattaaaaagaagcatacccaagaaaaaaatccctgcccactccctttctaccaggaaaagcagaggattcttagtccttggagacaactctagatgcttatcagcccagagaaggcactagaggaatctacacaacaaactagcaagctatcttctgttagcttcccctatatatttacttcccagaatttgctgccctacaggttgaaagcccctttcctttgtcttgccaattctgtaaaaatgattgcccatttgctaagatgctccgtaagctcacgttccaaccgcccctttgaattcctcatctctgacggctcccacatagaggcataatgcacatgttagtaaacttctgtttgtttttctcatgttagtatcttgttaatctaattgacaagaccccagctaatgaacctaagatgggtagaagggggaaaaatgtttcttcccctacaagagcaagcacctccccacacactggaggaggagagagagccgctccgagatctgcaggaacagaggctccttgggctgtctgttgaggaaggcaataaggtccaggcaaccctgcaaggagagagccagggtcaccacttagcatcagcatccccttcctctgatctcctgcaggcagccagcccacccaaagagctgacccatccagcacccaaggagtgaggcaggccagagtccactccaagggcagaggctgtggggcaggtggggagccagcctggaggatgttagcagagccaggtgggtcatggcacccacagcctcggggatccagcttgagagagaccctgagggccaggcttgtcagagctgataacagatgagttgtgatgacagggctcattgtcagacactgtaggctgtcaggctgtcaacctgagcagactaccaagtcttcccatccgcaaaacagctcaccccagctatcaggggtgggcacccagaggagagaccattctcatctccacctgaactcttttggtgctcccagaacattctgatgctgaaaaggagtgtagaatcagatagaaacaattcctcttgtagcttccatgatggttggatggtaaagtacaactggctttgttagttcattttgcattgctgtagaggaatacctgaggctcagtaacttataaagaaaagaggtttatttggctcagggttttgcaggccataaaagaaccctggtgccagcatctgcttctggtgagggcatcaaggagcttacaaccatggcagaagttgaagggggagagagcatgtaacatggtgagagagagagcaagagagggaaagaggaggtgccaagctcttttaaacaaccagctcttgtgtgaaccagtagagcaaaactcactcatcaccaagaggatggcagcaaggccattcatagggatccatggcatgacccaaacatttccactaggccccacctccaacattggggatcacatttcaacaggagatttggaggggacaaatatccaaaccatgtcactccacactgtccccccaaatctcatgtccctctcacattgcaaaatataatcatcccttcccaatagtgcccaaaaaatctcaacttgttctaggatctactcaatcaaaactccgaagtttcatctgagactcaaggcatgccccttccacctatgaggctgtaagatccaaaacaagttgctacttccaagatacagtgatggtacaggcattgggtaaacatttcccttccttccaaaaggaataaattggccaaaagaaggagggggaagaagcaacaggccccacacaattctgagagaaagacattaaactttaaagctccaaaataatccttgactccatgtcctgcatccagggcacactggtgtgaggagcgggttcccaaggccttgggctggtctgcccccatggctttgcagagtgcagcccacatggctgctctcatgggttgtagttgagtgcctgaatcttttccaggctctgggcgcaagctgctggtggctctaccattcttgggtatggagggcagcagccccattcccagagctccactaggcagtaccccactggggactctgtgaaggggctccaaccctacattttccctccacactgccctactggaggctctgtgggagaactccacccctgtggcaggtttctgtctgggctcccaggctttcttttttgtctctctctttttttatttttatttcaatagttttaggtttttggttacatagataagttctttcatggtaatttctgagatcttggcacacttgtcacccaagcagtgtacgctgtacccaatatgtaatcttttatccctcacctccatcccccacttgccctcaagtatccaaagtccattatatcattcttatgcctttgcatccttatagtttagctcccacttataagtgagaacatatgatgtttgtttttccattcctgagttatttcacttagaataatggcctccaactccatccagtttgctgcaaatgccactattttattcctttttatggctgagtagtatcccatggtgtatatataccacattttttatccactcattggtcaatgggcatttaggctggctccatatttttgcaattacaaggagttgcaattgcactgctctaaatatgtgtgtgcaagtgtctttttcatataatgacttatttttttctggatatcgaatagtgggactgctggatcaaatggtgattctacttttagttatttaaggaatctccatactgttttccaaagtggttgtactagtttacattcccaaccaggagtgtaaaactgttcccttttcaccatatccatgacaacatctgttagtttttaatttttaattatggtcattcttacagaagtgaggtggtatctcattgcagttttaatttgcatttccccaaaaattagtgatattgagcatttctttatatgtttgttggccatttgtatatcttcttttgagaattgtctattcatgtcgttcgcccactttttgatggtattttttttattgatgatttgtttgaattccttgtagattctggatattagtcctttatcagatgcatagtttgcaaatattttctcttattctgtgggctgtctgtttactctctgattatttcttttgctgtgcagaagttttttttgtctaattaggtcacatttatttatttatttatttatttttggttttgttgcacttgcttttgggttcttgatcatgaactctttgcctaagccaatgtctagaagagttttaccaatgttatcttctagaattttcatggtttcaggtcttagatttaagcctttcatccatcttgagttgatttttatataaagtgagagatgaggatccagcttcattcttctacatgtggcttgccaattatcccagcaccatttgttgaataggacatcttttccccactttacatttttgtttgctttgtcaaagatcagttggatataagtatttgacttcatttctggattctctgttctgttccattggtctaatgcctatttttatacaagtaccgtgctattttggtaactatagccttgtagtatagtatgaatttgggtaatgtaatgcctccagatttgttcaccttgcttagtcttgctttggctatgtggggtcttttttggttccaaatgaattttagaattgttttttatatttctgtgaagaatgatggtggcactttgatgggaattgcattaaatctgtagattgtttttggcagtatggtcattttcacaatattgattctacccatccaagagcatgggatgtgtctccatttgtttgcgtcattgatgattgctttcagcagtgttttgtagtttttcttgtacagatcttttacctccttggttaggtatgttcctaagtattttattttttgcaggtgttgtaaaagggattgagttcttgatttgtttctcagcttggtcattgttggtgtatagcagtgctgctaatttatgtacattgattttgtatcctgaaattttactgaattaatttaacagatctagaagctttttggatgagctttagggttttctaggtatgtgatcatatcatcagtgaacagcaacagtctgacttcctttttactgatttggatgggcacccagactttcctatacaccctctgaaatgtaggtaggagctgccatgcctccttcactcttgtattctgcccacctgtgggcttagcaccatgtggaagctaccaaggcttccagcttgcaccttctggagtggcagcctgagctgcacctgggactctttgagccttggctgaacctggagcagcaacctcccaagataccacagggaagcaaggccccagccctgacccccataacaatttcatcctcctaggcctctgggcctgtgatgggagagactgtcccaaagacttctgaaatgcctttaagacctttttctcattgtctttgctattagcatttagttgccttttagttatgctaatctctctagcaagtggttgctccataaggcatttgggttccttgcctgaaaaggctcttttcttctcaacctcatggccagcctgcaaattttccaaatgtttatgttctgcttaccttttaattataaattctaattttaagtcattttttttgctcccatatttgatttaggccattcaaagcagccaggttacttcttggatgctctgctgctttgaaatttcttccaccagataccttaggtcatcactgtcaatctcagcctttcagaaagccctggaacatggacacaatacagccaagctccttgctgggggcataacaagcatcacctttactccagttcctaataaattcctcatttctacctgagacctcatcggcctggcctttactgtccatatttctatcagcactttgatcacaactatgtaaccagtctctaaaaagttccaaatttcccctcatcttcctgtcttcttcctgggccctccaaactcttccaacctctgcccattacccagttccaaagccacttccacattttcaggtatctttatagcaacaccgcactccttgctaccaattttctgttttcatccattttgcattgctataaaagaatacctgaggctggataatttgtaaagaaaaggaagtttatttggctcactacaagctgtacaagaagcataatgccagtatctgcttctggtgaggcctctggaagtttacaatcaaggcagaaggcaaaaaaggagccagcataggacaggcatggtggctcatgcctgtaatcccagcactttgggaggccaaggcaggtggatcacttgaggtcaggagttcgagaccagcctgaccaacatggtgaaaccccatctctactaaaaatacaaaattatccgggtatggtggtgcacacctgtagtcccagctactagggaggctgaggcaggagaattgcttgaacccaggagacagaggttgcagtgagtgagccgagatcacaccattgcactccagcctgggcaacaagagtgaaactccatctcaaaaaaaaaaaaaaaaaaggagccagcatgtcacatggtgagaatggtgagagggagaaagagagataagaaggaagtgtcaggtttttttaaacaaccagctcttgtgtgaactaatagagtgagaaatcacccatcaccaaggggatggcaccaaaccattcatgagagatctggccttatgaccccaatacctcccaccaggcctcacctccaacactggggatcatatttcaatgtgaaatttggaggggacaaacatctaaatcatatcaggaactccatggtactgctaacccccaaatctctaggggtgatattgagtgacatgcatggtactgaacgatacttggtcaggttctcccagtgaagcccaagcaccctcagggtacagggctgggaggcccaatcacaccagctcagcccaggacttggctgagtctgccctggtattagaaggtagcagacctagaactgggttgaacaagatcaggccactttgtgcatgttgccaaaggagaaactgaaggatcagaagtgggcagtaagttttcagtgagcccaggggtcataagtagcaaaatgtggaattcagtaaggggtagaggctggaagagttttgaggtgtgtgttagaaaaagcctaggtttccttgaagactatgttagaaatttggacattaaaggtgatcctggtgggggctcagaaagaaagaggagagctatagagaaaactcctgtcatcttggagaatacataaattgtcacgaacagaatgttgctagaaacgtgaatgttaaagatgcctctgctgaggctccagacagaaataaggaaggtgttattgaaaacgaaggtgacccttgtcatacagtggcaaagcacttggctgaactgtgttccgttttgtggaaagtagaaattatacatgatgaacttggatgtttagctgacgaagttcctaagaaaattgttgaaggcattcttgatttctccttgctgcttacagtaaaatatgagaagagagagatcagctgaagagggaagtgctgaggtggctgggtcagctgacccaagggcccttcaagctgatttaggctgctcaccttggtctcagaatcaccacggccatggccggtcagtcacaggtgatccagcagctgctgcaggccgagaagcaggatgccaagaaggtgtctggggcccacaagcaaaagaaccagaggctgaagcagcccaaaggagcagcttaggctgaaattgaacagcactgcctgcagaaggagaaagagttcaaggccaaggaagctgcagcactaggatctcgcagacccaggataaccatcctccagacctacttccagcagaacagggaagaagtcttagataaccttttggcctttgtctgcagcatccagccagaaatccctgaaaactatcgcataagtagatattaaaagagagaagcacctgttaaatggactggcactttagatgccctcatggaataagaagctctagttatattcttataagaagacattaacttatctctgtatattatagagtaggcccattcacttttcggagagaagcaaatccagtttctttgtacagacttagaatttatctaggctgggcatggtggttcacgcctgtaatcccagcattttcgggggccaaggcgggcagatggcttgagctcaggagtttgagacctgcctgaacaacacagtgagactgtgtctctacaaggaaatataaaaattagccagatatggtggtacatgcttatagtcctacctacttggaagagtgaggcaggaggatcacttgggcccggaaggcagaggttatagtgagccaagattgtgccactgcactccagcctgggtgctagagtgagaccctgtctcaaaaaaaaaaaacttaaagatttcatctttttacctcatgtttcttaggaatataatgggtaaatattgtctattttattatgccttttggctcaagcaatatatatacatatatatatatcactgttgatgttttctttcttgtatcaagtttaaaagaaaaagcaaaacaatcctttgaaaaaaggaaggaattaaatcattttttccttaatgcttttttgaaggtcaggggctttatctatgaaaaagtagtagtttctgtaacctgtgtgaagcatcagccagccttaaagtagtccattgctgctaataattagaacagtgaatattactagtataattgtttcagcttcttaatcaaaataactagatgatagaattcaagaacttgttacatgttattactcggtgtactactaatcatttaaaagtaaagcctatcatgcaaataaataaataaataaataaataaatacatgagaccagataaaatgaaggaagaatgactttgagatcagagccacaggtgaggaggctgttggggctgctgttgccaccttgggcccagagtgtggggccaccccagtgggcctggaagatggagcattaaccgaggaggatgaatcttgagacttaaatctaataaagggccaactagaagcccctagtgctcatcatcctcataaagaaagccagaaaagtcaatagacaactatattttaacgaaaataactgagggagagcactgagtgcatcagaggagtaacagaaaccctgataagcacagaaatgtgggctggccacatagaaaacagaaggaaacacacggcctccaccactccatcccccaaccaggattatctgggaatcaggaggaatttctgacatgaggaggtaagcaagaggatcccagtggcacccactaacacctcggacacctgcagacctcgccactggggtcccctgcagtttgcactggagggagttgcctggaggccacatagctgtgctctccaaaaaaggtgctgacaccgtaccccactcccacatggctagtgcttcaccacactggaataggaactatggctggagtgtgtcttacccaaggagtgagtagtcacagctccccttcatctctgaggctaagctgccactgaacaacccagactagtggtcccacgtccccaagtcaagctatgggcatctattaaacccttccccacagagccaagtggatcagctctacccactcctccccctgaccctttgagtccaagctaaagcagtttcttgcctcctagcaaaacaggactttggccatgcctttctagtgtctacgttgaagcagcaccctgcattccaggaactaatgccttggccacccagaaggtcacacactgcagtgcttaggctgaagcagcaacctgtatcctacagaaatggtgcctgggccactcagaacaatcacaccctctgatacataaatgcaggactttccttacagcagagaaggcctgagctgaagcaacacatcaccttctagggaatcagtgccctggcttaagctgagcagcagcacatcccaaggctgagctgatatagtaccctatgccccaggaaaacagagcagtggctaagctgagacatctcagcctacaggccaaacaactgtagtgccctgcttccctggagcttgcctaggcccctagggtctgagctgctgaggcaccctctccctgggaagtagaatcagcactgtgctgttccctgcctactccccaccaaggcccaaattacagctatgctctgccatcttgggatacttgctgacactgtacctggtctcacatagtctgggatcctgctgagccctaccatcctagggtctagagtcaataccatacagtgcctcatcccctgggaccaaagtttccattgtgccctattggctcagcttcccaaattgcagccataccatactccccaggtccacacctccagaacaccccttcttccccagagttggacaaatgctgcaccccccaggaatagactcacagctacaacctggccccttgagcaaaacctgttaaagggtacctcagagtcacagatcctagcactgtgagccacctaatccaaacctgccacagaaactgaacctacaccccaagacccagatgccacagtagattcttgaaaccaggagactaggactccagttgcacagctactctaattttctgcacctggaatccagcaccattgcagctgcacgttggccacattagacctgctaccaagagagagccccttgactaaatctcctcattgtggggaaacaagaagaggaggactacaaaagcccttgacactgagtacattaacctgtgccaccactacatccacaaacttctacagcctagtccactgaggtgcccacagttattgctgaggttgaatgcagttgaagaagacgcatggaagctatgccactgcacctattcagaaacagagtcatcacactttcccaaccaaaacactaaacccaactgcaggtgaaattgtttctctaaaaaacccactcttgaaagtttggaagaggtgactatttcgccagatgcacagacatcaatgcaggaacacaataaacatgagaaagcaaggaaatatgacaccaccaaaggaacataactctcattaatagacctcaatggaaaaagaaatcaatgtattgctggaaaaggaattcaaaataatgatcttaagataactcaataagatacaagaaaacagataaacaattcaatgaattcaggaaagtaatttacagtatgaatgaaaatttcaacagagatagaaataaaaaagaagcaaactaaaattctgcaggtgaagaattcaatgaataaaattaaaaaatacagtaatgagcttcaacagcagatatgatgaagcagaagaaaggaagagatagatcccaatacaataatagttgataacttcaacaccactctcagcactggacagataatccagacagaaagtcaacaaagaagcattcaatttaaaaagcactttagaccaaatgcatctaacagatatttacacaacatttcatccaacagctgtgaaatacacattcttttcatcagcacatggaatattctccaggataaaccatacagtaagtcacaaaacaagtctcaacaaatttgaaagaattaaaattatatcaaatatcatttatgaccacaataaaactcgaaatcaataagaggaacttttaagactgtacaaagacatgggaaattaaataatgtactcctgagtgaccaataggaattaagaagggaattttagaatgtcaacaaagaaaatgaaaatagaaatgcaacgtactagaatttataagatatagcaaaaagcagcattaagatggaagtttatggcaataaatacctacatcaaaaaagcagagagatttcaaataaatctcatccttgaaaatgcatgtcaaggaactaggaaatcaagaataaaccaaacccaaaattagtagaaagaaagaaataataaagatcagagcagaaataaatgaaattcagactaaaaaaaaaaaagatcaacaaaatgaaaaattgaatttttcaaaagataaacaaaaatgacaaataattagctagactaaacaaaaaagacccaaaagaatgaaatcagaaatgaaaacagaaacattacaactcatatcacagaaacacaaaggataattagagaccatacaccaacagattagaaaacctagcagaaacaggtatatttctggacaatacaacctaccaagactgaacccagaagaaatagaaagcctgcacaaaccagtcatgagcattgagattgaatctgtaacaaaaagtctcccatcaaaggaaagcccaaagaaattcctgttgaaataccaatgacattcctatcaaaatgccaattctacagtaatccaatggcttcagtggggaattctaccaaacactaaaaaaactaatacctattcttctgaaaatcttcccgaaaattgaagaggagggaattcttctaaattccttgtatgaggccactattatggtaattatgattatgattatgattatgtgattattattatgattccaaaaccagacaaggacacaacaaaaaaagcaaactataggctaaatactctgatgaagataatagatgaaaaccttcaaccaaatactagcaaattgaatccagcagcatattaaaaacattatttatcatgatcaagtgagatttatcccaggaatgcaaggatggttcaacatatgcaaatcacatcaacagaatgaaggacaaaaaccgtattatcatcataacagacacagaaaaagtatttgataaaatccaacatcccttcataaaaattctcagcaagttaggtatgaaaggaatatacctcaacacaataagagctatatgtgacaaacccacagccaacatcatactgaacatgcaagagttgaaagcttttctctaaaatctggaacaagccaatgatatcaggccagatgtagtggctcatgcctctaattctagcactttgggaggccaaggcaggaggatcacttgagcccaacaaaggaaacaatcaacagagtgaaaagacaatctacagaatgttagaaaatatttgcaaactctccatccaacaagggactaatatttagaatacattggaaactcaaacaactaaacagaaaagaaaacaaatttttttattaaaaataggcaaatgaaaaaatatttaaaagtttttaaaaccaaaaaaggaactgaatagacgtctctaaaaggaagatatacgaatggccaacagacatatgagaaaatgctcaacattactaatcataaggaaaatgcaaattgaaaccacaataagatataatctcaccccagttaaaatggctattattaaaaaaggcaaaaaacaattgctgtcaaagattcagagaaaggggagctttaatgcattattggttgaaatcttgtctttggaattagcacagccattgaaaaacaataaagagcttcctcaaaaaatggaaatgagtactgccccatgatcccaccatcctctaccgggtatttatccaaaggaaatctatgtcaaagagacatctacactacatgttcattgcagcactattcacaatgccagtgttggaatcaacctacgtgtccatcaacagatgaatgcataaagaaaatgtagtgtttatacacaaacacacacagagagagagagagagaggaattctattctgccatgaaaaagaatgaaatcttgtcatctgaggtaacatggatgagcttggaggacatgttaagtgaaataaagctagacacagacagccaaatatcacatgttctcactcatatatggaagccaaataagttgatctcatagaaatagggagtagaatagtggtaaccagaggctgggaatgggaggggataggatagctagaagtcgattaataaataaaaaattacagtcaggtaggaggaataggccccggtgttctctaacaccatagggtgactataactaacaacaatttattgtatattttcatacggctagaagagcaaattttgattgttcccagcacaaagaagtgataaatgtttgaggtgatggatatgctaattgttgcaggaagtcagggaccccgaatggagggaccagctggagccatggcagaggaacataaattgtgaagatttcatggacatttatcagttcccaaataatacttttataatttcttatgcctgtctttactttaatctcataatcctgttatcttcataagctgaggatgtacgtcacctcaggaccactgggataattgtgttaactgtacaaattgattgtaaaacatatgtgtttgaacaatatgaaatcagtgcaccttgaaaaagacagaataacagcgatttttagggaataagggaagacaaccataaggtctgactgcctgaggggttgggcaaaaagagccatatttttcttcttgcagaaagcctataaatgaacgtgcaagtagggaagatatcgctaaattattttcctagcaaggaatattaatactaataccctgggaaaggaatgcatccctgggggaggtctataaacggccgctctgggaatgtctgtcttatgtggttgagataaggactgagataaggactgagatacgccctggtctcctgcagtaccctcagcttattaggggggtgaaaaactccaccctggtaaatttgtggtcacactggttctctgctctcaaactctgttttctgttgtttaagatgtttatcaagataatatatgcactgctgaacatagacccttatcagtagttctgtttttgccctttgccttgtgatctttgttggacccttatcagtggttctgcttttgccctttgtcctgttccctcagaagcatgtgatctttgttagacccttattagtagttctgctttttgcctttgaagcatgtgatctttgtacccactccctgtgcttacaccccctccctttttgaaacccttaacaaaaaacctgctggtttgaggctcaggcggtcatcacagtcctactgatatgtgatgtcacccccggctgcccagctgtaaaatcctctctttatactgtctctctttatttctcagctggccaacaattatggaaaacagaaagaacctacattgaaatattgggggcaggttcccccaatactaattatcctgatttgatcatcacccattgtatatatgtatccaaatatcacaatgtaccccaaaatatatacaattattatgtgtcaattaaaaacaatcataaaacttttaaacagctaaaataaaagtatattgttttcttcaaaaaaaatctaatgcagttttccctactaggttttgggcttgcttaggacccatggctcctctctcccttccaatgtatcccttttggaataggaatgtccatcctatgcctgccccatcattgtactttggaagcagataacttcttgtcaagttacaaaggtccacagatggagaggaatttcaccccagaatgaatcaccctgcatttctcccacacttgatgcaggtgatatgtcgctgagattgtggactaagagttggtgctggaaggggttagccatcgtggagatgttgctatgggatgcagggattttgcctgtgagaaggacatgattatggggggagcggagggcaaactgtcatgggttaaaatgtgtcccctataaattcatgtgttgaagtcctaacccccaggaccacagaatgtgaccttgtttggaaacagtctttgcagctgcaatcaagttcggatgaggtcaccctggagtagggcaagcctctgatccaatatgactgctgtcctcatgaaaagggggaatctgggcacagacgcacgtgtggagaacgccctgtgaagatggtgctgcttccacaagccaagagcagcagagacggccggcaaagcccagcagcaaggagagagcctggaacagagtctccatgacacagaggagccagccccaccgagacctccatcccagatgaccggcctccagaaccaggacggaataaacgtctgttgtttaagccacgcagtctggggtgcagtgttgccagggccgcacttaacggatacgagtgttgtcctgagctgccagccccacagactgcacaaggcctccctgccccagccaagtgcagtctccccagccccctgggtgtgccatgggcagtgtggggcccatcactccgtcctcccccaggctgggaggttgagcccattatgagctccatggggtgaagctggagcgagaggctgggagccgactgggagcccgcggctggaggatggatttccccagggacccacacgtgcacctccacctgtctcctggacgttctctctgagggcagggctggtgccagctcagggatccagcagggacagaagggcgggccgggtccttgtggagagcacatttagtgggagggacatgatttcccctcacaagtgtccattcttcctgttccttgctggacgcttcctcttccattctggacacttcctgtgcgacacctcctcgggctttcccgaggccctctggcctcattccgttccctgctacctcccacttccacgtacgtccttgcccagctcttccctctatccagagcttctgcctggcaaggtccctgctgagatcagtccaggctcccccagcacaggtaggagccttgcacatgcccttggacctccccaccctgcatgatgccagcatccccaggccccagggaggccccatttctctctctgctggtagtccagtggccctggagtcccactgcaggtggggtgtgcccctgaactctgaggaagctaagtaccctgccctcagacaggctatcccccctgctcagccccagggccctgccccctaccccttcccctcacctgcaccacaggctctggccaactctgcccaggccctgaatgggcccctctggctcccctctgctgctacactgccctgcaccacctccactcagcctcagtgtgttcatccgcctgtcccacgtcccctcggcccccaggagcacagctggtggccctggctcctcgcagcccatcttgttccttctggagcaccagcctcagaggccttcctgtgcagggtccactcggccagccctgggaccctcctggtctcaagcacacacattctccctgcagccagacctgcccctgcctgtgagctcagacctgagccttggaacgccttcccttctccatcccagctcgcctttgccagctgctcagcaggatgaactcacactcccctccctgcaccatgagtgagagtcagctggagagatgcccaggcaaaagcagccaccagggcccagtgggggccagaagcttcagatgagaggcccaggtattgagaggctgagaccacgggcagaatggtcataatcgttgccagtctcagtccagccccagggactcagagacagagaaaagagcagcacacaaggtccgggctccccaccttctcccgtgagtacgggggagtatgggggcagccaccacccccatccccacacacccatgaggcagcctcagctgtgtctggactccccctcgccctctgacacagaaaccaccagaagaaaagggaacttcaggaagtaagtggtgccgccggtttcaatcctgttcttagtgtttgcagcgtggagttcacacccctggggacctgggggccgagctgtgatttcctaggaagacaagtggcagctgacagcgtgggcaaggctgcccacatgtacctcgccacaacaggaagggctgagacccccacctcggtgagtggggtcagcacagggcaggagcacaggctcaggagaaggacagagcctgggcgcagccatcggcgcttctggacctgagctgctgaacaggctgcaagaggctggggagaggctggggcgaggccagccccacatggaagcctaagcggagccagcacaggggaggtgggcagccttcaggcaccgatgcccacccagtgcgagacgacagggaccgtgggcaggggcttccaagccaacagggcaggacacaccagaggctgactgaggcctccaggacgaccgggctgggagtgtgaggaacatgacgggatggggcagagccagccatggggtgatgccaggatgggcatgaccgacctgagctcaggaggcagcagagagagggaggaggagaggccccaggtgaaccgaggggcttgtccaggccggcagcatcaccggagcccagggcagggtcagcagagctggccgtagggccctcctctcagccaggaccaaggacagcaggtgagctgggagcagagcagggagggtgagtgtggcagcaggacaggagggtggaagccaaggagcccagaggcagaggcagggacaggggaggcacaggggctgggctcagagccagctgatggggttggggcacctgctggccgggagcagggctgtggtcagcagcggagaggaggggagagctgtgctgagtgcacgggcgggaggagggaagagtccagggaggcccagaaaggcccagagtgcagcaggcctggggcgaggggaggggctgaggctccgtgcgttcagggaactgacccagcagagcagaggccactgaggagctgaggttctggagaggcttccagagcaggagcagtgcagggacgggaggatccgggagctcatccaggaggggcacatgggcaagggcaaggggctctgttggggagacctgactggacactggggctgctccacagcatagggaacacgccaagtgctgcaaaaacaaaaatgaggcaagaaaaacagcctaaacctggacagagggtgccaggacaggcaggggggcaacagtggaccgagtgacgttgctgccccaggttgagggagggcagagtgagcagggggcaggcattggagttcaggggaccaggaccaagcagccacaggtgcacagggcaggtgggaggcaggaagaacagggggcagctcctggagctcaggggaccacgggagagcatctgaaggtgaacaggagccggtggaggggcaggatgagcaggaggaagaccctggagctcaggggaccagggcagagcagccacaggtgaggaggcagccacaggtgcgcagggcaggtgggaggcaggaccagcagggggcagcccctggagctcatagagccagggcagagcagttgcaggtgagcagggctcagtggaagatgggcaagcagggggcagctcctggagctcagggcaccagggcagtgtagccacaggtgagcaggggctggtgggaggcaggacaagcaggcggcagctcccggagctcagggaaccagggcagtgtagctgcaggtgagcaggggctggtggaaggcaggacaagcaggtggcagctcctggagctcagggaaccagggcagtgtagctgcaggtgagcaggggctggtgggaggcaggacgagcagggggcagcccctggagctcaggggaccaggggagggcatcagaaggtgagcaggggctggtgggaggcaggatgagtaaggggcagcccctttagctcaggggaccagggcagagcagcctcaggtgagcaggggcaggtgaggggcaggacgagcagggggcagtcctggagctcaggggatcagggcagagcatcagaaggtgagcatggctggtgggaggtgggcgagcagggggcagcccctggagctcaggggaccagggcagagcagtcgcaggtgagcacgggttggtgggaggtagaacgagtagggggcagctcctggagctcagggaacaggggagaacatcagaagatgagaagggccggtgggaggttgcagagcagggggcagcttctgcagctctgccagccagggcagagcagctgcaggtaagcagggctggtgggaagcaggggtagcaggtgggcagcccctggagctcagagagccggggaagatcatcggtaggtgagcaggggctggtggaaagcaggaggagcaaggggcagctcatggagctcagaggaccagggaagagcagccacaggtgaacaggggcaggtgggcggcagaatgagcaggggcagctcctggagctcaggggacaagggcagagcagccataggcaaacaggagcagggtcaggggacaggaggagcagggggcagctcttggagctcaggggaccagggcagagccgctgcaggtgagcaggggcaggtggggggcaggaggagcagggggcatctcctggagctcagagcaccagggcagagcagccacaggtgagcagggacggtgggaggcagcacgcagctcctagactttggcaggagctgggtagttgccggcagcagacagctgagggctggtgaaagtgcagtgcagcctcctggtgccgggaagggagtgtgagtccatcccactgagcagttggcaagggcgagctgggatggagaagggaaggcgttccagggctcggggctgagctctcaggcaggggcaggtgtggctgcagggggaacgtgtgcttgagaccaggagggtcccagggctggccccagcggaccctgggcaggaaggcctctgaggctggtgccccagaaggagcaagatgggctgccaggagccaggaccatcagcacaatgaagctgagtggaggtggtgcagggcagtgtagcagcagagggcagccagaggggcccattcagggcctgggcagagtcagccagagcctgtggtgcaggtgaggggaaggggtggtgagcggggccctggggctgagcagaggggatggcctggctgagggcagggcgcttagcttcctcagaggtcaggggcacaccccacctgcagtgggactccagggccactgggccagcagcagagagaaatggggcctccctgtggcctgggggtcctggcaccacgcagggtggggagggccaagggcaggtgcaaggctcctacctgtgctggggggcctgggttgagcccagcagggaccttgccgggggaagctctggagagagggaggaggtgggctggtggctgagaaggccaggccagggctgggagggtgacggtgtggtgactgagcctccagaagtaatgcaggacactgggaggcagggggcatccaggcactcagggccctgacctgggctgctgcacactggggctaaggggaaaggaggggagaggctgaggaggaggctcccggggcgatattccaaggcagggggttccggggccctggggctgaagggcgccgaccctatgcagtgtctggcccctctgctgcacagaagaaaagggccttggagggcagagggcaggctatgaccagggccctgggcaagtcaggcccactcactagcggagggccacgctggggcggcagggtcaggagcttcaggggactcaggggacccacgagaagccatctgagaacagtgtccactggtcaagccaggcacccataaaaggctggagtggggccaatgggcatgagccgtccctgaggtggcaccgatggccagagctgaggccaagctagaggccctggactgtgctgactcccggcagacacagagcgctgacctggctgccgagccccgcctcctaggctgcaggggtgcctgcagaagggcaccacagggccaccggtcctgcaagctttctggggcgggccgggcctgaccttggctttggggcagggagggggctaaggtgaggcaggtggcgccagccaggcgcacacccaatgcccgtgagcccagacactggaccctgcctggaccctcgtggatagacaagaaccgaggggcctctgcgccctgggcccagctctgtcccacaccgcagtcacatggcgccatctctcttgcagcttccaccaagggcccatcggtcttccccctggcgccctgctccaggagcacctctgggggcacagcggccctgggctgcctggtcaaggactacttcccagaaccggtgacggtgtcgtggaactcaggcgccctgaccagcggcgtgcacaccttcccggctgtcctacagtcctcaggactctactccctcagcagcgtggtgaccgtgccctccagcagcttgggcacccagacctacacctgcaacgtgaatcacaagcccagcaacaccaaggtggacaagagagttggtgagaggccagcgcagggagggagggtgtctgctggaagccaggctcagccctcctgcctggacgcatcccggctgtgcagtcccagcccagggcaccaaggcaggccccgtctgactcctcacccggaggcctctgcccgccccactcatgctcagggagagggtcttctggctttttccaccaggctccgggcaggcacaggctggatgcccctaccccaggcccttcacacacaggggcaggtgctgcgctcagagctgccaagagccatatccaggaggaccctgcccctgacctaagcccaccccaaaggccaaactctctactcactcagctcagataccttctctcttcccagatctgagtaactcccaatcttctctctgcagagctcaaaaccccacttggtgacacaactcacacatgcccacggtgcccaggtaagccagcccaggcctcgccctccagctcaaggcgggacaagagccctagagtggcctgagtccagggacaggccccagcagggtgctgacgcatccacctccatcccagatccccgtaactcccaatcttctctctgcagagcccaaatcttgtgacacacctcccccgtgcccacggtgcccaggtaagccagcccaggcctcgccctccagctcaaggcaggacaagagccctagagtggcctgagtccagggacaggccccagcagggtgctgacgcgtccacctccatcccagatccccgtaactcccaatcttctctctgcagagcccaaatcttgtgacacacctcccccatgcccacggtgcccaggtaagccagcccaggcctcgccctccagctcaaggcgggacaagagccctagagtggcctgagtccagggacaggccccagcagggtgctgacgcatccacctccatcccagatccccgtaactcccaatcttctctctgcagagcccaaatcttgtgacacacctcccccgtgcccaaggtgcccaggtaagccagcccaggcctcgccctccagctcaaggcaggacaggtgccctagagtggcctgcatccagggacaggtcccagtcgggtgctgacacatctgcctccatctcttcctcagcacctgaactcctgggaggaccgtcagtcttcctcttccccccaaaacccaaggatacccttatgatttcccggacccctgaggtcacgtgcgtggtggtggacgtgagccacgaagaccccgaggtccagttcaagtggtacgtggacggcgtggaggtgcataatgccaagacaaagccgcgggaggagcagtacaacagcacgttccgtgtggtcagcgtcctcaccgtcctgcaccaggactggctgaacggcaaggagtacaagtgcaaggtctccaacaaagccctcccagcccccatcgagaaaaccatctccaaaaccaaaggtgggacccgcggggtatgagggccacatggacagaggccagcttgacccaccctctgccctgggagtgaccgctgtgccaacctctgtccctacaggacagccccgagaaccacaggtgtacaccctgcccccatcccgggaggagatgaccaagaaccaggtcagcctgacctgcctggtcaaaggcttctaccccagcgacatcgccgtggagtgggagagcagcgggcagccggagaacaactacaacaccacgcctcccatgctggactccgacggctccttcttcctctacagcaagctcaccgtggacaagagcaggtggcagcaggggaacatcttctcatgctccgtgatgcatgaggctctgcacaaccgcttcacgcagaagagcctctccctgtctccgggtaaatgagtgcgacggccggcaagcccccgctccccgggctctcggggtcgcgcgaggatgcttggcacgtaccccgtgtacatacttcccgggcacccagcatggaaataaagcacccagcgctgccctgggcccctgcgagactgtgatggttctttccacgggtcaggccgagtctgaggcctgagtggcatgagggaggcagagcgggtcccactgtccccacactggcccaggctgtgcaggtgtgcctgggccgcctagggtggggctcagccaggggctgccctcggcagggtgggggatttgccagcgtggccctccctccagcagcagctgccctgggctgggccacgggaagccctaggagcccctggggacagacacacagcccctgcctctgtaggagactgtcctgtcctgtgagcgccctgtcctccgacccgcatgcccactcgggggcatgcctagtccatgtgcgtagggacaggccctccctcacccatctacccccacggcactaacccctggcagccctgcccagcctcgcacccgcatggggacacaaccgactccggggacatgcactctcgggccctgtggagagactggtccagatgcccacacacacactcagcccagacccgttcaacaaaccccgcactgaggttggccggccacacggccaccacacacacacgtgcacgcctcacacacggagcctcacccgggcgaaccgcacagcacccagaccagagcaaggtcctcgcacacgtgaacactcctcggacacaggcccccacgagccccacgcggcacctcaaggcccacgagccgctcggcagcttctccacatgctgaccagctcagacaaacccagccctcctctcacaaggtgcccctgcagccgccacacacacacaggcccccacacacaggggaacacacgccacgtcgcgtccctggcactggcccacttcccaatacagcccttccctgcagctggggtcacatgaggtgtgggcttcaccatcctcctgccctctgggcctcagggagggacacgggagacggggagtgggtcctgctgagggccaggtcgctatctagggccgggtgtgtggctgagtcccggggccaaagctggtgcccagggcgggcagctgtggggagctgacctcaggacactgttggcccatcccggccgggccctacatcctgggtcctgccacagagggaatcacccccagaggcccgagcccagcaggacacagcactgaccaccctcttcctgtccagagctgcaactggaggagagctgtgcggaggcgcaggacggggagctggacgggctgtggacgaccatcaccatcttcatcacactcttcctgttaagcgtgtgctacagtgccaccgtcaccttcttcaaggtcggccgcacgttgtccccagctgtccttgacattgtcctccatgctgtcacacactgtccctgacactgtccccaggctgtccccacctgtccctgacactgtcccccacgctctcacaaactgtccctcacactgtcccccatgctgtcacaaactgtcactgacactgtcccccatgctatccccacctgtccctgacactgtccctgacactgtctctcatgctgtccccactcatctgcgacactgtaccccacgctgtccccacttgtcctcaacaatgtcccccatgctgtccccacctgtccctgatgctgtcccccacactgtcccaatctgtccccaccactctcccccacgctgtccccacctgtccctgacactgtcccccatgccatccccatctgtcccgacaatgtccccagggtgtccccagctgtccctgatgctgtcccccacactgtccccacctctccctgacgctgtcccccacgtggtccccacttgtccctgatgctgtcccccacactgtccccacctgtccctgacactgtcccccatgccatccccatctgtcccgacaatgtccctatggtgtccccagctgtccctgatgctgtcccccacactgtccccacctgtccctgacgctgtcccccacactgtccccacctccccctgacactgtcccccacactgtccccacctctccctaacactgtcccacacactgtcccctcctgtccccaacactttcccccatgctgtccccaccagtccccaacactgtacaccatgcttttcccacctgtccccaacactgtcccccatgctgtcccctcctgtccccaacaatgtcccccatgctgtttcctcctgtccccaacactgtccgccactctgtttcctcctttccctgacactgtcccccactctgtccccacctgtagccaacactatcccctacgctgtctccacctgtccctgatgctgtcccccacactgtccccactcctccctgacactgtcccctatgctgtccccaccggttcctaacactgtcccccacactgtccctacctgtccccgacactttctcccatgctgttcccacgtgtctccaacactgtcccccacacagtctccacctgtccctgacactgtcccccatgctgtcctcacccatctctgacactgtacacatactgtccccacctgtccctgatgctgtcctccatgatgtccccacctctccctgacactgtcacccatgctgtccccacctgcccctgacactctcctccacgctgttctcacctgtccccaacactctcccccacactgtctccacctgtccctgacactgtcctccacgctgtccccacctatccctgacactgtcccccatgctgtcctcacctgtccccaacactctcctccacactgtcctcacctgtccccaacactctccccccacactgtctcaacctgtccctgacactgtcccccatgctgtcctcacctgtccctgacactgtcccccatgctgtcctcacctgtctctgacactgtcccccgtgctgtccccacctgacactatcttctgtgctgtccacatgctgttgctgccctggctctgctctccatgtccaggcctcagagcaggcagtggtgaggccctggcacatgggtggcatgaggggccggataggcctcaggggcagggctgtggcctgggtggcctgaggggtgagcaggcctcgggggcagggctgtggcctcgctcacccctgtgctgtgccttgcctacaggtgaagtggatcttctcctcggtggtggacctgaagcagaccatcatccccgactataggaacatgattgggcagggggcctagggccaccctctgcggggtgtccagggccacccagatcccacacacgagccgtgggccatgctcagccaccacccaggccacaactgcccccgacctcaccgccctcaaccccatggctctctgtctttgcagtcgccctctgagccctgacacgccccccttccagaccctgtgcatagcaggtctaccccagacctccgctgcttggtgcatgcagggagctggggaccaggtgtcccctcagcaggatgtccctgccctccagaccgccagatgctcacacaaaaggaggcagtgaccagcatccgaggcccccacccaggcaggagctggccctggagccaaccccgtccacgccagcctcctgaacacaggcgtggtttccagatggtgagtgggagcatcagccgccaaggtagggaagccacagcaccatcaggccctgttggggaggcttccgagagctgcgaaggctcactcagacggccttcctcccagcccgcagccagccagcctccattccgggcactcccgtgaactcctgacatgaggaatgaggttgttctgatttcaagcaaagaacgctgctctctggctcctgggaacagtctcggtgccagcaccaccccttggctgcctgcctacactgctggattctcgggtggaactggacccgcagggacagccagccccagagtccgcactggggagagaaggggccaggcccaggacactgccacctcccacccactccagtccaccgagatcactcagagaagagcctgggccatgtggccactgcaggagccccacagtgcaagagtgaggatagcccaaggaagggctgggcatctgcccagacaggcctcccagagaaggctggtgaccaggtcccaggcgggcaagactcagccttggtggggcctgaggacagaggaggcccaggagcatcggggagagaggtggagggacaccgggagagccaggagcgtggacacagccagaactcatcacagaggctggcgtccagccccgggtcacgtgcagcaggaacaagcagccactctgggggcaccaggtggagaggcaagatgccaaagagggtgcccgtgttcttgcgaaagcggggctgctggccacgagtgctggacagaggcccccacgctctgctgcccccatcacgccgttccgtgactgtcacgcagaatccgcagacaggaagggaggctcgagcgggactgcggccagcgcctgcctcggccgtcagggaggactcccgggctcactcgaaggaggtgccaccatttcagctttggtagcttttcttcttcttttaaattttctaaagctcattaattgtctttgatgtttcttttgtgatgacaataaaatatcctttttaagtcttgtacttcgtgatgggagccgccttcctgtgtccacgcgcctcctgcccccggtgggaagcacattcaggaggaggctggtccagctgcacctcgggggctccctgcatacgccccccgcctcctgcagccacacgcattgcccgagcgaccctccctggcccctgtcgctacatggacccccggggcttctcctcttttctacatggatgcagtttctcctcctgctgggcacggtgctgcctgccctggtcactctgcgggggacagggcctccagggaaagctgggtcgaggctgggagctggctcaggctggccaggcagagccacagggagggccttccagaaccaaccatggtccgaagcgagaggtgggtgtcagatctgtgtgcgtcagctcaggaccacagcggggcggctcccacagcagacatggatcctcccaggcctagagaccaggaatctgagatcaggatgcaggcagggctggtttctctcaagccctctctccttggcttgtagacaccgtctcctccctggtcctcacgtggccatccctctgtgtgcccgtgtcctaagcttctcttcttataagaacacacatcagattagattagtgaccccctatgaacttaatgacctctgtaaagaccccatctccaaatagtcacattgtgaggccagggattaagacttgaatatatgaatttgtaggggccacgatttaacccatcacagtccagactctggcccccaaaattcatgttcttctcacatgcagaatacattcatcctgtctcagcatccccctgggcactaggtcatgtagcaaggacggattttcaacagaaataactattgcaacagaagaaagagtccggcatgacctggactcaccttcatctgtgcagaggccacagccttgtaaagggaggtggtagggggagcagggtgggtgctcggggctcagtcgtcggggaagggaaaagttgcccagcgctggtcagcgtccccgggatgggacccgctgtgtccgtgccggccactgttgaggtcaggattctgtcctcccagagcctggagacacaggccccatccttcccaatggggacacttcagggagcggctctcaggtcccgagaaagaccctcctgggtcacaggaaatgcacagacatcgggaacagacagaaggacgtgtggttgcggccctctcagcagataccctgagaaagggaggtcggggttggtccaaacggtgagttctggtgcacggagctttctcaggcaggtgttgacggggcaggggtcggcctaggggtacggccagaagctgttagaaactgttagtgtctgctcaagtctttacaagccaaggttgaggccgagtggagaggctccgaggagcctggctggaactcagtcaaggacagggtcttgttactgcagtggctgcggtggctgcggtggctggaaaatgccgtcggagttgcctgtggcaggagagagaccatctcacccaggaaggaggagtggttggattcgtttgtgtggcatcgagcagctggagcttcaccaaacacagagttggggactaaatccccagactccaggccctgccatgccgtgggaaggctcgccactggagggtgggctccagggggcctggcctgaactgggtgctgaagcccagccctttaactctcaggacacgctgctgcagccccgcggggggtgagggagacagcacctggggtgcagggcgggcagctgctgcatcaccggctctatcccaagcccaaggatggcgtcccagagatgcaggagagctttgtccagagaaggtgccagccctcagggaccctgctggagagatctccaccctctgcccttcaaggggccctacgggcttccgggtgccctggtggggtgggctccagtccactgtctgaggatggacggcctggccaggataaggaaaggaaacccaggacggtgccgggctccgggtcattccgtgcactgagcaggctgagttgggaagaagcagatgcttcctgcagctcctgcccctgcagggcctggcgcctggaccaggttcccctggggaaattgggcccctccctgagccacccggggcccaccgccccctttccacctgggaccgagcatcctccagagggtcagccctcctgagggaacaccatgcccagccccaggaccctccctcaactctccagcaaggctgcactgtgggcggcccctgcacataccccagcagtccatgctgtgatgtaacatgacatggtgtgacgtggtgtgatgtctctggtgtgacgtggatgtcatgtggcatgatgcgacaggacatggtgtgatgttgtatgatgtggtatgacggtgtgatatccgaggggtgatgtgatgtggtgtgacatggtgtaatgtccctggtgtgaggtggcgttggacatgctgggatgtggtgtgacacagtgtgacatccctggtgtgatgtggtgtgatgaagcgtaacaggctgtgacatagtgtgacgtggtgtgatataatgtgatgtggtgtgaggtggcgtgacatggtgggatgtggtgtgacatggtataatgtccctggtgtgaggtggtgtgatgtggtatgatggggtgtggcagggtacgacatccctagtgtgatgataagtttcatggtatgatgtggcgtgacatccctggcgtgacataatgagatgtggtgtgacatggtgtggcattcctggtgtgactcctgtgttctgacatttgtggccaccccaggatacagaggtccctgtagccaagggaagggggagaatagaaccatctgagcatgttgacctggaggaattggtggcccttgagtccacgaagcccaccctgccaggtgcccctgccccacgtgacccaagtgggcttgcagagcagcaagcaggactctggttagactgcaagaaggacctgccaccacgtggccttgtgaggagacacagagcaaggcagtgacctcagcgtccacccagcacagggtgctgctgaagctcctcctgtcctctcagcagcggtctcagagcaaggcccaaggcaggctgaagagaggggcagagggaggatgctggggaggcaggggtgaggggagtgagagcccaggtttcagctgagcccctgcacagggaaggaggctagctgaacacccatctccccacacactcccaaccctgcctctgcccgaacacctcccagaaggcacctcaaactctgctacccacactcagcaaggggtatggtgtccccaccgagtccagccagtgaggcccggcacagccatgcctgtgccgaccactcccatggccaagctccctgctaacatggtaggacagagccaggcctggaggagacagaacatcagtcccatggggaagctccctgctcacatggcagggccgggcctggaggagacagaacgccccgtctggtatggtactcaggctgcacatgcctgccacgcacgggggccatgtggcacacacgggtactcacacggtcctcacacagggacacacgcacttgcaaccccagcacccacccagtgcactcatgcacgggctccccaggtgggtcacagtctcacgccttgagctactccatgtgccaggcccttcacccacattcccgtccccggtgccagctgttgagccacaccgtcttctctgtggatccctcccagcccgctcagcacaatggacatgctctctccagtccagcaactgcactggcctcttcccctcagaatccacgtctggccatctcccaggaaacccggaccaccacgggcagggaccaccttctcactgtccatgtggaccaccccacacctgaccccaggcagagtcacactacgacctgcttcaatattgaaaaggggaaaagctggaggaggggaaagatgaaagagaaaaaagcaagaggggagggtcacattcttgtgaggctttgattagagttcactgagcccccacgttgcatgaaaaggaggggtggagggagcaattacgcattcgccttgtgctcagtaaatctgcactttataagcaaataaacagagtagaggaagaagtcaaatatgcattcgtctcaggggtaggaggaacgatttcttgtctcattttgtcccatgtcatgaagaccggcctgttaatttatattctcagggtgagggaggccacctgggtagacctggcctatctgctgctgctatcactttggaaacaaaaggaaaggcatgactttttttttttttcatgactcagcttcccacctcaactgttcattttggcatagtgagtttggagtcctgagattttattttcctttcacaatggtcaaggtcgcaccctcagtattcaggagagctggtccaacccagacccctgccgtccctggacgcttttcaaatacgtgctgcagtctctgacactctctcaccatggtagaaactgaggtcttggtgagcctgcaagcccctgctcatggggacaatgcaggctgaaacccgcatttctgaccccaaagctcctgttcctttcactcacccccacaccagctctttgagtccagagctttgtccttgcctgagtcctaccctcagggacaggggcccaacccagacaccaacacatcataccctgagagggtgccaggagcccagagatgtttggagagcacagaagccctggaggctctgtggagatgctgcacatttctctattcaacagatactcaccaggtggccagcggcagagatgccacatggcatggagctcgccttggccaacaggacaggtgtggggttgggaggccttcccagggcactccttgaagcagagctgtggggaaaagttggggccaacctcagatctcctcatcaacaccggttctcctgccctcctgggccacagaaaactaagctccctggatactgcggctgggtggggccatgagggagaagaaatcacaacgagttaaaagatcattttctaaaactgttatgatcaggactcacataaacatatgacgacacatttcagagatgctctttatctcattaattaaggtgtcgtaaccagttcaaagtggaattctaagtactacacttacataattgattcaggaatgctaaaaggagttcatagatagatgcaaaactggccttttccctggaagatgaggagcaattcattgtccttccaaaggtgagaacttgaatttctaccaactcaaagagcttttgcattgctatcaattatgtacaacttagagcagtagtccccaacatttttggcaccaggaaccagttccatggaagacaatttttccacagaccaggatcgggggatggcttggggacaaagctgttctacctcagatcattaggcattaggatttcacgaggagtgtgcaacttagatctgggaatgtgcagctcgcaatagggttcgctcctatgagaatctaatgctgccactgatctgacgggaggtggagctcaggcaggaatgctcacacacccctcacctcctgctctgtggcccagttcctaacaggccatgagcagattccagtgcatgacccaggggttggggacccctggcttatagaggtgtaaaatagttcaaaggaaataaaagatgcagagctccatagaatgaaataacttggaagagtgtacaagacgatgccttgctttccatggaaggcacctactaatcttttggtccatttcagttcttcttaatgcttcctataaacatatataactgactgacacaaacagatccataatataaagaagaccactgtaaaccaatgagaaaaaaaatcaaataatccaacaaggaataggcaagagaattgaacagatgttttacagaagatatccaaatagccactaaacatatgaaaagatgttgaaccacactagtcaacagggaaatgaaaatgaaaaaccacatgagagaaagtagttctgattccaataattctggagcagctaatatcagactagccctttggcagatggcaattataaacactagaaacgctgtaagcacacacaacacccacacacaccaattgcaggcactggaacatgaccagaagtaggcaaacactagtaaggattattccgttaaatattcgtctgaagtcacactccagggcatgtaatgggtacagctagagttcaagcaggaaactgcagccctcctggtgaggagtgggatgccgggctacattttcagagcagctggaaatgaagagaagatgtccataaaggagaaggtcaccgaagggaaaccccacaatctgcaagtaaactccactgaaacctctggctgatcccttaggtgtgcatgggtagggaaaactccaaagggcccagcagaaagcaacacgtgtaaggtcaagagaactgagattccagctactgccaactgccaggcagacagactggggagtttgagtcaactcaagctaactgcttgctaacattgaaaaaaacaattaatgttctgctaaggaagaatgcaaaccccatagcctgtacacatgttaacaacatcaggtgcacatccaaaattaccaggtatgcaaagaaatatgaaaatgtgatccatagttaaaagaaaaagggatcaatggagatcaactccaagatgacctagatgcagatacagttatcagacaaggactttaaagaagttatgttaaatatgttcaaagacttaaaggaaaatatggttatcatgagtgactagatgaggtatctctataaaaaactgaaaatagttacaagaagcaaatgaaaattctagaactaagagtatgattcggaaatgaaaaacatcatttgaccaggcccagtggctcatacctgtaatcctagcactctgggaggccaaacatggaaggatcacttgatctcaggagtttgagaccaccctgggcaacatggtgaaaccccatctctattttattaaagaagaaaagaaagagaaaaacattacccaagtttaataacagattggacaagacataagaaggaactgaaaacttaaagatgcatcaatagaatatgtcaattctttttaatccaatccaaagaagagagagaaaaatactaaaaaatgaaaagagactcatcctgctggacaaggtgaagcattctaaaacatgtgaaactggagtccagagggggatgtaatacttccatgggaaaggtcaaccctaagctatatgcaaatgtacctgcgtaggctggtgtggtgggctgatggcatctccctggccaaatgtatgcccacctggaacctcagaatgtgaccttatttggaaatggggtctttacaaattaggttaaggacttgagatgatatcatactaaattttggatggatcccaagtccaaacactggtgtcctcataagaggagaggacaaagacatacatggaggtaagccatatgatgacaaaggagaagatgagcggtgtgtcaggagccacctgtgtttgtccatttgcattactgtaaagaaatacctgaggctgagtaacttatgaaggaaagaggttcaattggctcacagttctgcaggctgtataggaagtatggcaccagcatctgcttctggcgaggacctcaggaaacttacagtcatagcagaaggtgaagggagagcaggtatgccacatggcaagaatgggagcaagaggctgagggggggccccagacttaaacaactagactgtgtgtgagctgactggggcagaattcactcatcaccaaggggatgattctaaatcattcatgagggatcttcccccttgatctaatcacctcctaccaggccccacttccaacactgggaatcatattacaacatgagatttggaggggacaaatatataaaccatatccttccacccctggtcccccaaatctcatgttgcaaaatacaatcatgccttctcaacagtcccccaaagtcttacctcattccagcatcaacccaaatttcccaagtcccaagtctcatctgaagatgagtcccttccacctatcagcctatgaaatcaaacacaaattattgactcccaaaatacaatgagagtgcagacattgcgtaaacattcccattccacaagggagaagttggcaaaaagaaaggatctacatgccccatatatgtcagaaatccagcagggcagtcattaaatcttaaagctccaaggtaatctcctttgacttcatgtcccatatccagggcacattggtgcagggggtgggctcccaaggccttggaaaactctacccttgtggctttggaggatgttgcccctgtggcttctctcacatgatagagttgagtgcctgtggcttttccagattcagggtgcaaactgccagtggatccaccattctggggtctggaggacagtggcccccttcccacagctccactaggcagtgccctggtggggacattatatgggggttcaaccccacattctctttggcactgctctagtagaggttctctgtgagggctccatgctggcaggaggcttctgtctgggcacctaggctttctcatacatttctgaaatctagagggaagatgccaagcttccttcactcgtgtattctgggggcctacaggcttaacaccagatggaagtcaccaaggcttatagtggcttgcactctccaaagaagcagcctaagctatacttggggccctttgagccaaggctggagccagaggaaccaggatgtggagagcagtgtcccaaggctgcacaggcagcagtggccatggccatggcccacaaaaccatcctttccctcttggcctctgggcctgtgatgggaaagaccacctcagagatttccaaaatgccttcaaggccttcttccctttgttctggatatgagcacttagctcccttttagttatgctaatctctctagcaactggctgctccatagcctacttatatttgtctcctgaaaataccttttcttttctaccatatggccaggccatgaattttccaaattttttatgctctgcttccctttgttgatgaaaaaagccaaactctataaaacacttgacgagattgattctgagccacatgtgagagccatgaactgtggcacagcctcaaaaggtcctgagaacatgtgtgcaaggtgcttgggttgcggcctggttttatgttttagggagacatgagacatcaatcaatacatgtaaagtatacattcgtttggtttggaatggcaggacaattcaaagtggggaattccaaatcataggtggatttgaagattttctgattggcaattggctgaaaaatttaaattatctaaaaagttgaagtcagcaaaaagcaatgcttaagataaagcaggttgtggaagccaaggttcttgttatgtagatgaagcctccacgttccagagagaagagatggtcaatgtctcttatcagaacctaaaaggtgccagactcttggataaatctctcctgaatcaggaagagacctggaaagggaaaaagattctcgacagaatatacatttcctccacaagagacggctttgcagggccattccaaaatgtgtcagagaaatatattctggcataaaatactttaatttccttccatgcctgccaactgtcatgtgatgctataccagagtcaggttggaatttgatatcttattgctacaaagagtctgctttgtcagtcttaagctccctgttttaatgttaacaccggtcagctgagcctaaactccaacagggagagggtatagtgagggagtccaaaccaccctccccttcctgtcatggcctgaactggttttccaggtttctttggaatccccttgcattagcattttattttttcatttgcaccttttaaatatcagttccaactttaagtcattcctttgctcccatatcttaccatagactgttagaagcaaccaggtcacaccttagaaatgtctgcttagaagtatcttccaccagatgtcctaagtcatcactcttaaggtcaaacttccacagatccctagggcatgaatacaatgcagccaagttgtttcttaggatttaacaagcgtgacctttactccagttcccaataagttcctcatttccatctgagatttcatcagcctggctttcacagtccatatgtctatcagcattttggtgacaaccatttaatcagtctctaagaaattccaaactttccctcatcttcctgtcttcttctgagtcctccaaattcttctaacttctctgcctgttacctgattccaaagctgcttccaaattttcaggtatctttatagcaatgttccactcctcaataccaaatttctgtgttagtttgtgttactagaaaaaaaaatacatgaggctagtaatttataaagaaaagaggtttaggccaggcactgtggctcatacctgtcatcctagcattttgggaggcagaggcaggaggatcacttgagctcagaagtttgagaccaacctgggcaacatagtgagaacttgtcttgaaaagacaagaagaagggaagggtggggaagagcagaagggcagaagggcagggcagaagggaagggcagggaaggcagaagagaaggaaggaagggaggtttaattagttcatatttctgcaggccgttctggaaacacggccctggcatctgcttctggcgaggcctcagggagattgcaatcacagcagaaggcgaagggggagcaggcatgtcacatggcaagagggagcaagagaagaaagtggcacgtcccagacttttaaacaaccagctgtcacagggactaactgagggagaactcgctcatcacctgggagatggtgctaggccattcatgaggggtccagccccatgatctaatcacctcccaccaggcccacctccaacactgggaatcacatctcaacatgaaatttggagagacgcacatccaaactattgcaccacaggaagctggaagaggtggacggtcctcccctggagcactcagagacagccaccaacaccttgatctcagatttctgactcccagaactctgaaaaaatttttgttgttttaagccacatttgtgatattttgttacggcagccacagcacggatatagctggtaacagagttctttagcctccaaaatacaagcctggggtaaataactattgaatttggccacatggaaatcaggaagaatgtaataagcatcatcgatggacgggatgacctgggagatcgtggcaagtttaaagctaattggaagttggcaaccaaaaaatcctgtcttgcaaatggccaggaaattgccaagaaaacctttagaaaacatggttaaagatggagaaacccggatgactccctggtttctgaagaggtgcttaggcattgaagtgagactgatgagacttcacactgtacccttcagaagggcagacactcacgagataatcaaccacggctccctcgctgggaggcagacacagagctggaggcggcggccacaaactaggtgggcagagaggcgtcagcatcgggacttgcgggaggccctgggaaggaacaggcagcggtggggcctggacagccctggggaaaggaagttacttggaggagaccaggggcttgcatttgggccaaaaccaaggacaagagatcagctggtcccagggaactctggagcccaacaccccaccacgggtgcaggggcctgacaacccaacagagggctgtgggcaccgggcaccagcctgtggggggtctgaaggctgctgcccagccacacatgtcctggttctgaacaaagggttcaagagacacctggaaacctacccttctgagagcagcctcttagcctcagctggtattggcccctggtcaccccacatgccccgacagtggggcctggcctcagaaaggggcccctccatttgtactttctatctgatccttgacacagtgctaacaccaaagaccaaacccgaatcttggttcacatactctgcaaagaaatgactaagacaagttcttccggaggtcagttttagaacattattctgacttaattctgccttatctctgtgcaacaagaaaactatctgcacatctgtagtaaaatgtgaaggtaccttcattttgtttgtatactaaacttttaagaaatacctcactttttaaaacttggttttgtgttttgtatgcttataatattttccataatagatcattttaatgataaactctgaatcttctgacagaatgcagatcaatggattcctggccatcagggaggcgttgattgcaaaggggcctggtggaatatttggagagattctacatcttcttgcaactgttcatctggattacggtggtggttgcatgagtgtgcatttgttgaaactcacatgtcacaggatggattatactgaatgtaaactacacttgcgtaaatatgacttttaaaactttaaaaagttgggggatggttcactgccccggctcgaagccccctggccacgctgcctggccagcccacccgcatccctgccagcgcttgcctccagcgtcccaacagcctcctgaccccctgggctgctctaaaccctcaggagcgcagccatccgggatcagctggatggagatggggagcccgagactcgtgccacaccacgtcctcccacccccaccagccacacgcagacgtcaaagcagcactgtcctcgcacgcgctgctcccacccaccctggcatggccattccaggcctggggcaggaaggcagatgctccccctgcccccagacacaagcattcctgcacatacccccagcacacacacacactcccatgcgcacactgacacacacaggtgtgtgcagctgagacacagcccattcccaggcagtccagcccccgtcactgagggaaaggggcagcaccacggggccacaggagtggcagctggacacagagccaggcgctggcgaaggcccaggccactgaggcgggctgccggcatggctgggcgtgaaggccagaagagggcaggaggggccgtaggcactgtgcctattgggcctaggtgggcacacgcctggcaggagaggaacagcccagcccctgaggaaggggtgggggcaggggccatttctggaggccagggcagggccagcaccccaaggaaaagcagagcagggtgagaacggacatggggctcagagctgagcaggcctgctgggccccaggagggagacacagacgaccggggatctcaaggctggcagaggccagagatggagccccacctgggatgccatcctccttcctgggggcccaccctgcccggcccctccagcccagcacagcttggggcattggatagaaccgggagagagccgaccaggcactgaggcccctgccccaaatgcccacagcctggggaaaatgagcaggtacatgggaggggcaagtggagccccaggcacacccacacagtgcacacggcctcacctgggccggagggggcaggaggctcgccaccccgctgtggtttctctcctaatctcaccctgggtttctgccacacttgatgcaggtgatgtttctctgacattgtggactaagagttggtgctggaaggggttagccatcttggagatgttgctatggggtgcagggattttgcgtgtgagaaggacatgattatggggggagcggagggcaaactgtcatgggttaaaatgtgtcccctataaattcatgtgttgaagtcctaacccccaggaccacagaatgtgaccttgtttggaaacagtctttgcagctgcaatcaagttcagatgaggtcaccctggagtagcgcaagcctctgatccaatatgactgctgtcctcatgaaaagggggaatctgggcacagacagcacgtggggagaacgccctgtgaagatggtgctgcttccataagccaagagcagcagagacggccggcaaagcccagcagcagggagagagcctgggacagagtctcccatgacacagaggtgccagccccaccgaggcctccatcccagatgcccggcctccagaaccaggacggaataaacgtctgttgtttaagccacgcagtctggggtgctgtgttgccagggccacagttaacggatacgagtgttgtcctgagctgccagccccacaggctgcacgaggcctccctgccccagcccagtgcagactccccagccccctgggtgtgccatgggcagtgcggggacccctcactccgtcctcccccagcctgggaggttgagcccattatgagctccatggggtgaagctggaacgagaggctgggagccgactgggagcctgcggctggaggatggatttccccagggacccacacgtgcacctccacctgtctcctggacattctctctgagggcagggctggtgccagctcagggatccagcagggtcacaagggcaggccgggtccttgtggagagcacatttagtgggagggacatgatttcccttcaaagtgcccattctggacgcttcccgttccatgctggacgcttcctcttccacgctggatgcttcctgttccacactggatgcttcctgttccacgctggatgtttcctgttacactctggatgcttcctgttccacactggatgcttcctgttccatcctggatgcttcctgttccatgctggacatttcctgttccactctggatgctccctgttccatgctggatgcttcctgttccatgctggatgcttcctgttccatgctggacatttcctgttccactctgcatgcttcctgttccactctggatgcttcctgttccatggtggacgtttcctgttccactctgcatgcttcctgttccatgctggatgcttccttttccattctggatgcttcctgttccatgttggatgtttcttgttccactctggatgcttcctattccattctggatgcttcctgttccatgctggacatttcctgttccatgctggatgctttctgttacatcctggatgcttcctgttccatgctggatgttttttgtttgactctggatgcttccagttccattctggatgcttcctgttccatgctggatgcttccttttccattccgcacaattcctattccattctggacacttcctgtgcgacacctccttgggttttctgtctgcccagtccctctatcctcatcccgttccctgctacctcccacctccacaatcgtccttgcccagctcctccctctctctagagcttcggcctggcaaggtccctcctgatctcagtccaggctcccccagcacaggtaggagcctagcacctgcccttggacctccccaccctgcatggtgccagcatcccccggtccccagggaggccccatttctctctctgcttgtagtccagtggccctggagtcccactgcaactcgggtgtgcccctgacctctgaggaagttaagtgtcctgtccctagccaggctatcccgtctgctcagccccagggccctgcccccaaccccttcccctcacctgcaccacaggctctggccaactctgcccaggccctgaatgggcccctctggctcccctctgctgctacactgccctgcaccacctccactcagcttcagtgtgttcatccacctgtcccaagtcccctcggcccccaggagcacagctggtggccctggctcctggcagcccatcttgttccttctggagcaccagcctcagaggccttcctgtgcagggtccacttggccagccctgggaccctcctggtctcaagcacacacgttctccctgcagccagacctgcccctgcctgtgagctcagccctgagccttggaatgccttcccatctccatcccagctcgcctttgccagctgctcagcaggatgaactcacactcccctccctgcaccatgagtcagagccagctggagacacgcccaggccaaagcagccaccagggcctagtgggggccagaagcttcagatgagaggcccaggtattgagaggctgagatcacgggcagaatggtcataatcgctgccagtatcagtccagccccagggactcagagacagagaaaagagcagcacacaaggtctgggctccccaccttctcccgtgagtacgggggagtatgggggcagccaccacccccatccccacacacccatgaggcagcctcggctgtgtctggactccccctcgccctctgacccagaaaccaccagaagaaaagggaacttcaggaagtaagtggtgccgccggtttcaatcctgttcttagtctttgcagcgtggagttcacacacctggggacctgggggccgagctgtgatttcctaggaagacaaatagcggctgacggcaggggcggggctgcccacatgtacctcgccagaacaggaagggctgagacccccacctcggtgagtggggtcagcacagggcaggggcacaggctcgggaggaggacagagcctgggggcagccgtgggcgctcctggacctgagatgctgaacaggctccaagaggctggggagacatggggtcgaggccggccccacatggaggcccaagcggagccagcacgggggaggtgggcagccttcaggcaccgatgcccacccagtgcgagacgacggggaccgtgggcaggggcttccaagccaacagggcaggacacaccagaggctgactgaggcctccaggacgaccgggctgggagcacgaggaacatgactggatgcggcagagccggccgtggggtgatgccaggatgggcacgaccgacctgagctcaggaggcagcagagcgagggaggaggagaggccccaggtgaacggaggggcttgtccaggccggcagcatcaccggagcccagggcagggtcagcagtgctggccgtggggccctcctctcagccaggaccaaggacagcaggtgagccgggagcagagcagggagggtgagtgtggcagcaggacaggagggtggaagccaaggagcccagaggcagaggcagggacaggggaggcacaggggctgggctcagagccagctgatggggttggggcacctgctggcggggagcagggctgtggtcagcagtggagaggaggggagagctgtgctgagtgcacgggcgggagaagggaagagtccagggaggcccagaaaggcccagagtgcagcaggcctggggcgaggggaagggctgaggctccgtgcgttcagggaactgacccagcagagcagaggccactgaggagctgaggttccagagaggcttccagagcaggagcagtgcagggacaggaggatccgggagctcattcaggaggggcacatgggcaagggcaaggggctctgttggggagacctgactggacactggggctgctccacagcatagggaacacgccaagtgctgcaaaatcaaaaatgagggcagaaaaacagcccaaacctggacagagggtgccaggacaggcaggggggcaacagtgacctgagtgacattgctgcccgggttgagggagggcagagtgagcagggagcaggcattggagctcagggaccaggaccaagcagccacaggtgagcagggcaggtgggggcagaaggagcagggggcacctcctggagctcaggggaccagggcagagcagcctcaggtgagcaggggctggtgggcggcaggatgagcagggggaagaccctggagctcaggggaccagggcagagcatcagaaggtgagcatggctagtgggagatgggcaagcagggggcagcccctggagctcaggggaccaggacagagcatcaggaggtgagcatggctagtgggaggtgggcgagcagggggcagcccctggaactcaggggaccagggcagagcagccgcaggtgagcacgggctggtgggaggcgggaggaacagggggcagctcctggacttcaggggaccagggagggcatctgaaggtgaacaggggccagtggggggcaggatgagcagggggaagctcctggagctcagggagccaaggcagagcagccgcaggtcagcaggggcaggtgggaagcatggggagcaggtgggcagcccctggagctcagagagccagggcagatcatccacaggagagcaggggctggtaggaagcaggaggagcaagtgggcagcttttggagctcagagcaccagggcagaagagcctcaggtgagaaggggcaggtgggaggcagaataagcaggggacagcccctggacctcaggagaccagggcagagcatcacaacgtcagcatggctggtgggaggtgggcgagcagggggcagcccctggacctcagagagccagggcagatctgcaggtgagcaggggcaggtgggaggcaggaagagcaggaggcagctcctggagctcaggggatcagggcagagcagccacaggtgagcaggggcaggtaggaagcagaaagatcaggggtcagcccctggagctcaggggacaaggggagagcatcagaaggtgagcaggactgaggctcagcctcagggagccagggcagagcagctgcaggtgagcagggccggtgggaagcaggaggagcaggtgggcagcccctggagctcagagagccagggaagatcatccgcaggtgagcaggggctggtgggaagcaggaggagcaaggggcagctcctggagctcaggggaccagggcagagcagtcgcaggtgaacaggggcaggtggggggcaggaggagcaaggagcagctcctggagctcaggggaccagggcagagcagtcgcaggtgaacaggggcaggaggagcaaggggcagctcctggagctcaggggaccagggcagagcagccgcaggtgagcaggtgcaggtggggggcaggaggagcagggggcagctcctggagctcaggggaccagggcagagcagccgcaggtgagcaggggcaggtggggtgcaggaggagcagggggcaggcactggagctcaggggaccagggcagagcagtcgcaggtgaacaggggcaggtggggggcaggagtagcaaggggcagctcctggagctcaggggaccagggcagagcagtcgcaggtgaacaggggcaggtggggggcaggaggagcagggggcagctcctggagctcaggggaccagggcagagcagccgcaggtgagcaggtgcaggtggggggcaggaggagcaggggtcaggcactggagctcaggggaccagggcagagcagccgcaggtgagcaggggcaggtggggggcaggaggagcagggggcaggcactggagctcaggggaccagggcagagcagccgcaggtgagcaggggcaggtggggggcaggaggagcagggggcaggcactggagctcaggggaccagggcagagcagccgcaggtgagcaggggcaggtggggggcaggaggagcagggggcaggcactggagctcaggggaccagggcagagcagccgcaggtcagcagggccggtgggaggcaggacgagcaggggacaggcactagagctcagggcaaggcagccacaggtgagcagggctggtgggaggcatcactcagctcctagactttggcaggagctgggtagttgctggcaacagacagctgagggctggtgaaagtgcagtgcagcctcctggtgccgggaagggagtgtgagtccatcccactgagcagttggcaagggcgagctgggatggagaagggaaggcgttccagggctcagggctgagctctcaggcaggggcaggtgtggctgcagggggaacgtgtgcttgagaccaggagggtcccacggctggtcccagcggaccctgggcaggaaggcctctgaggctggcgccccagaaggagcaagatgggctgccaggagccagggccaccagcacaatgaagctgagtggaggtggtgcagggcagtgtagcagcagagggcagccagaggggcccattcagggcctgggcagagtcagccagagcctgtggtgcaggtgaggggaaggggtggtgagcggggccctggggctgagcagaggggatggcctggctgagggcagggcgcttagcctcctcagaggtcaggggcacaccccacctgcagtgggactccagggccactgggccagcggcagagagaaatggggcctccctgtggcctgggggtcctggcaccatgcagggtggggagggccaagggcaggtgcaaggctcctacctgtgctggggggcctgggttgagcccagcagggaccttgccgggggaagctctggagagagggaggaggtgggctggtggccgagaaggccaggccagggctgggagggtgacggtgtggtgactgagcctccagaagtaatgcaggacactgggaggcagggggcatccaggcactcagggccctgacctgggctgctgcacactggggctaaggggaaaggaggggagaggctgaggaggaggctccaggaggctattccaaggcagggggttccggggccctggggctgaagggcgccgaccctatgcagtgtctggcccctctgctgcacagaagaaaagggccttggagggcagagggcaggctatgaccagggccctgggcaagtcaggccaactcactaggggagggccacgctggggcggcagggtcaggggcttcagggggctcgggggacccacgagaagccatctgagaacagtgtccactggtcaagccaggcacccataaaaggctggagtggggccaatgggcatgagccgtccctgaggtggcaccgatggccagagctgaggccaagctagaggccctggactgtgctgactcccggcagacacagagcgctgacctggctgccgagccccgcctcctaggctgcaggggtgcctgcagaagggcaccacagggccaccggtcctgcaagctttctggggcaggccgggcctgaccttggctttggggcagggggtgggctaaggtgacgcaggtggcgccagccaggcgcacacccaatgcccgtgagcccagacactggacgctgaacctcgcggacagttaagaacccaggggcctctgcgccctgggcccagctctgtcccacaccgcggtcacatggcaccacctctcttgcagcctccaccaagggcccatcggtcttccccctggcaccctcctccaagagcacctctgggggcacagcagccctgggctgcctggtcaaggactacttccccgaaccggtgacggtgtcgtggaactcaggcgccctgaccagcggcgtgcacaccttcccggctgtcctacagtcctcaggactctactccctcagcagcgtggtgaccgtgccctccagcagcttgggcacccagacctacatctgcaacgtgaatcacaagcccagcaacaccaaggtggacaagaaagttggtgagaggccagcacagggagggagggtgtctgctggaagccaggctcagcgctcctgcctggacgcatcccggctatgcagccccagtccagggcagcaaggcaggccccgtctgcctcttcacccggaggcctctgcccgccccactcatgctcagggagagggtcttctggctttttccccaggctctgggcaggcacaggctaggtgcccctaacccaggccctgcacacaaaggggcaggtgctgggctcagacctgccaagagccatatccgggaggaccctgcccctgacctaagcccaccccaaaggccaaactctccactccctcagctcggacaccttctctcctcccagattccagtaactcccaatcttctctctgcagagcccaaatcttgtgacaaaactcacacatgcccaccgtgcccaggtaagccagcccaggcctcgccctccagctcaaggcgggacaggtgccctagagtagcctgcatccagggacaggccccagccgggtgctgacacgtccacctccatctcttcctcagcacctgaactcctggggggaccgtcagtcttcctcttccccccaaaacccaaggacaccctcatgatctcccggacccctgaggtcacatgcgtggtggtggacgtgagccacgaagaccctgaggtcaagttcaactggtacgtggacggcgtggaggtgcataatgccaagacaaagccgcgggaggagcagtacaacagcacgtaccgtgtggtcagcgtcctcaccgtcctgcaccaggactggctgaatggcaaggagtacaagtgcaaggtctccaacaaagccctcccagcccccatcgagaaaaccatctccaaagccaaaggtgggacccgtggggtgcgagggccacatggacagaggccggctcggcccaccctctgccctgagagtgaccgctgtaccaacctctgtccctacagggcagccccgagaaccacaggtgtacaccctgcccccatcccgggatgagctgaccaagaaccaggtcagcctgacctgcctggtcaaaggcttctatcccagcgacatcgccgtggagtgggagagcaatgggcagccggagaacaactacaagaccacgcctcccgtgctggactccgacggctccttcttcctctacagcaagctcaccgtggacaagagcaggtggcagcaggggaacgtcttctcatgctccgtgatgcatgaggctctgcacaaccactacacacagaagagcctctccctgtctccgggtaaatgagtgccacggccggcaagcccccgctccccaggctctcggggtcgcgcgaggatgcttggcacgtaccccgtgtacatacttcccaggcacccagcatggaaataaagcacccagcgcttccctgggcccctgcgagactgtgatggttctttccacgggtcaggccgagtctgaggcctgagtggcatgagggaggcagagtgggtcccactgtccccacactggcccaggctgtgcaggtgtgcctgggccgcctagggtggggctcagccaggggctgccctcggcagggtgggggatttgccagcgtggccctccctccagcagcagctgccctgggctgggccacgagaagccctaggagcccctggggacagacacacagcccctgcctctgtaggagactgtcctgttctgtgagcgccctgtcctccgacccgcatgcccactcgggggcatgcctagtccatgtgcgtagggacaggccctccctcacccatctacccccacggcactaacccctggcagccctgcccagcctcgcacccgcatggggacacaaccgactccggggacatgcactctcgggccctgtggagagactggtccagatgcccacacacacactcagcccagacccgttcaacaaaccccgcactgaggttggccggccacacggccaccacacacacacgtgcacgcctcacacacggagcctcacccgggcgaaccgcacagcacccagaccagagcaaggtcctcgcacacgtgaacactcctcggacacaggcccccacgagccccacgcggcacctcaaggcccacgagccgctcggcagcttctccacatgctgacctgctcagacaaacccagccctcctctcacaaggtgcccctgcagccgccacacacacacaggggatcacacaccacgtcacgtccctggccctggcccacttcccagtgccgcccttccctgcagctggggtcacatgaggtgtgggcttcaccatcctcctgccctctgggcctcagggagggacacgggagacggggagcgggtcctgctgagggccaggtcgctatctagggccgggtgtctggctgagccccggggccaaagctggtgcccagggcgggcagctgtggggagctgacctcaggacattgttggcccatcccggccgggccctacatcctgggtcctgccacagagggaatcacccccagaggcccaagcccagggggacacagcactgaccacccccttcctgtccagagctgcaactggaggagagctgtgcggaggcgcaggacggggagctggacgggctgtggacgaccatcaccatcttcatcacactcttcctgttaagcgtgtgctacagtgccaccgtcaccttcttcaaggtcggccgcacgttgtccccagctgtccttgacattgtcccccatgctgtcacaaactgtctctgacactgtcccacaggctgtccccacctgtccctgacgctgtcccccatgctctcacaaactgtccctgacattgtccccaatgctgcccccacctgtccaacagtgtcccccaggctctccccacatgtccccgacactgtcccccatgctgtccccatctgtccccaacactgtcccccaccctgtccccctttgtccccaacactgtcccccacagtttccacctgtccctgacactgtcccccatgctttccccacctgtccctgacaccatcccccactctgtcccctatagttcctggccctgtcccccacgctgtcccctacagtacctggcactgtcccccatgctgtcccctcctgtatgaaaccctgtcccacatgctgtccccacctgtccgtgacaatatcccccacactgtccccacctgtccccgacactctcctccacgttgttcttacctaaacccgacactttcctccatgctgtccccacccatctccgacactgtaccccacgttgtccccacctgtcctcaacactgtcccccatgctgtccccacctgtccccaacactctcctccatgctgtccccacctgtccctgatattgtcccccatgcagtctccacctgtccccaatgctgtcccccaggctgtacctaccagtacaacactgtcccccatgctgtccccacctgtccctgacactgtcccccacgctgtcccctcctgtccccgacactgtcccccacactgtccccacctgtccccaacactatcctccatgctgtcccctcctgtccccacctgtcccctacactgtcccccatgctgtccccaccagtccccaaaactttcctccacactgtccccacctgtccccaacactgtcccccacgctatcccccctgtccccgacaatgtccccactgtttcctcctgttccctcctatccctgacactgtccgccatgctgtccccacctgtccctgacactgtctcccactctgtcccctataatccctgacactgtcccccacgccgtcccctcccgtatgcaccactgtcccccaagctgtccccacctgtcctcaacacagtcccccatgctgtccccacctgtccccaacactctcctccatgtccccacctgtccctgatattgtcccccatgcagtccccacctgtccccgatgctgtcccccgggctgtacctaccagtccaacactgtcccccacactctccccacctgtccctgatactgtcccccatgctgtccccacctgtcccggacactgttctccacgctctcccctcctgtccctgacactgtcccccacactgtccccacctgtccccaacactatcctccatcctgtcccaacctgtctcctacactgtcccccatgctgtccccaccagtccccaacactgtcctccatgctgtcccccatgtccccaacactgtcccccatgctatctcccctgtccctgacaatgtccccactgtttcctgtcccctcctatccctgacactgtcccccatgctgtccccacctgtcccccacatggtctccaccggtccctgacactgtctcccactctgtcccctataatccctgacactgtcccccacaccgtcccctcctgtatgcaccactgtcccccatgctgtccccacctgtccctgatgctgtcctccacacagtccccacctctccctgacactgtccccatctctccccaacactctcctccatgctgtccttaactgtccccaacactcttccacactctgtctccacctgtccctgacactgtcccccacactgtcctcacctgtgtctgacactgtcccccacgctgtccccacctgtccctgacgctgtcttctgtgctgtccacatgctgttggtgccctggctctgctctctatcaccaagcctcagagcaggcagtggtgaggccatggcacctgggtggcatgaggggccggatgggcctcaggggcagggctgtggcctgcgtggactgacgggtgggtgggccttgggggcagagaggtggcctcagtgccctgaggggtgggtggggctcgggggcagggctgtggcctcgctcacccctgtgctgtgccttgcctacaggtgaagtggatcttctcctcggtggtggacctgaagcagaccatcatccccgactacaggaacatgatcggacagggggcctagggccaccctctgcggggtgtccagggccgcccagaccccacacaccagccatgggccatgctcagccaccacccaggccacacctgcccccgacctcaccgccctcaaccccatgactctctggcctcgcagttgccctctgaccctgacacacctgacacgccccccttccagaccctgtgcatagcaggtctaccccagacctccgctgcttggtgcatgcagggcactgggggccaggtgtcccctcagcaggacgtccttgccctccggaccacaaggtgctcacacaaaaggaggcagtgaccggtatcccaggcccccacccaggcaggacctcgccctggagccaaccccgtccacgccagcctcctgaacacaggcgtggtttccagatggtgagtgggagcgtcagccgccaaggtagggaagccacagcaccatcaggccctgttggggaggcttccgagagctgcgaaggctcactcagacggccttcctcccagcccgcagccagccagcctccattccgggcactcccgtgaactcctgacatgaggaatgaggttgttctgatttcaagcaaagaacgctgctctctggctcctgggaacagtctcagtgccagcaccaccccttggctgcctgcccacactgctggattctcgggtggaactggacccgcagggacagccagccccagagtccgcactggggagagaaggggccaggcccaggacactgccacctcccacccactccagtccaccgagatcactcagagaagagcctgggccatgtggccgctgcaggagccccacagtgcaagggtgaggatagcccaaggaagggctgggcatctgcccagacaggcctcccagagaaggctggtgaccaggtcccaggcgggcaagactcagccttggtggggcctgaggacagaggaggcccaggagcatcggggagagaggtggagggacaccgggagagccaggagcgtggacacagccagaactcatcacagaggctggcgtccagccccgggtcacgtgcagcaggaacaagcagccactctgggggcaccaggtggagaggcaagacgacaaagagggtgcccgtgttcttgcgaaagcagggctgctggccacgagtgctggacagaggcccccacgctctgctgcccccatcacgccgttccgtgactgtcacgcagaatctgcagacaggaagggagactcgagcgggagtgcggccagcgcctgcctcggccgtcagggaggactcctgggctcactcgaaggaggtgccaccatttcagctttggtagcttttcttcttcttttaaattttctaaagctcattaattgtctttgatgtttcttttgtgatgacaataaaatatcctttttaagtcttgtacttcgtgatgggagccgccttcctgtgtccacgcgcctcctgcccccggtggaaaacacggtcaggaggaggctggtccagctgcacctcgggggctccctgcatacgccccccgcctcctgcagccacacgcattgcccgagcgaccctccctggcccctgtcactacatggacccccggggcttctcctcttttctacatggatgcagtttctcctcctgctgggcacggtgctgcctgccctggtcactctgcgggggacagggcctccagggaaagctgggtcgaggctgggagctggctcaggctggccaggcagagccacagggagggccttccagaaccaaccatggtccgaagcgagaggtgggtgtcagatctgtgtgcgtcagctcaggaccacagcggggcagctcccacggcagacatggatcctcccaggcctagagaccaggaatctgagatcaggatgcaggcagggctggtttctctcaagccctctctccttggcttgtagacaccgtctcctccctggtcctcacatggccatacctctgtgtgcccgtgtcctaagcttctcttcttagaacacacatcggattagattagtgaccccctatgaacttaatgacctctgtaaagaccccatctccaaatagtcacattgtgaggccagggattaagacttgaatatatgaatttgtaggggccacgatttaacccatcacagtccagactctggcccccaaaattcatgttcttctcacatgcaaaacacattcatcctgtctcagcatccccctgggcactaggtcatgtagcaaggacggattctcaacagaaataactattgcaacggaagaaagagtccggcatgacctggactcaccttcatctgtgcagaggccacagccttgtaaagggaggtggtagggggagcagggtgggtgctcggggctcagtcgttggggaagggaaaagtttcccagcgctggtcagcgtccccgggatgggacccgctgtgtccgtgccggccactgttgaggtcaggattctgtcctcccagagcctggagacacaggccccatccttcacaaaggggacacttcagggagtggctctcaggtcccgagaaagaccctcctgggtcacaggaaatgcacagacatcaggaacggatagaaggtcgtgtggttgcggccctctcagcagataccctgagaaagggaggtcggggttggtccaaacggtgagttctggtgcacggagctttctcaggcaggtgttgacggggcaggggtcggcctaggggtacggccagaagctgttagaaactgttagtgtctgctcaagtctttacaagccaaggttgaggccgagtggagaggctccgaggagcctggctggaactcagtcaaggacagggtcttgttactgcagtggctgcggtggctgcggtggctgcgaaatgccgtcggagttgcctgtggcaggagagagaccatctcacccaggaaggaggagtggttggattcgtttgtgtggcatcgagcagctggagcttcaccaaacacagagttggggatgaaatccccagagcccggaccctgccatgccgtgggaaggctcgctgctggagggtgggctccagggggcctggcctgaactgggtgctgaagcccagccctttaactctcaggacacgctgctgcagccccgcggggggtgagggagacagcacctggggtgcagggcgggcagctgctgcatcaccggctctatcccaagcccaaggatggcgtcccagagatgcaggagagctttgtccagagaaggtgccagccctcagggaccctgctggacagctctccaccctctgcccttcaaggggccctacgggcctccgggtgccctggtggggtgggctccagtccactgtctgaggatggacggcctggccaggataaggaaaggagacccaggacggtgccgggctccgggtcattccgtgcactgagcaggctgagttgggaagaagcagatgcttcctgcagctcctgcccctgcagggcctggcgcctggaccaggttcccctggggaaattgggcccctccctgagccacccggggcccacctcccactttctacctgggaccgagcatcctccagagggtcagccctcctgcgggaacaccatgcccagccccaggaccctccctcaactctccagcaaggctgcccctgcacgcccccagcagcccatgctgtgatgtagcatgacatcatgtgatgtggtgtgatgtcctatgacagggtgacatccctggtgtgatgtggtgtgatgtggcgtgatgtcctttgtgtgatgtggtgttggactacatggttggacatagtgtgatgtggtgtgaccgagtgtgacatccctggtgagatgtggtgtgacatggtgtgaggtgttgtgacatggtgtaatgtccctggtgtgaggtggtatgacatggtgtgaggtgttgtgacatggtataatgtccctggtgtgaggtggtgttggacatgatgtgatgtggtgtgacagagtgtgatgggtatgacatccctggtatgatgcggtatgagattatgtggtatggtgtgacatgatgtgatgtggcgtaacatccttggggtaatggggtatgatgtcgtttgacgggtgtggtggtgtggggtgtgatgaggtgtggtgtgacatgatgtgacctgtgacgtgctgtgtcagggtgccacatccttgctgtgatgtgatgcggtgtgacacggtgtgatgtggcatgatggggtgtgacccggtacgacatccccagtgtgatgagttaatggtgtgatgtgtgacatccctagtgtgacatagtgtgatgtggtgtgatgaagagggcctcgccctccacagctgtgggtatttctcatcaggtggaaacacgagactgagaaaagaaataagacacagagacaaagtgcagagaaagaacagtgagcccaggggaccggcacactcagcacgcgaggacctgcaccggcaccggtctctgggttccctcagtatttattgatgactattttcactatctccatacggggagtgcggcaggagaacagcgtgaacagggtgatgatggggagaaggtcagcaggaaaacatgtgagtaaaggaatctgcatcataaataactcccagggaaggtaccgtgctgggatgtacacatagactagatttatgtttctctttacccaaacatctcagtgtagtgaagagtaacagagccgtatcaccgctagcatatcttgtctccagccttagggcggttttctcctacctcagaatagaatgaatggtgggtgtaaagcccagacattccattcccagggacgtgcaggaaacagaggccttcttcttatctcaaccgtaaagaggccttcctcttttaccaatcctcctcagcacagaccctttacaggtgtcaggctgggggacagtcaggtctttcccttgccatgaggccatatctcaggctgtctcagtgaggagaaactgggacaatacctaggctttctccggcagaggtcccttcagctttccgcagcgtattctgtgcctagttaacagagaatggagaatggcgatgacttctaccaagcacactgcctgcaaacgtatcgtgaaccaggcacgtcctgcgcagccctaaaccccttaaaccttgattccatgcagcacaggtttctgtgagcacagtgttggggctaaagttacaggttaacagcgtctcaaagcagaacaatttttctttgtacagatcaaaatggagtttcttatgtgttccttttctacataggcacagtaacagtctgatctttcttttccccagtgtgacatggtgtgacgttcctggtgtgattcttgtgttgtgacatttgtggtcaccccaggatacagaggtctctgtggccaagggaagggggagaatggaaccatctgagcatgttgacctggaggaattggtggcccttgagtccacgaagcccacccttccaggtgcccctgccccacgtgacccaagtgggcttgcagagcagcaagcaggactctggttagacaggaggaaggacctgccaccacgtggccttgtgaggagacagagcgaggctgtgacctcggcgtccgaggcaggctgaagagacgggcagagggaggatgctggggaggcaggggtgaggggagtgagagcccaggtttcagctgagcccctccacagggaaggagcctagctgaacacccatctccccacacactcccaaccctgcctctgcccgaccacctcccagaaggcacctcgacccctctgctacccacactcagcaaggggtatggtgtccccaccgagtccagccagtgaggcccggcacagccacgcctgtgcccaccactcccatggccaagctcgctgctaacatggcaggacagggccaggcctggaggagacagaacatcagtcccatggggaagctccctgctcacacggcagggccgggcctggagaagacagaacaccccatccggcatggtactcaggctgcacatgcctgccacgaacgggggccacgcgacaatgctgccacgcacgggggacacacgacaatgcctgccatgcatagtggccacacaacaatgcctgccacgcgtgggggacacgcgacgatgcctgccatgcatggggacacgtgacacacacatacacacacgggcctcacaggcacacgaatgtttgcaaccccagcacccacccagcacactcaggcacaggctccctgggcgggtcacaacctcacaccttgagctactccatgtgccaggctcttcacccacgttcccgtccccggtgctagctattgagccacactgtcttctctgtggatccctcccagcccactcagcacaatggacatgctctctaccatccagtgactgcaccggcctcttcccctcagcacccacgtctggccatctcccaggaaacccggaccaccacgggcagggaccaccttcctcactgtccacatggaccaccccacacctgacctcagatgcagtcacactacgtcctgcttcaatattgaaagggggaaaagctggaggagggtaaagatgaaagagaaaaaagcaagaggggagggtcacattcttctgaggctttgattacatctcactgagccccccacgttgcatgaaaaggaggggtggagggagcaattacgcattcgccttgtgctcactaaatctacactttataagcaaataaacagagtagaggaagaagtcaaatatgcattcgtctcaggggtaggagggacgatttcttgtctcattttgtcccatgtcatgaagaccagctgttaatttatattctcagggtgagggaggccacctgggtagacctggcctatctgctgctgctatcagtttggaaacaaaaggaaacgcatgactttttttttttttcatgactcagcttcccacctcaacggttcattttggcatagtgagtttggagtcctgagattttattttcctttcacaatggtcaagatcgcaccctcagtattcaggagagctggtccaacccagacccctgctgtccctggacacttgaaatacgtgctgcagtctctgacactctctcaccatggtagaaactgaggtcttggcgagtctgcagcccctgctcatggggacaatgcaggctgaaacccgcatttctgacctcaaagctcctgttcttttcactcacccccacaccacctctttgagtccagagctttgtccttgcctgagtcctaccctcagggacaggggcccaacccagacaccaacacatcataccctgagagggtgccaggagcccagagatgtttggagagcacagaagccctggaggctctgtggagatgctgcacatttctctattcaacagatactcaccaggtggccagcggcagagatgccacatggcatggagctcgccttggccaacaggacaggtgtggggttgggaggccttcccacggcactccttgaagcagagctgtggggaaaagttggggccaacctcagatctccccatcaacaccggttctcctgccctcccgggccacagaaaactaagctccctggatactgcggctgggtggggccatgagggagaagaaatcacgagttaagagatcattttttaaaagtattatgatcaggactcacataaacatatgacgacacatttcagagatgctctttatctcattaattaaggtgttgcaaccagttcaaagtggaattctaagtactacacttacataattgattcaggaatactaaaaggagttcatagatagatgcaaaactggccttttccctggcagaggaggagcaattcattgtcctttcaaagatgagaacttggatttctaccaactcaaagagtttttgcattgctatcaattatgtacaacttagagccgtggtccccaacatttttggcaccaggaaccagttccatggaagacaatgtttccacagaccaggatcgggggatggtttggggacaaagctgttccacctcagatcattaggcattagggtgtcataaggagcatgcaacttagatcccgggaatgtgcagctcgcaatagggttcgctcctatgagaatctaatgctgccactgacctgacgggaggtggagctccggcaggaatgctcacacacccctcacctcctgctctgtgtcccagttcctaacaggccatgaactggttccagtgcatgacccaggggttggggacccctggcttatagaggtgtaaaatagttcaaaggaaataaaagatgcagagctccatagaataaaataacttggaagagtctacaagacgatgccttgctttccatggaaggcaccaagtaatcatttggtccatttcagtttttctcaatgtttcctataaacatatataactgactgacacaaacagatccataatataaagaagacccctgtaaaccaatgagaaaaaaaaatcaaataatctaatgaggaataggcaagagaattgaacagatgttttacagaagatatccaaatagccactaaacatatgaaaacatgttgaaccacactagtcaacagggaaatgaaaatgaaaaaccacgtgagagaaagtagttctgattccaataatgctggagcagctaatatcagaccagccctttggcagaaggcaattataaacactggaaatgctgtaagcacacacaacacccacacacaccaattgcaggcactgggacatgaccagaagtaggcaaacactagtaaggattattccgtgaaatattcgtctgaagtcacaccccagtgcaggtaatgggtgcagctagagtttaagcaggaaactgcagccctcctggtgaggagtgggatgcagggctgcattttcagagcagctggaaatgaagagaagatatccgtaaaggagaaggtcaccgaagggaaaccccacaatctgcaagtaaactccagtgaaacctctggccgattccttaggtgtgcatgggtagggaaaactccaaagggtccagcagaaagcaacacctgtaaggtcaagagaactgagattccagctactgccaactgccaggcaggcagacttgggagtttgagtcaactcaagctaactgcttgctaacattgaaaaaaacaattaatgctctgctaagaaagaatgcaaaccccatagcctgtaccacatgttatcaacaacatcaggcacacatccaaaattactatgtatgcaaagaaacatgaaaatgtgatccaaagtcaaaagaaaaagggatcaatggagatcaactccaagatgacctagatgcagatacagttatcagacaaggactttaaagaagttatgttaaatatgttcaaagacttaaaggaaaatatggttatcatgagtgactagatgaggtatctctataaaaaactgaaaatagttacaagaagcgaatgaaaattctagaactaaaagtatgattcggaaatgaaaaacatcatttgaccaggcccagtggctcatacctgtaatcctagcactttggaaggccaacaaggaaggatcacttgacctcaggagttggagaccagcctgggcaacatggtgaaaccccatctctattttattaaaaaagaaaagaaagagaaaaacattacccaagtttaataacagattggacaagacataagaaggaacagaaaacttaaagatgcatcaatagagtatatcaattctttttaatccaatccaaagaagaaagagaaaaatactaaaaaatgaaaagagattcatcctgctggagaaggcgaagcattctaaaacatgcaaaactggagtccagagggggatgtaatacttccatgagaaacgtcaaccctaagctatatgcaaatgtacctgcgtaggctggtgtggtgggctgatggcatctccctggccaaatgtatgcccacctggaacctcagaatgtgaccttatttggaaatggggtctttacaaattaggttaaggacttgagatgatatcatactaaattttggatggatcccaagtccaaacactggtgtcctcataagaggagaggacacagacacacatggaggtaagccatatgatgacaaaggagaagatgaggggtgtgtcaggagccacctgtgtttgtccatttgcattactgtaaagaaatacctgaggctgagtaacttatgaaggaaagaggttcaattggctcacagttctgcaggctgtataggaagtatggcaccagcatctgcttctggcgaggacctcaggaaacttacagtcatagcagaaggtgaagggagagcaggtatgccacatggcaagaatgggagcaagaggctgagggggggccccagacttaaacaactagactgtgtgtgagctgactgggggagaattcactcatcaccaaggggatgattctaaatcattcatgagggatcttcccccttgatctaatcacctcctaccaggccccacttccaacactgggaatcatattacaacatgagatttggaggggagaaatatataaaccatatccttccacccctggtcccccaaatctcatgttgcaaaatacaatcatgccttctcaacagtcccccaaagtcttacctcattccagaatcaacccaaatttcccaagtcccaagtctcatctgaagatgactcccttccacctatcagcctatgaaatcaaagacaaattattgactcccaaaatacaatgagagtgcagacattgggtaaacattcccattccacaagggagaagttggcaaaaagaaaggatctacatgccccatatatgtcagaaatccagcagggcagtcattaaatcttaaagctccaaggtaatctcctttgacttcatgtcccatatccagggcacattggtgcagggggtgggctcccaaggccttggaaaactctacccttgtggctttggaggatgttgcccctgtggcttctctcacatgatagagttgagtgcctgtggcttttccagattcagggtgcaaactgccagtggatccaccattctggggtctggaggacagtggcccccttcccacagctccactaggcagtgccctggtggggacattatatgggggttcaaccccacattctctttggcactgctctagtagaggttctctgtgagggctccatgctggcaggaggcttctgtctgggcacctaggctttctcatacatttctgaaatctagagggaagatgccaagcttccttcactcctgtattctgggggcctacaggcttaacaccagatggaagtcaccaaggcttatagtggcttgcactctccaaagaagcagcctaagctatacttggggccctttgagccaaggctggagccagaggaaccaggatgtggagagcagtgtcccaaggctgcacaggcagcagtggccatggccatggcccacaaaaccatcctttccctcttggcctctgggcctgtgatgggaaagaccacctcagagatttccaaaatgccttcaaggccttcttccctttgttctggatatgagcacttagctctcttttagttatgctaatctctctagcaactggctgctccatagcctacttatatttgtctcctgaaaataccttttcttttctaccatatggccaggctgtgaattttccacatttttaatgctctgcttccctttgttgatgaaaaaagccaaactccataaaacacttgaaaaattgattctgagccaaatatgagagccatgaactgtggcacagcctcaaaaggtcctgagaacatgtgtgcaaggtgcttgggttgcggcctggttttatgttttagggagacatgagacatcaatcaatacatgtaaagtatacattggtttggtttggtttggaaaagcaggacaattcaaagtggggaattccaaatcataggtggatttgaagattttctgattggcgattggctgaaaaagttaaattatctaaaaagttgaagtcagcgaaaagcaatgcttaagataagggggttgtggaagccaaggttcttgttatgtagacgaagcctccacgttccagagagaagagatggtcaatgtctcttatcagaacctaaaaggtgccagactcttggataaatctctcctgaatcaggaagagacctggaaagggaaaaagattctcaacagaatatacatttcctccacaagagacggctttgcagggcccttccaaaatgtgtcagagaaacatattctgggataaaatactttaatttccttccatgcctgccacctgtcatgtgatgctataccagagtcaggttgggatttgataccttattgctacaaagagtctgctttgtcagtcttaagctccctgttttaatgttaacactggtcagctgagcctaagctccaacagggagagggtatagtgagggagtccaaaccaccctccccttcctgtcatggcctgaactggttttccaggtttctttggaatccccttggattagcattttattttttcatttgcaacttttaaatataagttccaactttaagtcatttctttgctcccatatcttaccctagactgttagaagcaaccaggtcacaccttagaaacgtctgcttagaaatgtcttccccagatgccctaagtcatcactcttaaggtcaaacttccacagatccctagggcatgaacacaatgcagccaagttgtatcttaggatttaacaagcgtgacctttactccagttcccaataagttcctcatttccatctgagatttcatcagcctggctttcacagtgcatatgtctatcagcattttggtgacaaccatttaatagtctctaagaaattccaaactttccctcatcttcctgtcttcttctgagtcctccaaattcttctaacctctctgcctgttacctaattccaaagctgcttccacattttcaggtatctttatagcaatgttccactcctcaataccaatgttctgtgttagtttgtgttactagaaaaaaaaatacatgaggctagtaatttataaagaaaaggtgtttaggccaggcactgtggctcatacctgtcatcctagcattttgggaggcagaagcaggaggatcacttgagctcagaagtttgagaccagcctgggcaacatagtgagaacttgtcttgaaaagacaagaagaagggaagggcgggggagagcagaagagcagaagggaaacacggccctggcatctgcttctggtgaggcctcagggagattgcaatcatggcagaaggcgaagggggagcaggcatgtcacatggcaagagggagcaagagaaaagaagtggcacgtcccagaattgtaaacaacgagctgtcacagggactaactgagggagaactcactcatcacctgggagatggtgctaggccattcatgaggggtccagccccatgatctaatcacctcccaccaggcccacctccaacactggggcctgagagagaagagaacctcccccagcactcggtgtgcatcggtagtgaaggagcctcacctgagcccccgctgttgctcaatcgaattcccaagaacagagagaaaagggaacttccagggtggcccgggcctccaggggttcccactccatttttagctgaaagcactgaggcagagctccccccacccaggctccactgcccgacacagaaataacaaccacggttactgatcatctgggagctgtccaggaacccgacagggagccggacgggccacaccagccacaggcaccaaatggacgacccggcgcttcaggtatcccagcccaccgggagccccaatcaaggggccggcccaggcagcagtgagggagaggctgcctgggtccctgacagcgaggggactcctgggccaccctcacagcatcaaccaagcttcttagttactgcatggactccagacgtcccttccctgcatggggacacaggaaagctagaaacagcctaacgccgacctggagaaggcagggggctgggaatcttggctgggcccaagactaagaaggtcagaggccccatgctgggcagggctaggctgggtgcagactgcctgtcacccccaggacagggacagccaacccagagccgggagggagggtggggaggcggcagcagggagctgtcctgagctccactgcgcaactggctgatcttggcaagtccgagctgggtggactgaggggggcttggctgagtggactagactgagacgggcctaacagactgagctgaggcgagctgggtgggctgagagggctaccctgtcccttagaggacaggtggccaagctgggctgtcctgagccagggcgatcggggctggcccgggccaggcgggtttagctgagttgagtgagtggactgggtagagggaaatgagctaggctcagctgagctaggcttgagctgggttatcctaagccctaaggtggactgagctgggctgagctggacttatctggggagcagggcaaagtcaggctgagctgaggtggcctgccctgggtggtccaggattgagttaagctgaattaggctgacctggacttgactggacttggttgaaataagctgggccgacacaggagtagggacaagctacagttctctacttaggataaaatgggtgctcgtggactatccgggctgaaggagaccaagctggggtattacctgctgagcttacctgacctggcctgagttcagcagggctgcgctgagctggacagacctgagccaagcttagctggttgggctgagtaagctgggctgagctaaatgggattgagctgaggagggctaggctgggggagagacctgacgacggacagggttaaaagctggagtgagcaggccttaaattattgaactaaattgggctggggtgatctgaatttagctgggatgagctgggctgggctgaactgtgcccacgtgaactgggctaaactaggctcgcctgagtggactcagctgggttggtctcaactgggttcagctgagctgggctcggctagactacactgggttcagctgacactacactgggttcaacccgagaggggtgagcgcctacctaagccggcccagcccgttcgacctgttcatccgcaagtcgcccacgatcacctgtctggtggtggacctggcacccagcaagtggaccgtgaacctgacctggtcccgggccagtgggaagcctgtgaaccactccaccagaaaggaggagaagcagcgcaatggcacgttaaccgtcacgtccaccctgccggtgggcacccgagactggatcgaaggggagacctaccagtgcagggtgacccacccccacctgcccagggccctcgtgcggtccacgaccaagaccagcggtgagccacgggcaggccggggtcgtggggggagggagggagcgagtgagcggggcctgggctgaccccacgtctggccacaggcccgcgtgctgccccggaagtctatgcgtttgcgacgccggagtggctggggagccgggacaagcgcaccctcacctgcctgatccagaacttcatgcctgaggacatctcggtgcagtggctgcacaacgaggtgcagctcccggacgcccggcacagcacgacgcagccccgcaagaccaagggctccggcttcttcatcttcagccgcctggaggtgaccagggccgagtgggagcagaaagatgagttcatctgccgtgcagtccatgaggcagcgagcccctcacagaccgtccagcgagcggtgtctgtaaatcccggtaaatgacgtactcctgcctccctccctcccagggctccgtccagctgtgcagtggggagggctggccagaccttctgtccactgttgcaacgaccccaggaagctacccccaataaacagtgcctgctcagagcccagggtacacccgttcttgggagcgggcagggctgtgggcaggtgcatcttggcacagaggaatgggccccccaggaggggcagtgggaggaggtgggcagggctgagtccccccaggagaggtggtgggaggaggtgggcagggctgaggtgccactcatccatctgccttcgtgtcagggttatttgtcaaacagcgtatctgcagggactcatcacagctaccccgggccctctctgcccccactctcggtctaccccctccaaggagtccaaagacccaggggaggtcctcagggaaggggcaagggagccccgacagccctctctcttgggggcttggcttctacccccctggacaggagcccctgcacccccaggtatagatgggcacacaggcccctccaggtagaaaaacagccctaagtgaaacccccacacagacacacacgacccgacagccctcgcccaagtctgtgccactggcgttcgcctctctgccctgtcccaccttgccgagtcctggccccagcaccggggccagtggagccgagcccactcacaccccgcagcctccgccaccccgccctgtgggcacaccaggcccaggtcagcagccaggccccctctcctactgccccccaccgccccttggtccatcctgaatcggcctccaggggatcgccagcctcacacacccagtctcgcccactcacgcctcactcaaggcacagctgtgcacacactaggccccatagcaactccacagcaccctgtaccaccaccagggcgccatagacaccccacacgtggtcacacgtggcccacactccgcctcccaccctgcctccagcgaggctactgccaagcccttcctctgagccatacctgggccgctggatcccagagagaaatggagaggccctcacgtggtgtcctccagtccaaccctccctgtcaccctgtcagcagcaccccacagccaaacacaggatggatgcgtgggctccatcccccactcacccacaccggaaccccagagcaggctacgtgcccctcacagacctcaaacccacatgtgcatctgacaccccagatccaaacgctccccccggtcatgcacaccaagggcacagcacccaccaaatccacacggaaacacgggcaccgggcaccccatgagcacaaagcccctccatgtctgaagacagtccctgcacaccgtcacagccatacattcagcttcactctcacgtcccagcccacctgcacccagctctgggcctggagcagcagaaagaggtgtgagggcccgaggccggacctgcacctgctgatgacccgggaccagcaggcagctcacggtgttggggaagggagtggaggggactcagggcaggagccagagggaccaggctggtgggcggggccgggccggggtagggccaggaggcagctctggacacccacaggcctgggctcatagtccacaccaggacagcccctcagagcacccatgcagtgagtcccaggtcttgggagccaggccgcagagctcacgcatccttccgagggccctgagtgaggcggccactcctgtgccgaggggttgggtccttctctggggagggcgtggggtctagagaggcggagtggaggtaaccagaggtcaggagagaagccgtaaggaacagagggaaaatggggccagagtgggggcccagggacgagaggtcaggagtggtcggcctggctctgggccgttgactgactcgggacctgggtgcccaccctcagggctggctggcggctccgcgcagtcccagagggccccggatagggtgctctgccactccggacagcagcagggactgccgagagcagcagggggctctgtcccccacccccgctgccactgtggagccgggagggctgactggccaggtcccccagagctggacgtgtgcgtggaggaggccgagggcgaggcgccgtggacgtggaccggcctctgcatcttcgccgcactcttcctgctcagcgtgagctacagcgccgccatcacgctcctcatggtgggcacccacctccaggggcccggccagggcagggggttgggcagagccagcagagcgccctgacccacgccctcccctcaggtgcagcggttcctctcagccacgcggcaggggaggccccagacctccctcgactacaccaacgtcctccagccccacgcctaggccgcgggccactcacgctccaccaggcccagctttttctctgccagcgcctgagcctccctcgggctgcgccctgccctgggtgggaaaagggaagcagacaagaaaagggggcacaaggtcactactgtgggctgatggccagtgaacctgagcccagagggggccggctcagccgcaaggttaaaggcgccgagagaaccaccagtcgcagcccccacccgaaaaccgtgtctgtcccttcaacagagtcatcgaggaggggtggctgctagccgttctgagctcatcccaggcccctgggtctccgggtcactcccattctgactgtacaatcaccaaaagccaaggagggcccagcacccagcccaggacacagctgagtctgcgtccagcccaacaccagcccacggcctcactccccagcctcggtctgacccttctagccctgagatccaagtgcctggcatccccgtcccccaagcctcacccagaccttctttcccttcacccacccctcctgccacccatccacagcccccatcccttcacccacccctcctgccatctatcctcagcccccatcccttcacccacccctcctgccatccatccacagcccccatcccttcacccacccctcctgccatctatcctcagcccccatcccttcacccacccctcctgccatccatccacagcccccatcccttcacccacccctcctgccatctatcctcagcccccatcccttcacccacccctcctgccatccatccacagcccccatcccttcacccacccctcctgccatctatcctcagcccccatcccttcacccacccctcctgccatccatccacagcccccatcccttcacccacccctcctgccatctatcctcagcccccatcccttcacccacccctcctgccatccatccacagcccccatcccttcacccacccctcctgccatctatcctcagcccccatcccttcacccacccctcctgccatccatccacagcccccatcccttcacccacccctcctgccatctatcctcagcccccatcccttcacccacccctcctgccatccatccacagcccccatcccttcacccacccctcctgccatctatcctcagcccccatcccttcacccacccctcctgccacccatccaaagcccccatcccttcacccacccctcctgccatccacctcagcccccatcccttcacccacccctcctgccatctatcctcagcccccatcccttcacccacccctcctgccatctatcctcagcccccatcccttcacccacccctcctgccatctatcctcagcccccatcccttcacccacccctcctgccatctatccacagcccccatcccttcacccacccctcctgccatccacctcagcccccatcccttcacccacccctcctgccatctatcctcagcccccatcccttcacccacccctcctgccatctatcctcagcccccatcccttcacccacccctcctgccatctatcctcagcccccatttctgcagcctgaaggcacagggaagccctctgaggccaggccacaggacggttgagggcttcgggcccctggagtgggtagaggggctcccacagccagagaaggggtttcctgcagggacagcagctgccgacctcgtccctatgacctcgtccagtgtctggcttcagcagtcatacttctttctctctgagtttcttagtaaagatccttttcacaaaccccacgtctccggagggctctgtaggaggtgtgtgtggccctggagtggctggtgggaggcaggacccctgaggacgtgcaggaggagccagaggggaaggaagggcaggggccattctggggtcctgagagccaaagtgcccaagcagtggttcccatcaatcacccctcagcaccccagagactccccagctcagcgctgtcatacctggtctgctggtctccagcccagactcatgcctccttctcaggtaaagtcaaagcaacaatcaacatcgacccctttgtgggcaaaaccagaagaggcccatgctgtggtcagcacaggaggccccaagaatgcagctgcacagtcaccaaggtggaggctggtgggggcccccaggaccactggccacacaccctgatccagcacccactgagcacagacaaagctgactccccagcccacagccgcccaccagcctggacctcctgaagagctgagaggtgacccaggagcaggctggggccccagagccatcggggccacaggtgggcttgacccacaccagtcctcagggcaaatgtgcagcctccctggctggagaggcctgcttacaagggtctccacaacatcctaaaaatgggagagaacgcatgataggcatgacaaagggcagggttccctcatatacaaagagcactcagagatcactaagaagaaaggtgagcaataggttcttcatggaaaggaaaaacccagtggccgataatataaagaaaccattttaacaatgagaaaagtgaaaggaaggaggaggggatgaagggggtggaggtgcttcttggccctgactgagggcacgtaaatcattaagaccactttttagggccagttggcaaaatgccccaatgcaggagagtcctctcacagtgatggccccacagggagagcctcgctctgtgccaggagagccacgtcacatggagtctggcacaaagcggaatgaagcaagcctgcctcagtctgacagcggcacctgggccctccgccctgtcctctgctgcgacctcggagcagccgggcacgggggagaaggtgaggagcgacggctccctacggggtagaaaaccccaaagcgggcagcgctgaggctgactgggtccaaacaacatcagaggagggggcgtcgcaggacagggccaaggccacagccgctgcccagctcccctcacacactccctcattcacagacacacacgcgggcacacactcgcacatgcaaaaacacacaggttcacacacacagactcaacctctcatacacatttgcactcacacacaccaatcatgcactcacacaggctgacacgctcgggcacgctcataccaacacacacacagtctcaggaagccaggccctccatccaccccatcaccagcccagggtgtcgcaaacccacatctcctacaacagaccggccctccgcagccaaggtgccccggaccgggagcccccccgggggacagagctcagtgactttctctgccccgcaccctagatcatgagacctccatggccccagagcaagggcaaggagtcagctcactgccccactgtgtggcaggcgtcctcacgcacagaaaattccatcgcctcaaaggcctgagaggaagaccagatgagcacccacgtagaggagacagacggggcccgtggggaggggcagaggcccggattcacacccaggctcggaacagcgcccctgccttccacatggcctggcctcccgggagcaagaggatgccgtctcagggcctctccatccccctcttcattcccctattaacccacccgtgggtacaaccatggcccccaaaagatagagccacatcctagcccctggggccattgagtgcggcgttatttgtcaaaagggcctttgcagatcccatcaagataaggatttcgaggtgagggcaccctggattgtcaaggatttcgaggtgaaggaaccctggattgtcaaggatttcgaggtgaaggaaccctggattgtcaaggatttcgaggtgagggcgccctggattgtcaaggatttcgaggtgaaggaaccctggattgtcaaggatttcgaggtgagggcaccctggattgtcaaggatttcgaggtgaaggaaccctggattgtcaaggatttcgaggtgaaggaaccctggattgtcaaggatttcaaggtgagggcaccctggattgtcaaggatttcgaggtgagggaaacctggattgtcaaggatttcgaggtgagggaaccctggattgtcaaggatttcgagatgagggaaccctggattgtcaaggatttcgaggtgagggcaccctggattgtcaaggatttcgaggtgaaggaaccctggattgtcaaggatttcgaggtgagggcgccctggattgtcaaggatttcgaggtgaaggaaccctggattgtcaaggatttcgaggtgagggcaccctggattgtcaaggatttcgaggtgaaggaaccctggattgtcaaggatttcgaggtgaaggaaccctggattgtcaaggatttcgaggtgagggcaccctggattgtcaaggatttcgaggtgagggaaacctggattgtcaaggatttcgaggtgagggaaacctggattgtcaaggatttcgagatgagggaaccctggattgtcaaggatttcgaggtgagggcaccctggattgtcaaggatttcgaggtgagggcaccctggattgtcaaggatttcgaggtgagggaaccctggattgtcaaggatttcgaggtgaaggaaccctggattgtcaaggatttcgaggtgagggcaccctggattgtcaaggatttcgaggtgagggaaacctggattgtcaaggatttcgaggtgagggaaacctggattgtcaaggatttcgagatgagggaaccctggattgtcaaggatttcgaggtgagggcaccctggattgtcaaggatttcgaggtgagggcaccctggattgtcaaggatttcgaggtgagggaaccctggattgtcaaggatttcgaggtgagggaaccctggattgtcaaggatttcgaggtgagggcaccctggattgtcaaggatttcgaggtgagggcaccctggattgtcaaggatttcgaggtgagggaaccctggattgtcaaggatttcgaggtgagggcaccctggattgtcaaggatttcaaggtgagggcgccctggattgtcaaggatttcaaggtgaaggacaccctggattatcgagggggctaggtccaaggacaagtgtcctagctggagacagacgaggagacacagggatggggagaggcagaggcagacaggggtggtgctatggtctgagggtctgtgtctgcccgaaactcctgtgtgacagccgtcatcccagagtgagagcatgcagagctggggcctcagggaggtggttagggcctgagggggaaccctcaaaaatgtgattcggtccctaatctcactagagaccctaaagaaaagggaccccagagagcagccctgccctctttccaccacgtgaggacgcagtgaaaagatgggggtctgtgaaccaggaatcgacccttcctggaacttgaccctgctgccatcctgaccttgaacttccagcttcgagaaccgtgagaaatgaatgttgctgctgaacccaccagtctatggtatttttgttattgcagccagaaatgactaagatgcagcagccacgtccccctggcgagggccgggggcatcccaaggttcataacaaaagctccagagcttccctgaaccgccaggtgtgtcttcccaggaccctggggcagccccaggctacctccctcctcctctgaccccacctgccctgatccggcctcactgtcactccctggatttcacccgacagcctccgccggggtggcccggccccatggccagggcatcttccattcacgcccacgctttccaggactccgctgcagcagctcctctgtgaagcgcctctggcctcccattgccggtgccacccgagcccccagacatagctggcctcccccgactccagggccagcatcgctggcgggatctctccaacgcaacggccagctctctggtgacccacagtaggagtgccacctgggcagcgctggacagggtagagcaggcaccttggccaccctgacccgcagggctgcaggctaggagacggggtgcccccatgcccccaccctgggctgcagtctggggcccccagcggcccatggggcagaccgagggaggccaggccggagtggctccaacccagcagcgcaagactcactctccccagcctgatgcccgccctgtggccccaaggccccctcaacgggagtccactcacaggcacccttcccctgcgggtggtcggggaccctctctggccctgtgtctcccctttgccatctctgtctcggggtctctgagcctctaactgtgtctgttcctgtttccctgcatcgtggcccccaccccgccctgtggagccatgtggagccatgaggctccacggccggtggggtcacagagccctggccacacacacctggccccaccacagccagaccacaggccagacatgacgtggagccgcgcggccgtgtctgctggggcaggaagtgggcgagtgaccctgtctgtaggccagacgtacgggcatgcaggccctcccctccagcccctcagcatccagccacatctgtggacacagccagcgaggcagagcagggctctgctaaggacagacggccatcaaggcagggcctgggccgggccagggctccctccccacagcagccctcttggcaggcagccagacgcccgtgagggtggacctgccatgagggcctgcacgccggaggccgcccactcagcactgcgggccctccagcagcctgaccaggtgggtcttggaggtctccaggcctccgtctcctcctctgcacattgaggagtccagccaggctggtcctggccccttctggaagcaaaaggtggagaacaggcaccaagacaagagggaaggacaaaagaggtcaccacagggactccggaaccacagggcagggcttcctaaccaggcaggaaggatctgggcactgggggctgagccaggctggccaggcctaaccagggatgacccggcccttcctgggatacaaggtgaacaggtttcatggctgagctgaggcctaggctgagccgagccagagggcaaagaagatgacgtggagccagctgatacacgtccatgtgggctgccctgagctgccctgggctgggctgggctgagcaaggctaggctgaactgggctgagctgaactggtctgggctgagctgggctgagctaggctgggctgagctgggctgggctgagctagtctgggctgagctggactgggctgggctgagctggactgggctgggctgagctggactgggctgggctgagctgggctgagctaggctgggctgagctagtctgggctgagctggactgggctgggctgagctgggctgggctgggcttggacgagctgggctgggctgggttgagctgagctgagctgagctgggctgagctgggctgggctgggctgggctgggctgagctgggctgagctgggctgggctaagctggactgggctgggctgagctggactgggctgggctgagctagacttggctgagctgggctgggctgggctgggctgagctgggctaagctggactgggctgagctgtgctgggctgagctgggctaagctggactgggctgtgctgtgctgagctgggctgggctgagctgagctgggctgggctgagctgagctgggctggactgggctgggatgagctggactgggctgggatgagctgggctgggctgggctgagctgggctgagctgggctgggctgagctgagctgagctgggctgggctgggatgagctgggctgggctgggctgggctgggctgggctgggctgggttgggctgagctagactgggctgagctgagctgggctgagctggactgggccgggctgagctgggccgggccggattgggccgggccgggccggactgggccgggccgagccgggccgggccgggctgagcgggtctgagctgggctgagctgagctgggctgagctagaccaggctcgggtgagctaggccaggctgggctgggctgggctgggctgggctgagctgtgctgggctgggctgggctgggctgagctgtgctgggctgggctgggacaagctgggctgggctgggctgggacgagctgggctgggctgggctgggatgagctgggctgggctgagctgagctagggtgggctgagctgagctgggttgagctagaccaggctggggtgagctaggctgggctgggctgggccgggttgggctgggccgggctgggccgggatgggatgggctgggctgggctgggctgggctgggctgggacgggctgggctgggctgggctgggacgagctgggctggcctgggttgagctgagctgagctgagctgagctgggctggcctgagctgggctgggctaggctgggctgggctgggctgggcttggacgagctgggctgccctgggttgagctgagctgagctgagctgggctggggtgagctgggctgggctgggttgggctgagctagactgggctgggctgggctgggctgagctgggctaagctggactgggctgggctgggttgggctgaactgggctgggctgagttgggctgagctgggctgagctgagttgggctgagctgggctgagctgagttgggctgggctgagctgggctaagctggacctggctggggtgagctaggctgggctgcgctgagctgggctgggctgggctgggctgagctgggctgggctgagctgagctgggctgacctgggctgggctgacctgggctgggctaagctggactgatctgggctaggctgggctgggctgacctaagctgagccagactgggctgagctgggtgagcttaggtggattgagctggactgggctgagctgagctgggctgagctggactgggctaggctgagctgagcttggttgggttgacctgggctgagctgagctgaattgggttgacctgggctgagctgggttcggctgggctaggctgacctgggctgggctgagctgagctaggcttggatgagctgagctgggctgggttggactgcgctgggctgggttggactggtctgggctgacctgagctgtactgagctggtctgacctgtgctgagctgggctgggctaggctgagctgggctgacctgtgttgggctgggctgggctaagctgggctaggctgggctgagctggacggagctgacctgggtgagcttaagtggactgagctgagctggactgacctgggctaagctaagctgggctgacctgtgctgggctgggctggactaggctgggctgagctggactgagctgagctagactgagctgagctgggtgagcttaggtggactgagctgggctgggctgagctgagctggactgggctgggccgaactgagctagactgggctgagctgggctgagctggggtgggctgagctaggctgagctggggtgggctgagctgggctgagctaggctgagctgagctgggtttggttgacatggactgagctgtgttgagctgggctaggctaagctaggctgggcggagctgagctgggttgggctgagctgaactgggctggactgggctggactgggctgggctgggctgggctgggctgagctgagctgagctgtactgagctggcctgggccaggctgagctgggctgggctgagctgtactaagctggcctgggctgggctgagctgtactgagctggcctgggctgggttgacctgggctgagctggactaagctgggctgacctgggctgggatgggatgggctaggatgacttgggctggactgggcgggactgagctggactggcctgggctgagctgggctgggctggactgagctggactggcctgggctgggctgggcgggatgggctgaggtggctgctaatgtgggaaagaggccgtgggttgagtgtgattccacctgcagagccctgagcccagctgtgttcttaggggttctgagggccacgcagctctgttgcaccatgattctgtcttctctcttgcccactgcctgaaggaaatttggagtgggctgggcccagagctcccctgtatagcaggccctgtcctggagggcctggcagggacatggcttagcctgttggcctctagtcccgagacctcataggccacaggggtccactgtggcttgtttgggcctggggtggggctcatggagtggtgggtgttggactgagactctgaccagggacagggggatggggtcacagccaagccactccacccctaccccatgcacacagcactcagagcccagaccctctcctaagagcccccaccaaaatcctctctaggggcaggggatagagcaagacatgtcccccacccagagcaggggctgcggtcagggagctcaggggactcagccactccatggcagagccctgtttaatacaacttgtgtctgggatggcctgaatcagagaccctatctaaggagcatgttcagaaaccatgttgctgggatcagacagcagggtccaactgcaggcctgtggtgcaggagctgtgtgaccatggggctgtcaccaggcctctctgtgctgggttcctccagtatagaggagaggcagtatagaggagagggccgcgtcctcacagtgcattctgtgttccagcatccccgaccagccccaaggtcttcccgctgagcctctgcagcacccagccagatgggaacgtggtcatcgcctgcctggtccagggcttcttcccccaggagccactcagtgtgacctggagcgaaagcggacagggcgtgaccgccagaaacttcccacccagccaggatgcctccggggacctgtacaccacgagcagccagctgaccctgccggccacacagtgcctagccggcaagtccgtgacatgccacgtgaagcactacacgaatcccagccaggatgtgactgtgccctgcccaggtcagagggcaggctggggagtggggcggggccaccccgtcgtgccctgacactgcgcctgcacccgtgttccccacagggagccgccccttcactcacaccagagtggaccgcgggccgagccccaggaggtggtggtggacaggccaggaggggcgaggcgggggcatggggaagtatgtgctgaccagctcaggccatctctccactccagttccctcaactccacctaccccatctccctcaactccacctaccccatctccctcatgctgccacccccgactgtcactgcaccgaccggccctcgaggacctgctcttaggttcagaagcgaacctcacgtgcacactgaccggcctgagagatgcctcaggtgtcaccttcacctggacgccctcaagtgggaagagcgctgttcaaggaccacctgagcgtgacctctgtggctgctacagcgtgtccagtgtcctgccgggctgtgccgagccatggaaccatgggaagaccttcacttgcactgctgcctaccccgagtccaagaccccgctaaccgccaccctctcaaaatccggtgggtccagaccctgctcggggccctgctcagtgctctggtttgcaaagcatattcctggcctgcctcctccctcccaatcctgggctccagtgctcatgccaagtacagagggaaactgaggcaggctgaggggccaggacacagcccagggtgcccaccagagcagaggggctctctcatcccctgcccagccccctgacctggctctctaccctccaggaaacacattccggcccgaggtccacctgctgccgccgccgtcggaggagctggccctgaacgagctggtgacgctgacgtgcctggcacgcggcttcagccccaaggatgtgctggttcgctggctgcaggggtcacaggagctgccccgcgagaagtacctgacttgggcatcccggcaggagcccagccagggcaccaccaccttcgctgtgaccagcatactgcgcgtggcagccgaggactggaagaagggggacaccttctcctgcatggtgggccacgaggccctgccgctggccttcacacagaagaccatcgaccgcttggcgggtaaacccacccatgtcaatgtgtctgttgtcatggcggaggtggacggcacctgctactgagccgcccgcctgtccccacccctgaataaactccatgctcccccaagcagccccacgcttccatccggcgcctgtctgtccatcctcagggtctcagcacttgggaaagggccagggcatggacagggaagaataccccctgccctcagcctcggggggcccctggcacccccctgagcctttccaccctggtgtgagtgtgagttgtgagtgtgagagtgtgtggtgcaggaggcctcgctggtgtgagatcttaggtctgccaaggcaggcacagcccaggatgggttctgagagatgcacatgccccggacagttctgagtgagcagtggcatggccgtttgtccctgagagagccgcctctggctgtagctgggagggaatagggagggtaaaaggagcaggctagccaagaaaggcgcaggtagtggcaggagcggcgagggagtgaggggctggactccagggccccactgggaggacaagctccaggagggccccaccaccctagtgggtgggcctcaggacgtcccactgacgcatgcaggaaggggcacctccccttaaccacactgctctgtacggggcacgtgggcacaggtgcacactcacactcacatatacgcctgagccctgcaggagcggaacgttcacagcccagacccagttccagaaaagccaggggagtcccctcccaagcccccaagctcagcctgctcccctaggcccctctggcttccctgtgtttccactgtgcacagatcaggcaccaactccacagacccctcccaggcagcccctgctccctgcctggccaagtctcccatcccttcctaagcccaactaggacccaaagcatagacagggaggggccacgtggggtggcatcagaagcaggccagtgagacagggcctgcccagggccctctgcatgcctctggcttctgcctggggctcccaggagtgtaagaacagtcccacaaccactgtggggacacctggcacccagactcccacaagggggcagtggggcccctgctcgtgccttagacatcttccgggcctccccagggccccccgccttctggctgcctccctctgctctcagggccaaggtgaggtggaggccactgtcacccctgagggtccagtcaccagagggtaattgagagcaacaggtcactcggggaagccctgccacagagaagccctccagcccatgggacccaggacctggcccaggggaggggcttttaaagagagggggaaagagggagaatcaacagatgaggggctgaaccagcagacagagatcaggcagacacatgggtagatcctaggacatataatgaatggatgggtggatggaggattggtagacggaggatggatgggtgggtaaatggctggatggaggatggacagatggatatatgatggatggatgaaggacgggtggatggaggatggatgagtggatgaatgaaggatggaagatggatggatggatgggtggatggactgatggatgatggatggatggatggatggatgatggatggatgggtaggcggatggaggatggaagggtggatggaggatggaagatagatggaggggtgaatggaggatgggtggactgacggaggattgaggatactggggtgggtgggtgggtagatctatggaggataggtgtatggaagataattggatggagaattgctttatgaatggatgaatgaagagatggaaaatagctttatagatggatgggtgaatggatggatggatagatggaagaaggatgaatggatggaaaatagctttatagatatatgggtggatatttaagtgatagccttacattaatagatgaatggaggatgaatggttgggtgagtgggtaggagtgttactgatggaggggtggatatacggataatagctttatagatggatggatggatagatggatggaaggatagaaagacaggtgaatgactggatgtatcagcatatgacaagcaggtacagctgtacatgggaggtctatgccctgagaccctgaggaaaatgaggatgcccgtgctggtggccctcacctggccctcgcttgtaacccctcagccacattccctgggaaggcaacagaggcctctggtcttgcccattcaacctttggcacactgagtgtcagacccaggtctctgtcttggacccagatctccttgagggtgggtgtgtctggtcctctctggccccgggacccagtcactgaatacgtggctgggactgagacggggtggggtgggaggggcgggagggtacctcgggctcaagcttcccttggagaagcagatggtgtccactttctgccctgccaagtctctccctgaagtgccctaagaatgtcaaagacagaaggtcccagcccctcacctgggactctgcctcctcatcctccctgggggagtctcaggccttagatggggacccagaccccactgtccccagaccccaaggaagcatagccgctgttcacacgagtctgggcctggcaggctcttgctgtgttgcagattggcagatgccgcctccctatgtggtgctggacttgccgcaggagaccctggaggaggagacccccggcgccaacctgtggcccaccaccatcaccttcctcaccctcttcctgctgagcctgttctatagcacagcactgaccgtgaccagcgtccggggcccatctggcaacagggagggcccccagtactgagcaggagccggcaaggcacaggtgggagcccaggagggggatgagcccacagtagatgaggtgggctgcagtgcttggctaagaggagagcaccacctgctcccactgtggggggacgtgctctcctggggggcccttcacagacactgaggacacgcgcaggcccagggtcagggctgagcttccctccagtgcagtaacgaggattccgtccaggctcccatgagccaggccagggctgagacagagggcgttggcaaggatgctgctccttcaggctgtgacccctctgtctttgcagggaggaagtgtggaggaacctcttggagaagccagctatgcttgccagaactcagccctttcagacatcaccgacccgcccttactcacatgccttccaggtgcaataaagtggccccaaggaaaatgttcacagactctgaatgaggagacgggggtcagggaaagggtggtggctttagactggagaacgcctgcttcaaagtccccctgggtgtcatggtggtcatggtgggcatggacagagggtacccctggtcccaaaatcaagaaatgacctgatcttgaatgaggctgaggcccaaggatgaatgctggattcaccagagaccatggcaaagaagcctgctcctaagaactacatgggatccctgttcctcataacctagacagccctggtcctcctcactgggtcctcatcctgatcacagggccctggtcctgaccagtgggcccgtttaccgatcactgagctctggtcctactacttggtccctgttcctgatcacttaattctagccttgatcactgagccttagtcctgatcactgagtcctactcctgtttttggccctggacctcatcactcagccctggtcctcatcactcagccccggtcctggtcactcagccctggtcctcgtcactgagccctggacctcctcactcagccctggacctcctcactcagccctggacctcctcactcagccctggtcctcatcactcagccctggacctcatcactcagccctggtcctcatcactcagccctggacctcctcactcagccctggacctcatcactcagccctggtcctggtcactcagccctggacctcgtcactcagccctggacctcgtcactcagccctggacctcgtcactcagccctggtcctcatcactcagccctggacctcatcactcagccctggacctcctcactcagccctggacctcatcactcagccctggacctcctcacttagccctggacctcgtcactcagccctggtcctggtcactcagccctggtcctcatcactcagccctggacctcatcactcagccctggtcctcatcactcagccctggtcctgatcacccagccctggtcctgatcactcagtcctggtccagatcacacagccctggtcctgatcactccatcctagtcctcatcactcagccctggtcctgatcacccagccctggtcctgatcactcagtcctggtccagatcactcagccctggtcctgatcactcagctctggtcctgattattagatcctgatgctagtcactgggcactgggcactgggccctgatcctaatcactgaaccctgctcctgatcaatgaaccctggccctgatcaaagggctttgctcctgatcactgggccctggtcatgctgtgttctggtccttacccctgaactctggtcctgattactgagtcttggtcctgatccctgagtcctagacttgatcactcaattccagtcctcatcagtgggccctggtcgtgatcactgagccctgatctggatcactaggctctggtcctaactcagtcctggtctggatcgctgagtcttgatcctgatcactgggccatgttctggatcaatgagccctggccctgatcactgggccctggtcctgctaactatgctctggtcctgaccactgagcccttgtcccagtcaacagtcaataactgagctctggtcctagtcaatagtcaatcactgagccctggtcctgatcactgggtcctggtcctgatcactgggtcctgttcttatccctgaatcttggtcctgatcactgagccctggccctcatcactgggtcttgttcctaatcactgggctctggttctgaccaatggcccctggttctggtccctgactcctggtcctgatcaatgggctctgctcttgacttctgagtcctggtgctgatcatccagtcctggtcctgatcactgggccctgattctaatcactcagacctccttttgatcactgaaccctagtatttatcactgagccctgatcctgatcgttgggccctatttctggtaactgagctctgatcctgaccactgacctctgttcctaatcactgagccctggaccagatcactggcccctggtcctgatcactggcccctggacctgatcactgacccttgttcccgattgctgagccctggacctgatcactgagccctgttcctgatcactaacccctattcctgatcactgagccctggtcctgattactgagccctggacccagtcaatgacccctgttcctgatcactgagccctggaccaaatcactgagccctggaccagatcactgggccctggtcttgatcactgggccctggtcctgattactgagccctgatcctgatcactgggccctgttcctgaccactgagccctggaccagaccgcggatccctgttcctgatcactgatctctggttctttaattatgcatattcattttgaaatctgattccttttctgagcatgtatcagtctgactagacactgagtcctgtctgatttctgagccttggccctcatgagtaagtgacctgcagtggtggagggaggcctccaggggagccgagaccctctcagtgcatgtactcactggtagatgaagaaatgaccccaatgacttgctccatttttccaggctcagaggggtgtgtaggccccaggaggacttggtggcgagaagaccagcccaggccctgtgagctacacccagccccagcccctaaggggtcgccaggtctcgacttagcactggggagggggtacagtacaggagtggggacaggaaggtgaggggaggccatgccgtttgtattctcttgcttttctctctctcctgaagcctcttgaatagacctgcagaaatacccaaaatagccctgtggggtggctgagtcattgtgaacacagcccaggtcaggtgttccagccagagaactgctgttctgagaaacatgccccaaaaccgagacctggccaggtgtgcctggggcctgagcgaggggctgcagccacaggtaggcccagccccaaccagcccagggtcagctagggctttccaggtccagggttaggcagaggtcagccagggtcaaccatggtctatctgaggggagagacaagagacacagagacatagagagagagagagacagggatggggagagacaagagagacaggaaaggagagacaaagacagacacagagagagagatggggatggagagagataagagacagggacagggagggacagaggcgaggccagtgacagagacagagttacaagagacagaaagagagagagatgagatgagagagataagaagaaacggagacagagatgggagaaaaagagaggagatgggaacagggaaaaagagacatggagacagacatgcagagagaacacaacagaggcagagaacacacagggagagaaagaggcagcaagatgggcccaggaactcagctgcaagcccctctcacacagtcactctcacaaacacacaccacgactattatacaacattcacacacaaacacacagaaacatacccacgctcacagccacacactaagtcactgtcacatccatacccacactcacacccaaacacacatggcccaggagcaaatggggagacctcagcctgcagctgggagcggccgagcgggcgctgggccagagtcggggcctgtctgtgggtggggggcacggcagcacgggcccacctgcacctacaaggcctggcccccgaggtcactgggccaccacccagccctcgccctgttccccgtctgtgctggccggggcaggactctgagcctccaggaaacctgcagatccacacaggacccggaacatcgggctggggtgggtaacaacatgggagaggcgggagcaggaggtcccaggaccctgcgcactgcgaccccagccctgggggctgaagcccaggacagcctcaggtctcccaggagggactggacagtgggggatggtcagagaacaggagagccagcagggtgcagcccgaggacagggatggacgctgggaggtcaacaggacaggggcaggggccgtggagtgggcgaaggtcctggagggcctagagaacctgtgggtccgtgtttgtgggaaggaggccaggagcagcccagagtggccaggctggcaggggtgaggaggtgggggcagtgaggtgagggtgaccgagccagtgaggcctctggccagggaggggaccttggctgggctctgactgaacccagggctcctggagaaggggccccaggcggggatgaggatgtgggcatctgactccatcaacaatggggcttccaacacgcacagcctgggcctcggagacctgggccctgacccgcctccccctggcactgggccgggtgccgtgtgtggtccccagtccccgcagcacctcccccacactggtcacgttccagggcccctctgaagcacctgctgtgaggggatgtggggaggggacagggacttgggcctgagctgccgggtcgggggggagtcggggacccaggctcagcgtgtggctggggaccagacagatggggatggaggaggacacgccctgtacccactgcctgccaaggggctggacccacgcccagtctaggccatgtcccccaggcctgtgaaccttcactctgagccactaaaacattcaggagctttgaaagcagcccccgtccttgtcactatgcgatgactctgagcatcacgctgtccctgctggatccaccctccagccccagcgagggaggctgggccccgggcagcaggtggtgagggcagcgggcacagccaccctacagcacacacagggtctcagggacgcgtccaccacagcccgtgcacaggctcctcacggcactgagttcacccggggcgcgggccgtttgtcctcaggagtcccgctgtaccctccgcccccagccctgtcctgctgaggctgcagctgggtcccggggcacagggcggccctgagcactttgtcatcttggtccctgtcgggtgggctgctggctgtctgtggagctggcagagccgcggttcagccttggaggccggtcctggggcccagcagccgtggggagcactgcccagtcccgtgcccacagggaatcacctgggctgaggaagggcccacacgccgacgggatcggggtcaggcagcgcacgcctggcaccgagatcccacgtcccgaagtggggacacggcccaggggcactgttccgggagggtctcaagatggggtctcctatttcaatcttcactccttctgcacctgttagctgggaaccttctagaaggaggggtgtcctcaatcatggggtggttgtgagctgagcacagatcatgcaggaaggtacatggcttctccttcaccaggaaaacagtgcagagagacagagacacagagacagagacagagtaacagagaaagagagacagagagagacacagagacagagacagagtaacagagatagacagagagacacagagacagagacagagtaacagagatagagagacagagagagacacagagacagagtaacagagaaagacagagagacagagacagagacagagtaacagagagacagaaagagacagagacagagtaacagagatagagagacagagagagagatagagacagaggcaggcacagagataagaaagatacacagaaacagagagagacagagatagatagtcactgtcacattcatacccacgctcacctgctcacacactcacacactcacctcacactcacacacactctcacactcacagtcacttacactcacacacagtcacacacacacagtcacacacacactcacaaacacactcacacactcacacacactctcacacacacactgagcttccctcaggccctgtcacttccgatggggcctacggcctgtctaagcctctgggccaccagcccctggctcaccggtgtgtgcccaccacaccccgccttgggggtcccctctatgagctgggcacatgccctccgctctgttcatggctggcctgggggaaacagggcccacccaaggcctggctcagggaaggcctcaaacacacatggcccaggagcaaaggggcagagctcagcctgcagctgggagcgggcaggggtagtggagtgggcagagggcctggagaacctgcagggctccgatgtctctgggaagggggcccaggagcagctcagcgtggctgggccggcaggggcgaggaggtgggggccgtgagggaggggtgactcggctgtgtggggtgccgggggacacgggctttgctccggctgagcccaggcagtggcgaatccctgagctgccaggaggagagcagggccggggtcaggcagaggtgggccgcggggccgagggctgcggccggtcgggagcagtcggtcggttgagggcaccattacatggagggctgtgagacgggagaccccattcccttcattccttgtgcacgtgttagtgaggaaacttctagaaggagggcattgctcgtagtgggtgagtgtgagcacagatcatgcaggctggcgtgctgccgtgaagtgcctctctttactttccagacctcagcatggcaagcccgtcctgcgccccagggtctttctggagtacacgccgcgcggtcctggtgggcaccatacctggcacccacgctttggccgggcccgaaccttgcgccctcccagcccccatgtggctctcccttggccatactggccttttgccagtcctcctacctcaccctagggtctgcctggccctgccctcccttcctagccccccaaggaggctggagggcacccctgcgtccaccagcagcagctcctcatgggcgagtctccttgggccagtgacacatagtgtgccccgatggtgccacggcagcctgggccctccgccttcctgcttggcaggcacccccgctccctgcaccctcaccggggcacctgtgagccctgagggccagtgggggtctcactgctgctccctcccacagcctagcctcgggcctcagggctctgcatccaagcggcccagggctccctgcggtctcagcccgagtgggcctttgagccttcgcgttctctgcagggtgggacctgcccaagggctgctgagggcttcccaggggtcctgtgggtcccacctaggggcaagctggtgaggaaagtgggtcctgccatggcggccgggtgggctgagttttcggcatctctgggcccaacagcaggtccctggagcggcgcccacccctcccccaggcaggtgtgagggctctgatctgtttctccttgagtgactcattctgggcagacttggccctcagggcacatgcaaatggttgtttgttccacaccgaaaacatgtttcttgccctctgaggctgtttccagaaatagcttgcacgattctccacctgcagctgcagccgccacccacccagtgtggccaggctggcccaggcctccagattcggggacaccccccgccccctcccccagcgtggccaggctggctcaggcctccagattcggggacacccgccccctcccccaggacaggcccacttgggttactgacactgggaccaccctgcaaacgtcaactttattgaattcagtggttctgaacttgttgccatctttgggaccaggacccaggggcagcccccaggttggcaggaagggcaggggagccaacgctggcagggcccccagccaacccccaccccagaagccccaaggaggctgagcggaggtggccctggtggcctgggcacaggcagcccgattggtacagggccggtctggtgcaggcccgcacctcccccaccctcatggcctggtggtccccactgtacagagagaacactgaggctcagcagggccagggacatggcctgaggttacatggtgatgggggctgggtctccgggcctgggggccgtggtgggtgcagcacccggactgcgtgggctgtggcctccctgctcccagctctgtcacacccgtctccatctgagcctccagctccatctttcccgctgtccctgtctctggctacccttctgtctccctgtctctctgcctctctgaaggtatctccctgcccgaatctctgtctctgtcccattgtcggtgtctctgactcatctctgtcaagcccgtctgctgggctttgtcccgccatcttgcctgtcttggcctctctctctttctgtgtgtctccgtcggtgcctcctttctccatccatctctcccccgtgtctgtctctatccctccgtctctcttcccgtctatccctccctctgtgcctgtccctttgctgtgtccctttctttgcctctgtctctctgtctgtctcttcgtgtccctgtgtgtctctctctgtctctctgcttctatctctgtctttctgtatctctgtctatatctcagcctctttgtgtccctgtgtgtgtgtctctctcttctctgtctttccatgcctctgtctatatctctgtctctctgcctctgtatctctgtctgtctgttcgtgtccctgtgtatgtctctctcggtctctttctgtatctctgtctatatctgtctctctcatctgtctcttcctgtgtgtgtctctctgtctctctgcctctgtctctctctctctgtctcttcatctctgtctctgcctctgtgtcattttgtgtgtgtttctctatgtctctctgtctgtgtctcttcctctctgtagctctccctctctctgtctctccttatacctctctttctctctctctgtttctttctctgtctctttttgtctttctctgtctctctgtctctgtctcttcccctctatatatctctgtctttctgttgctgtctgtctctgtttctcttcagccctctctgtctctctttgtctctgtctttctctgcctttctaactctctttctctgtctctctgtctctatctcagtctctcttcttatctctgtctctatctctctctgtctctcactctctgtatctgtctttctcttatctctattgctctgtctctatctctgtctctctcatctctatctctgtctctatctctctttctgtctctctgtatctctctgtatctctgtctctgtaactctctttatctcttactgcctctgtttctctcactctgtctctgtctttctttatctctgtcttggtctctgtctctctgtaactttatctctgtctctctgtttctatctctgtttttctctgtctgtctctgcctatatctctgtctctctttatctgtctctctgtctctgtgtatctctgtctctctgtaactttatctctgtctttttctgtctctgtgtctgtgtgtctgtctctgtgtctctgtttttctctctctctctctctgcctatttttctctctctgtctctgtcaatgtctctttctggatctgtgtttctttctctctgtctctgtctctccatctctgtctctatctatctgtctctctgtaactcatctctgtctctatttgtgtctgcatgtctctttctgtgtctctgtttctctctctgtttctgtctctttgtttctctgtctctgtgtctttctctctgtctctgtctgtatctctgtgtttctatttctctgtctctctctgtctctgtctctctctttctctgttactctgtttctgtctctgtgtctctgtctctctgtaactcctcatctctgtctctatttgtgtctgcatgtctctttctgtgtctctgtttctctctgtctctgtctctctgtttctctgtctctgtctctgtgtctttgtctctgtctgtatctctgtgtctctatttctctgtctctctttctctctctgtctctgtctctctgtctttctctgttactctgtctctgtctctgtgtgtctctctctgcctctctgtctttctctgttactctgtctctgtctctctctgtctctctctgttactctgtctctgtctctgtgtctctctgtctgtctttctctgttactctgtctctgtctctgtgtctctctctgtctctctgtctttctctgttactctgtctctgtctctgtgtctctctctgtctctctttctctgttactctgtctctgtctctctctgtctctctgtctttctctgttactctgtctctgtctctgtgtctctgtctctctgtctttctctgttactctgtctctgtctctgtgtctctctctgtctctctttctctgttactctgtctctgtctctctctgtctctctgtctttctctgttactctgtctctgtctctgtgtctctgtctctctgtctttctctgttactctgtctctgtctctgtgtctctctctgtctctgtctttctccgttactctgtctctctctctgtctctctgtgactctatctgttactctgtctctgtctctgtgtctctctgtctctctttctctgttactctgtctgtgtctctgtgtctctctctcgtctgtctttctctgttactctgtctctgtctctgtgtctctgtctctctgcactgttttcctggtgaaggagaagccatgtaccttcctgcatgatctgtgctcagctcacaaccaccccatgattgaggacacccctccttctagaaggttcccagctaacaggtgcagaaggagtgaagattgaaataggagaccccatcttgagaccctcccggaacagtgcccctgggccgtgtccccacttcgggacgtgggatctcggtgccaggcgtgcgctgcctgaccccgatcccgtcggcgtgtgggcccttcctcagcccaggtgattccctgtgggcacgggactgggcagtgctccccacggctgctgggccccaggaccggcctccaaggctgaaccgcggctctgccagctccacagacagccagcagcccacccgacagggaccaacatgacaaggtgctcagggccgccctgtgccccgggacccagctgcagcctcagcaggacagggctgggggcggagggcacagccggactcctgaggacaaacggcccgcgccccgggtgaactcagtgccgtgaggagcctgtgcacgggctgtggtggacgcgtccctgagaccctgtgtgtgctgtagcgtggctgtgcccgctgccctcaccacctgctgcccggggcccagcctccctcgctggggctggagggtggatccagcagggacagcgtgatgctcagagtcatcgcatagtgacaaggacgggggctgctttcaaagctcctgaatgttttagtggctcagggtgaaggttcacaggcctcgggggacatggcctagactgggcgtgggtccagccccttggcaggcagtgggtacagggcgtgtcctcctccatccccatctgtctggtccccagccacacgctgagcctgggtccccgactcccccccgacccggcagctcaggcccaagtccctgtcccctccccacatcccctcacagcaggtgcttcagaggggccctggaacgtgaccagtgtgggggaggtgctgcggggactggggaccacacacggcacccggcccagtgccagggggaggcgggtcagggcccaggtctccgaggcccaggctgtgcgtgtcggaagccccattgttgatggagtcagatgcccacatcctcatccccgcctggggccccttctccaggagccctgggttcagtcagagcccagccaaggtcccctccctggccagaggcctcactgtctcggtcaccctaacctcactgcccccacctcctcacccctgccagcctggccactcagggctgctcctggcctccttcccacagacactgacccacaggttctccaggccctccaggaccttctcacactccacagcccctgcccctgtcctgttgacctcccagcgtccatccctgtcctcaggctgcaccctgctggctgtcctgttctctgaccatcccccactgtccagtccctcctgggagacctgaggctgtcctgggcttcagcccccagggctggggtcgcagtgcgcagggtcctggacctcctgctcctgcctctggcatgctgttacccaccccaacctccccagcccgatgttcggggtcccgtgtgtatctgtgggtttccccgaggctcagagtcctgccccggccagcacagacggggaacagggcgagggctgggtggtggcccagtgacctcgggggccaggcctggggtgtgcaggtgggcccgtgctgccgtgccccccacccacagacaggccccgactctggcccagcacccgctccgccgctcccagctgcaggctgagctctgcccatctgtttctgggccatgtgcatgtgtgtttggagcctttcctgagccaggctttgggtgggccctgtttccccaggccaccgatgagcagagcgctgtcagcttaccgaggggacccccgaggcagggtttcgtgggcacacaccagtgagccctggagctggtggggggtgagcgtgtgagggtgggagcgtgtgagcatgggtacaaatgtgacagtgacttagcgtcggggtttgagtgtgggtgggggtgtaagtgtgggtgagggtgtgagtgtggaagtgtgttagtgagtatatgaatgtgagggtgagtgtgagtgagggtgtgagtgtgtataggcgtgtgggttgtgtgtataggaagtgtgcgtgttgtgtgtgtgtataggaggtgtatgtgttgtgagtgtgtgatagttgcatgtgttgtgtgtgtataggtctatgggttgtgtgtgtggtgtatgggttgtgtatgaatgtgtggtgtatgggttgtatgtgtgtataggtatatgtgttgtgtgtttttgtggtacatgagtttgtgtgtgtgtataggtgtatgggttgtgtgtgtggtgtatgggttgtatgtgtgggtggtgtatgcgtgtgtgtatgagtgtttcgtgtatgtgttgtgtgtgtggtgtggtatatgtgtgtgtgagtgtgtggtgtatgggttgtatgtgtgtataggtgtataggttgtgtgtgagtttgtggtatatgggttatgtgtgtgagtgtgtgtacaggcgtatgggttgtgtgtgaatgtgtggtgtatgggttgtgtatgagtgtgtgtaggtgtgtggcttgtttatgagtgtgtatacaggtgtatgggttgtgagtgtgtgggtatggtttgtgtatgtggtctgtgggttgtgtatgagtgtgtggtgtataagttgtgtgtgtatataggtgtacgggttgagtgtgagtttgtggtatatgggttgtatgtgtatataagtgtatgggttgtgtgtgagtgtgtggtgtatgggttgtgtgggggggggtgtacggcttgtttatgagtgtgtgtataggtgtatgggttgtgtgtgtggttatggcttgtgtgtgtttatggtctgtgggttgtgtgtgtgctgtatgagttgtgtgtgtgtgtataggtgtttggttgtgtgtgtttgtggtatatggattgtgtgtgagtttatgtatagatgtatgggttgtgtgtgagtgtgtggtgtatgaattgtgagtgtgagtgtgtataggtgtatgtgttgtgtgtgcagtgtatgggttgtgtgtgtgaatgtgtataggcatatgggctgtgtgtgtgtgtggttatggcttgtgtgtgtttgtggtctatgggttgtgtgtgtggtgtatgagtttgtgtgtgtggtgtatgggttgtgtgtgtggcatatgggtgtgtgtataggtgtatcatttgtgtgtgagcgtgtggtatatgggctgtgtgtgagtgtgtggtatatgggtgtgtgagtgtgtataaatgtatgggtttgtgtggtatatagattgtgaatgtgtctgtggtgtatgggttgtgtgtggtgtatgggttgtgtgattgtgtataggtgtatgggttgtgtgtgagtgtggtatatagtttgtgtgagtgtgtggcataaagtttgtgagagtgtggtatatgggttgtgtgtggtatatggctgtgagagtgtatataggtgtatggtctgtgtgtgagtgtgtagcatatagtttgtgggtgtatgtggtgtagttgtgtgaatgtgtggtgtatgggcgtgtgagtgtgtataggtatatgggctgtgtgagagtgtggtatatgggttgtgtgtgtgtgctctatgagtgtgtgtaagtgtatgctctgtgtgtgtatggggggtgtgtgtgtgtatatataggggtaggggttgtgagtgttttgtgtatgggtgtgtatgtatgtacacggggtgtgtgtgtgggacatgggtgtgtgtgtatatgtgtatgtgttatatatgtgagtgtggtatatatagtgtggtgtgtatatagtgtatgcgctgtgtgtggtgtatgtgtgtgtgtgtatatatgtatgggttgtgtgtgtggtatgtgttgtatgtgggaaataggtgtgtgagtgtatatgtgcgcgcgctgtgtgtgtgtgtgttatatatgtgtgtgtatatgtgtatgggttatgtgtgagtgtgtgctacatagtttgtggtgtgagtgtgtactgtatgggctgtgtgtgtggtgtgtgggtgtgtgcgtataggtgtatgggttgtgtgtgtgtggtgtatgggttgtatgtggtatatgggtgtgagtgtgtataggtgtatgggttgtgtgagtgtgtataggtgtatgggttgtgtgtgagtgtctgatgtatgggttgtgtgtatgtggtatatgggtatgtgagtgtgtggtatatagtttgtgagtgtgagtgtgtggtgtatgagctgtgtgtgtgtggtatatgggtgtgtgagtgtatataggtgtatggttggtgtgtgactgtgtggtacatagtttgtgagtgtgagtgtgtggtgtatgggttgtgcgtgtttggtatatgggtgtgtgagtgtgtggtatatagtttgtgagtgtgagtgtgtggtgtatgagttgtgtaggtgtgtggtgtatgggttgggtgggagtgtgtgggacgtgactggataagttcgtgagtgtgagtgtgtggctgtgggtgtctgtgtgtctctgggtgtgtgtggatgggggtatgtgggtgtgagtgtgtgtgtgaggtgtgggtgtgggggtgcactgcgtgtcctccctgggggtggcccctgagagtcggggcctgagcccggatgtctccgtgactctgcatgtctccctctgcctccgtctctctgctttgtgtctgtctctgtcatccctgcctcgctggaaaggtgactggataagttcgtgagtgtgagtgtgtggctgtgggtgtctgtgtgtctctgggtgtgtgtggatgggggtatgtgggtgtgagtgtgtgtgtgaggtgtgggtgtgggggtgcactgcgtgtcctccctgggggtggcccctgagagtcggggcctgagcccggatgtctccgtgactctgcatgtctccctctgcctccgtctctctgctttgtgtctgtctctgtcatccctgcctctgccccatccctctgggtcctagaatctgtccaagtctggggccgcctcccaggaagccccacaagtgtccaccaagggatgcacggaggacaaactgcagtgcacacatacgaggaggctgagtcaccagagcctccacgctagtcctgccccgactccccgggtcagggctccaggccccaagcgccgcccggctcccccctgggctggggcctgtatggggctgggagtctggaggctcagccctgcgggggaggtgtgagcaaacccgcctgcactgcgaaccaagcacaggccatcccctgacactcagacacgcagagacgtgcacagacacatacacatacgcacagacacacagacatgcacacacagaaacgcacagacacacagacatgcacacacagaaacgcacagacacacacagacatgcacagagacacacacacagagtcatgcacagacatgcacagacacacacacacacagacacacagacatgcacagagacacacacgcacagaaatgcacagacacacacggacatgcacagacacacacatatgtgcacagagacacacatatagacacacatccacatggatgcacagacacacagagacacacacaggcaaacacatacacacacagacacataaagacacagacacacggatatgcacacacacatacagacacacatgcacgtggatgcacagacacacaccgacacacatagagacacacacacacacagacacataaagacacacacagacatgcccgcacacaggcaccccctcccgcaggtcacgcttgcagcccctggccactgtcctgccccgtgtcatgaacctgcctcccctgttgctccacgccaggacattgctgcctgaccacagcctggaccacctgctcagccctatcagtgcggacaaaggccttgtcctggcggtgacaatgagccaggcccactgcacacttgtccacaccacacacctgtccaccccacacacctgtccaccccacacacctgtccaccccacacacctgtccacactacacacccgtccgcatcacgcacaaccgcacacctccagctcatccaccactcactgcacacacgcttgcatctcacacgctcatgctcacactcatgcactaacacacacattctcccacctgttgccaagctcacacacgtgcacacatggcgttgctgggccaggctttggcacatggggtcagggaaggctcggagagcgtacgccttggcctctctggcggcatgtccgggtctgcggggcagaggtcacagttgctgccccacgacaccgcatgtgcccctgcagggcctgggaatggcaccccgcagagcccgcactcagggccagctcgtgtcagcaccgcgtggaccacgtcccgaggacacctgggccagccagtgctgcgggctgcagcgagtgtgtgtgcacacgcatgcccatatacgtgttgtgtgtgcttgtgtgcatgggagggggtccctgggtgggccagggtctgcctcgggggctggagtgggaggcctgggcccctcagctttcctccaacccagcctcacttccccgcccctctcacctctgcgtggccaccagccagccctgggcttggccccggcatgaggcctgaggcagggccctggataacgctcaggacgggcacctgggccttctgggcctcctcgccaaggaccagactcggcctcagcgcctcacactcatcgggggtcatgccctggggcccagccaggaccctcgctgccccactcaggaggctggacacactagcaggtgggggggccgcagctccccctcccccacccccgtccagtctgaaaaacaagacctcatgggcaccgggccgcagctcccacccccaccccaccacacaggcacaaacacattcttgcaaatatttctaaaaatgctgaaaatgggaaccacagagcaggtgggacagtggtgtggaaacccccacccacctccgagatggcgatttgcattgggggaggtggggggaaggctggcacccaggcagctggtttgcaggattcctgactattcacactccccagccacaccccatgtccaggccaatgctgtggccaggcccagagtgaccaggccccagggcacttcccagaggactgcctggtggagggggtaacaagtcggaccttgccccaggggagctgggccagggaggagacccctgcatggaggtcccaggcatggcccccaggaacaggacccccagcaccctcggaagaggattttgtgggtcacctggggacagagcttcctccgtgcacctgctgggcccctcacagcccacctgtcaccaaacctctgtcctcccctgtgcccaggcctggccaacccaggcgctttcagcccgtagaccctaggtggggtcgcccaaccctaccccggcctcaggaccctctggggttgccccacgagaccaccccagaacagacctgcccaaccccagccctgcatcttcagtgggacacagaggcctccataggaccccaccccacacccaggggctgtccggggcccatcaccccagcagctgagaccctgggagatgacaccctgtgcctagaacagggtggaccacatggggggacattgtgacccgtgtcccagccaggcaggacagccccaccccagcctcctagaggaggggtctgtgcctgcgcccaccccctcagtggaacctaagccctccagggaggactcaagtttgaggaaaggatccctgggaagacccccagggtgcagcccgggtgacagggctcagggggcccttcctgcacatacagcctcccacaaatatagtcatgcacaccccacagagacacacagaacacacaaacacacagagacacagacacatagacagacttagagacataaagacacacaatacacacagacacactaacacacacacagacacctagacacacatacagagacagacacacacaaacacacagaaacacaagcacacataccacacacacacgacacacagatacacatagacacacacagagacagagacacacacagacacagagacacacaaacacagatatacctcacacacacacacacggacacacatacaaagacagagacacacacaaacacacagacacacaagcacagacacactaccacacacatacaggcacacagacacatagacacatatacagagacagagacacacacagacacagaaacacaagcacagacacactaccacacacacagagacacacagacacacataggcacacacagagtcagagacacacagacacagaaacacaagcacagacacactaccacacacagacacgcataggcacacacagagacagagacacacgcagacacaggtacacaagcacagacacgctaccacacgcagagacacacacagagatagatacagacacacataaagtcagaggcacacacagacacatacagacacacagaggtacacggcacagacacacacactcagaggctcacactcagccacagccacgtgcacacagctcacacggcccacactcaggtccacaagggctcacagcgtcacagaggcccccagtcccacagccagacaagcacaggccgtgctcacgctcacacactgacgcacacattctcccacccgctgccaagctcacgctcacacatgcacacgtggcattgctgggccaggctttggcacatggggtcagggaaggctcagagagtgagcatcacagacacagggtgggactggtgtccggggggtccatgagcagccgaggggcagccctgccacgcccacaggccccaggtctattctcaggcacccgcctggggctgggggcttccttctgggaactcgaggacctccgttctgcacggagacacacgtccagaaagggacaccccagggccacacccagacacacccagcccgactcgggcacccagcacacgccaggcacacaacaaacacaggagctggcacacgcctggccccaggccaggacagcagcaggcaactcggccagtgcacacagccgctcacacacaccacacatccccacaagccctcacaccctcacatccccacacaccctcacagatcctcacactcccacacatccacacacatcctcaaacaccccacacatccacacacaccccacacaccccacacatccacacacaccctcacatccccacaccctcacacaccccacaccccacacacccccacacatccacacacaccctcacatccccacacacccccacacatccacacacaccccacaccccacacacaccctcacaccctcacacatcctcacactcccacacatccacacacaccctcacatccccacacatccacacacaccccacacacccacacacaccctcacatccccacaccctcacatatcctcacactcccacacatccccacacatccccacaccccacatccacacacatccacacacatcctcacacacatacacacaccctcacacaccacacacccactccctcacacaccctcacacaccccacacatccacacaccctcacactctcacaccttcacacatccacacacaccccacaccccacacgtgcacacacaccctcacatccccacacatccacacacaccccacaccccacacaccccacacatcctcacatccacacacaccccacacaccaaacacaccctcacacatcctcacactcccacacatccacacacaccccacaccccacacatccacacacaccctcacatccacacacatgcacacacaccccacacatcccacacatccacacacaccctcacaccctcacactccctcacacccccacactctcacacccccccactctcacaccctcactcacacactctcacacaccctcacaccctcacagtctgaaaacttcacacaccctcacaccctcacacacccacacaccctcacacaccgtcacacactccacacataccctcacacactctctcacacacacccttacaccctcactctcacacacccacacactctcacacaccctcacacatacacacccttgacagcttgcctgcagtctgtcagaggggtccctcagagggccaccacgccctgcggatcaggtgcccagaatccaccatccagcggctctgggcctttcccctctcagctcatgacctttgggtaccacggctcaggggtacccctgtgctccccagctgccaatccctgcatctccttgggcccctgctgacctctccagtggcctcagggtgacgtcctggccaggccctgtccctctgcagccacctctgcccactgccccaccacctgcccagggctcccccaggctcccacaccagccgtgggggtctctcaggcaggccggccaggtggcaccacggctcccccaagggcagcaggtcaggcgtgagcattgccgtctcccatcccctcctgctgagcccccacaggagcctggcagcccgatcctgtcgccatagtgagggcagctcctggcccaccaggcccagtccacaccagccggccgcaggcagcgtgtctgggagacaccccaggccgcccaccgcccagcaggggacaagccagcccccagacccgtgccctgcacagggggacggggctcagacccaggctgcccttgacagcaggagctgtggtgggcccacggtggggaccactggggacaggcctgggggcacacaatgctcctgaggggcctcaggctgcgtcctgggttggggcactgttctgtgagtaggtgacatgtcaccttgaaagggcttctatttcactaagagaaaaggtggaggctttcctgggggagggcggtgcggtgttgtgtgggacagtgagagagggaccaccagcacagacaaaggagaggaaagtgcagggggggtgggggctgcagggacagaggcttggggaggcgctggaaccgcagggcgcgggcctggggggcccacacgccacctcgagggaccgcacctggggaccacagacgcaggcccactcgggctctggagggccctcctggggctgcctggccacgctctctctctcctggtcccagatcccctccacggcccctccccacccgtccatccagaggttgcccagggctggtcagaaggggtcacatgacacccccaggaccggctggaagtggagggatcgtggtcccgcaattcaactcccacccggcactccccactcaacatcacttaggacagttatattgtttcgggttttttttttcttctgtattaaaagcattaacttccaatactgcttttataaaacacacatgcactgtggtgaggacgttttgttaaaatgaaagggacaagccggggctggacggggaagccccctggtggggggacacgggaggggcaccctgcactcacagaaaagcccctccattctttgcacgtttcaaatgttgtattttcaaatataattaagcgacgtgggaggaagggcaccgcgtgctaggcaggagcagccccctcctgggagggagatggcagacaggggacagggtgggggacagggtgggggacagggtgggggacagtgaccaggtgaggaaagatgcgggtcagggactgggggtgcaaatggggaggtggtgggagacgaagcccctccaaacctgacgccccgccgcttcccgagcccggggttcagggcttcctgttttcctgtgtgattatgagctcctgctcctgccctcgccccacgcgcgagtctcccctggaaggatgtgcaagcttttcacaagcaccacagactcttacaacccgggaccacctgggaccccaggcggtcaggaccagggccaccccacacggcaggcaccagcgctcctgacctgggctgcagaacagcctgtggtcaggcaggggctcccactggcccctgtcctcggcaggcccttccccaggagcagcgtccgggagctcaagacaggcttgggggctgcccgtccacctggggaggatctttgcagggccctttctttctcactaaacagcttgcctgtagaaaggagaattcgaagggatttaaatccagtatttttactggttttccccggggctagccagggtgtctgccccacctgctggtggaaacgaagttcccactctggccttctccgttagggctttatttcatggaggttgcatatgcccgcctccctgcaatgcgatggtgaggccagggactggggatggggcaaggcctggaagggtgtgactgtctgtgaggtggggatgggcctgcagagggacgtccgggaatacacggaggcgtctcgcaccgacaccggggttcactgtgacgggaggggctagagaccatctgagtgggctggaatgggggttgtcgcacacccctcgggggtggatgtgggtgcccagcaagagaagcagacccggccccacaggaggctgcagatggaagcttcagaggcggctccggggctgccacaaaccccgcccctccacgtgcctccctgtcccgggagccgcccctctgacccccaggcccttccccggacgtcccagctgctccacagcccaggcttctcccctcctgcccccatggaacccccaccctgggctgtctgggcctgcctagccggccgtgtggggtcccccaggcccgtggcccaagcacccatctccgtgtccagcgcccagcgcactcggacgtttcacacgcgggcctctggggaggacccccaggcaccgccagcccaaccccggcggccggaaactggacccgctgcggcagccgctgaggctctgctgcccccgtgtggccgacagcagcatcgaacgccgccgaccacgcggcgcttcccgggctcggggcaggggcaggggcaggggcacgggcaggggcaggggcaggggcaggggcaggggcagggccagggccaggggcagggccaggcgtgctctcggggccggatcccggctctgccttgggctcagggctggggcccggtccgtgtccagcactgtgatcccctcccctccccagcgcctgccgcggaggtggctgtggcatccgcgaacaggcatcagcttgtggggctctgtggtctgggatcccagcctctgccaaagtcctgcattccctgggtgtggggacgctgtgacctggggacgctgtggcctgggggccttgcaaggctgcacctggggcagatggggaagctggcctgggctcctcggtggggccccgcgccccccacttctgccggcagcatccgatgctccctgaccctggtcaggacccttcctcctggcgtggcccagtgtccccgcggaagccccagaacgcggcctgcccgggagccggctcgggcctggggcctgcgggtcttcactatggtcgcgaatggacccacgggatgctgcatgaggcgcacgagcttgaggcaccagcctccggccactgtccctggaggacaagggacgcggctccggagcagagggtcctcccctggggatgccctcccggcggctgggtgtggggctgggggctgtgcccggaagtgggtgggtgggagaagccctcctgagcacagaggacagcagccaggcccaggcccaggccctgcaggcccccaggggctccagagccccagagaggaggaaggcctccgtgtgctcagaatcagctcacaccccggggacgaacctcagagggccgggacaaggaaaggaaggccccggcccaacatcggggtctgggcgctggtgggacagggcaggctcagccttggggccggtcagggccctgttggggttcgggtccccctgccaggtccgcgtctgcagccacagcccctcaaccccagcagggaccccagagaccggctcgggaccccctggtggccgtcttgtgccactgcagttctgctgctgagaggttcccggggttcccggggttcccggggtccctggcccggcagcctcctgggctcccaggcaggcgcgctctgccgtccgctcatgcggggacagcggacctcagaggcaagcctaaaagacgcgcccagatcaggatcccaggaacccagctcacatacaaatcagaaaagccctaaagaagcagaaacaagaatcagtgaaacaagaaactatagaataagaacccaaacaaaagcaaaatgtcggcgttatcagacatagaatatgcaatgtgtgcttcagagggtttttttgtttgttttgttttgagatggagtctcgctctgtcgcccaggctggagtacagtggtgcgatctcggctcactgcaacctccgcctcccgagttcaagcgattctcctgcctcagcctcctgaatagctgggactacaggtgcccgccaccacgcccgactaatttttttggatttttagtagacacggggtttcaccgtgttagccaggatggtctcgatctcctgacctcatgatcttcctgcctcagcctcccaaagtactgggattacagcgtggccaccacgctcggccaagagattttttaaacttacttacagaagctattcaaatattactgcaaaatgggaaattactgcacattgcattttgaaatgacctgagagttttacgaagaacttctagaattgaaaaccgtaatagatgaggctaaaataagaatggatgggacaggcagcgcagaggacacgcaggagcgggagctggtaacaccgaagaaagagcaggagacgccacccagcccgagcgcagccccgcggaggctggacggaggctcccacaagggcttcttctgcccaaaggagaaacagagtcgggggaggcagtggctgggaattttccaaaatcgctgaataacaggacgcgtcaggatcaaggccaagtcccaagcaggataaataaaagcaaactccacgtccacaccttgacgcttgccgatggagctgccaacaccagaggcaaagagactttagaagcatccaaaaggaggccgggcgtggtggctcacatctgtaatcccagcacttttcgaggcagaggtgggtgggtcacctgaggtcaggagttggagagaccagccaggccaacatggtgaaacccggtctctattaaaaacacaaaaattagctggacgtggtggcgggtgtctgtggtcccagctactcgggaggctgaggcaggagaatcgcttgagcccgggaggcggaggttgcagtgagctgccatcgcgccactaccctccagcctgggagacagagtgagactctatcaaaaaaaaaaaaaaaatccgtcagggccggcccaggcaggtgcactcgcgcggccacagactccagagccggactcgggagccccccggcggccgtcccgtgccactgcacgttctcatagacaggagagtctcaagaaccctggagcaaacaagacgcctggagcagcctcccagcatctactcacctctgccggccgtttacacccgaaagccacccctcaagaccaggacaacggtgacactttcatacaaagggcacaggcacttaactccgcacgctggctgctggcgcctcctaagagtgtgtttagaaatgttaaagaaaaaattattccatgatagttgttcaatgcggaggcaggtgtgattcaggaccaccgccgcaggagcagggaccacggccatgcgggagagagatggggctcagttcttaacacagcatgggctggcggggattgacagccagggagctgggtaaactcggaggacggacattcccaagaggaaatattggggggaaggagggttctggctaaattagcccaggaagatttttgctgaagacagaccagggtgatcagacctgggagatggtggaagatgaggaactcaggatcaagggtgatcaaatgtcaagagtgggtctttaacctgatttaggggggttctttttttttctttttttttttttttttgagacgtagtctcactctgtcaccaggcagtggcacgtgtcatcgtgcagtggcacgatcttggctcactgcaacctctgcctcctgggttcaagcaattctcctgcctcagcctcccgagtagctgggattataggcgcgtgccaccacacccagctaattttcgtatttttagtagagacagggtttcaccatgttggccaggctggtctggaactcctgacctcagatgatcagcccacctcagcctcccagagtgctgggattacaggcatgagccaccgctccgggccccaccgggtactttttaaagcctttttcttacaaggaagtgcaggccggcctaggagaagtttccagagcccgactgcagtttagccaagcagagaatctttgtcagtccacactgtttaaggaaagaggagacattctcgtttccctccaacaatataagtccattttcttgttgggtggcctttcgttcattaagaaccagctggattttctgttgggactggatagaagaggacatttcgccgcatggtgctagcagttggacattcgaagaggagagactctgaaaataaatgaaacacaaaggttaacacttagaaatgcagtttctgagcccagtgggcaccaggccagaagatttctagacgctgggcctgaagcatcttcagctgcagccaggtaggcagctgaagggccttcctgatttgcaggtcaggtgttgcagaagctgcccgcacaggatctgtggggatgatttctctgaagtttacatcaacttgtcccatttcagctcacagggcttcaggaaaagggcagttttaaatttgactgattccaagtcagagggtgagggaaaaattagtttgcagagttgttgcctgatattagagaaaactagaagaattctgaaggggccagcccctccacacctgtgggtatttctcatcaggtaggacgagagactgagaaaagaaataagacacagagacaaagtatagagaaagcacagtgggcccaggaaaccggcgctcagcatacagaggacctgcaccggcaccggcctctgagttccctcagtatttattaattactattttcactatctcagcaagaggaatgcggcaggagaacagggtgacagtggggagaaggtcagcaagaaaacgtgagcaaaggaatctgtgtcacaaataagttcaagggaaggtactatgcctggacatgcacataggacagatttatgtttctctccacccaaacatttcagtggagtaaagaataacaaggcagcattgctgccagcatgtctcgtctcccaccacagggtggtttttctcctatctcagaatagaataaatgtacaatcgggttttataccgagacattccgttcccaggggcaggcaggagacagaggccttcctctatctcaactgcaagaggccttcctcttttaccaatccacctcagcacagacccttcacgggtgtcgggctgggggacggttaggtctttctcatcccacgaggccatatttcagactgtcacatggggagaaaccgtggacaatacccggctttccagggcagaggtccctgcggctttccgcagtgtattgtgcccctggttcatcgagactggagaatggcgatgacttttaccaagcatactgcctgtgaacactttgttaacaaggcacgtcctgcacagccctagatccctgaaaccttgattccatacagcacaggtttctgtgagctccaggttggggcaaagtggctggggcagagttacagattaacacctcagggcaaagcagttgttcagggtacaggtcaaaatggagtttcttatgtgttccttttctacatagacacagtaacagtttgatctctctttcttttccctacatagccccctttccttttgacaaaaccgccatcgtcattatggccccttctcgctggtcgctgtctcttcagagctgcgggatatacctgtagactttgtttttttcaggcttttcttagctaactgtgtcagctcctgtatttggccccaggtcagtggctttgcttccttggtggatggcaacttcttctgtaagttgtagatactaaattggaagctggttttttcctggggaaatacaagcaaaacttctcccccatgttatcaccttccctatttcccatgtcttgtttttgttgtctttccaccacatcagttttccttcatgtgggctgctctttttgccagtaaaatgttgttctgcagaagtagtggtctgatttctataaatgtttaaacaatttaaagtatagattgctaggttaagttgcatctggggagcgttatactcctgtctttttcttctttttgtttcaccagttgagattttgagtgttctattagttctttcaattatggcctgtccttgggaattatacaggattcctgttgtatgtgtaattttccactgatttaagaatttttgaaatgttttactacagtatcctggcccattatctaattttttctggaactcccatgacagcaaaacaagacaataaatgtcttttaacatgggaagtactttctcctgtctggcaggttgcccatacaaaatgtgaataagtatcaactgtcacatggacaaatgataattttccaaatgaaggtacaggtgtgacatccgtttgccataacgcattaggacatagacctctgggattaacttctgcctcctgagtgggcaggtgtaggacttgacactaggtgcaatgctgtacaatattttttgcctgtttccatgtgataccaaatttattttttagtcctgttgcatttacatgagttgaggcatgaagttcttgtgcttccatgaaggcagatgacactagcaagtcagcttgttcatttgctttagttaaaggccctggtaaattagtatgcgctcgaattgagtaatataaaatgggaaatttctttttctcacagtttgttgtaacaaattaaacagctggtttaactgatcatccatgctatatttaattagggctgtctcaacatcctttgtaccctgtactacatatgcagaatctgatacaatgctaataggctgattaaaatcttataacactgaaatgacagcaaccaactctgctctttgagctgagtgatattgagtttcagtgactcgttcttttggcccagtgtaagccacttttccattgctagaaccatcagtaaacaccgtcagagcatttttttaaaggtttctgtctggtaattttaggtaaaatccaagtagtcaattttaaaaactggaagattttcgttttggggtaatgattatcaataattcccacaaaatcagcaagacccatctgccatgcaccagaatttataaaggcttgtctaacctgttccttgtttacaggaacaatgattttatctgggtcaattccacacaattttattattcgtaattttgcctgactaattaatgtagccgtttgatccaagtgcaatgtaaaagtcttaatcgtactgtgaggaaggaaggaccactccacaagatctgtgttttgaacaatgatgcctgttggagaatgtgcagtagcaaaaatcaaaagtcggagtggggctaagtggtctattctatttacttgtgctggctgaattttttcttcaactaattcaatttctttcgtggcctctggagttaatgttcttttactattcgattctggatccccgctcaagatagagaacaaatttgacatggcattaagtctacaagtttgtgtcctatcctgaggtcgcagggtgctccactgagtgaggactgcccgccccacccagaggtgtcggttacttcaccatggcagttgtggcccctgctgctgcacatgccgccccagggggcactgcctcaggaaagccaggcacacccaagggtgcaggaatggcaggccctggcggtttggcgcgcaacagccggaacaagtacatgcgctcgggcctctgttccaccttcaccatccagtctctgcagccgcagccaccccctcagcctcggcctgcagcggtgctccccaacgcagctcctgcagtccaagcccctgggaggcctgcctggaggctgaggaagccggcttccctctgcaggtcatcctgaccccgcccgaggccccaaacccgaaactggaagagccgaatgtggagccgggcttgcgccgccctttgcccccggaagtggaagtggaagggcccgaggaagagctggaattcgcgggggagagagggttcgtgccagaaaccgccaaggccgagcctgaagtccctccacaggagggcgtgccagcgtggctgccgaggtccttatggacaccgcagggcaggcgggcggccacgcggcttccagccctcagatctcccagccgcagaagggccggaagccccgggacctagagcttccactcagcccgagcctgctaggtgcgccgggacccgaacggaccccaggatcgggaactggctccggcctccaggcgccgaggccggcgctgaccctgtccctgcttcctacgcacacgttgaccccggcgctgctgacacccagctcgctgcctcccagcgttcacttccggagcagcctgagtcccgctgcgccccgcagcccggccaagctctcctgccagcttccgtccagtggcggcgcccaggtgcacatcccttccatcggcgtggctggcctctcgacccccgcggtgctctcgccagggccgcagaggccatgaccaccaccagcaccaccaccccttctggggtccctccatccgtgctctctcaaggagaaacacagttcaactgaaagactcatgctctgattgtggtggggtggggatccttgggaaggatttctcccaggagtgactctcattaactcctccacagaaaacactcagcttccacagcttctctcttttctctcttttctgtccgtcccccagtggctgccctgacacgtctcctacttcaatggtaggggcggtttatttatttattttttgaaggccactgggaagcgcctgacctaacctattagggtggtcaggacgtctcccccacctccccgcttttttccccaagacaggacaatcggggtctgacttgagaacgacctttctttcttcattcctcggcctgcccgtggggagatgagggagccctgtgtccattttaggatgtgagtagaagttagtttcgttttattattcctggccatactcggggtccaggaagaatttgtaccatttaatgggttgggagtcttggccaaggcagaatcacacccttggaatagaaatttccacctccccaacctttctctcagacagcttatccttttttaaccaactttttggccagggaggaatgtccctttgttcttcttccccctgagaagccattcctttgtctgccaaactccctggggtcctgcctgtttcctcccatggaggggttttgtgggggtggttcctgtctgggggggcccctccagccagtactccaggtctccctgtctctcccgtgctgccattttgatagtataatctatttttaaatggggcttttcaataggggagagggagtcatctcttcctatatttggtggggtgggtgtgaagaaagggatttgggagggaatcttcctgccgcctcccccccagatgtttatttttgataacaaatgtgtattttcagttccctccctcccagccccccaatttcctacaggtaggtacaaaggacactttcaatgtccctggaggtgggagggaggaatgggggacataaagcctgtcctgtctctattctaggcaggaagagtgggttcaaaagactcctgggcttccctgtcagccctggcccagcccaggccttgggacctgggggttggtgatttgggggacggtgctacactcgtctccactgttttgcttccccaaaatggaccttttttttttctaaagagtcccagagaatggggaattgttcctgtaaatatatatttttcaaggtgaaaaaaaaaaaagaaaaacctgccataatgaagagcagaccaatattccagaaaactgtcactttaacagagaagaccaaattctagtttcacatgaactgttaatattaaagctaattttaattaaaccttataaataattccatccaggctgggcaaggtggcttacacctgtagtcccagcattccaggagggtggatcacttaagcccaggagtttgagatcagcctgggcaacatggggaagccctgtctctacaaaaaatacaaaaaaaaaattggccaggcatggtggcacgtgcccgtagtcccagctacttgggaggctgaggtgggaggattgcttgagccctcccacctcaacctccctcagcctcagtgctgagtgccactgcactgctgcctaggcaacacagtgggaccctgtctcaaaaataaataaataaataaatccggccaggtgcagtggctcatgcctgtaatcccaacactttgggaggcctaggcgggtggatcatgaggtcaggagttcgagaccagcctggccaacgtggtgaaacccctgtctctactaaaactataaaaattagctgggcgtggtggtgggcacctgtaatcccagctactctggaggctgaggcaggagaatcgcttgaacccaagaggcagaggttgcagtgaaccgagatcacaccattgcactccagcttaggcaacaagagtgaaactctgtctcaaaaaaataaataaataaatccaatcacagccgcctttgaccacataagatcccttttccacaatccttttacaactttttatttgtttgttttttgttttgttttgttttttgtttttgtttttgttttttttgagacaaagcactgacctggctgccgagccccgccccctaggctgcaggggtgcctgcagaagggcaccacagggccaccagtcctgcaagctttctggggcaggccgggcctgactttggctttggggcagggagggggctaaggtgaggcaggtggcaccagccaggtgcacactcaatgcccgtgagcccagacactggaccctgcctggaccctcgcggatagacaagaaccgaggggcctctgcaccctgggcccagctctgtcccacaccgcggtcacatggcaccacctctcttgcagcctccaccaagggcccatcggtcttccccctggtgccctcctccaggagcgtctctgagggcacagcggccctgggctgcctggtcaaggactacttccccgaaccggtgacggtgtcgtggaactcaggggccctgaccagaagcgtgcacaccttcccggctgtcctacagtcctcaggactctactccctcagcagcgtggtgaccgtgccctccagcagcttgggcacccagacctacacctgcaacgtagatcacaagcccagcaacaccaaggtggacaagacagttggtgagaggccagcacagggagggagggtgtctgctggaagccaggctcagccctcttgcctggacgtaccccggctgtgcagccccagtccagggcagcaaggcaggccccatctgtctcctcacccggaggcctctgcccgccccactcatgctcagggagagggtcttctggctttttccaccaggctccaggcagccacaggctggaagcccctaccccaggccctgcgcacaaaggggcaggtgctgcacttagactggccaagagccatatccgggaagaccctgcccctgacctaagcccaccccaaaggccaagatctccactccctcagctcagacacctctcctcccagatctgagtaactcccaatcttctctctgcagagcccaaaaccccatgttgtgacacaactcacacatgcccaccatgtgcaagtaagccagcccaggcctcgccctccagctcaaggcgggacaggtgccctagagtagcctgcgtccagggacaggccccaaccgggtgctgacacgtccgcctccatctcttcctcagcaactgaacccctggggggaccgtcagtcttcctcttccccccaaaacccaaggataccctcatgatctcccggacccctgaggtcacgtgcgtggtggtggacgtgagccacgaagaccctgaggtcaagttcaactggtacgtggacggcgtggaggtgcataatgccaagacaaagccgtgggaggagcagtacaacagcacgtaccatgtggtcagcgtcctcaccgtcgtgcaccagaactggctgaacggcaaggagtacaagtgcaaggtctccaacaaaggcctcccagcccccatcgagaaaaccatctccaaaaccaaaggtgggacccacggagcgcgaaggccacgtggacagaggccggcttggcccaccctctgccctgggagtgaccgctgtaccaacctctgtccctacagggcagccccgagaaccacaggtgtacaccctgcccccatcccagaagatgaccaagaaccaggtcaccctgacctgcctggtcaaaggcttctaccccagcgacatcgccgtggagtgggagagcaatgggcagccggagaacaactacaagaccacgcctcccatgctggactccaacggctccttcttcctctatagcaagctcaccgtggacaagagcaggtggcagcaggggaacgtcttctcatgctccgtgatgcatgagggtctgcagaaccactacacgcagaagagcctctccctgtccccggggtaaatgagtgcgacggccggcaagcccccgctccccgggctctcgcggtcgcacgaggatgcttggcacgtaccccgtctacatacttcccaggcacccagcatggaaataaagcacccaccactgccctgggcccctgcgagactgtgatggttctttccacgggtcaggccgagtctgaggcctgagtggcatgagggaggcagagcgggtcccactgtccccacactggcccaggctgtgcaggtgtgcctgggccgcctagggtggggctcagccaggggctgccctcggcagggtgggggatttgccagcgtggccctccctccagcagcacctgccctgggctgagccacgagaagccctaggagcccctggggacagacacacagcccctgcctctgtaggagactgtcctgttctgtgagcgccctgtcctccgaccccccatgcccactcgggggcatgcctagtccatgtgcgtagggacaggccctccctcacccatctacccccacggcactaacccctggcagccctgcccagcctcgcacccgcatggggacacaaccgactccggggacatgcactctcgggccctatggagggactggtccagatgcccacacacacactcagcccagacccgttcaacaaaccccgcactgaggttggccggccacacggccaccacacacacacgtgcacgcctcacacacggagcctcacccgggcgaactgcacagcacccagaccagagcaaggtcctcgcacacgtgaacactcctcggacacaggcccctacaagccccatgcggcacctcaaggcccacgagcctctcggcagcttctccacttgctgaccagctcagacaaacccagtcctcctctcacaaagtgcccctgcagccgccacacacacacaggggatcacacaccacgtcacgtccctggccctggcccacttcccaatacagcccttccctgctcctggggtcacatgaggggtgggcttcatatctcctgccctctggggctcagggagggacacgggagacggggagcgggtcctgctgagggccaggtcgctatttagggccgggtgtctggctgagccccagggccaaagccggtgcccaggatggacagcttccgggagctgacctcaggacactgttgggccatcgaggccgggccctacatcctaggccccgccacagagggaatcacccccagaggcccaagcccagggggacacagcactgaccacccccttcctgtccagagctgcaactggaggagagctgtgcggaggcgcaggacggggagctggacgggctgtggacgaccatcaccatcttcatcacactcttcctgctaagcgtgtgctacagtgccaccgtcaccttcttcaaggtcggccgcacgttgtccccagctgtccttgacattgcccccatgctgtcacacactgtccctgacactgtccccaggctgtccccacctgtccctgacgctgtcccccacgctctcacaaactgtccctcactctgtacccacctgtccaacagtgtcccccagactgtctccacatgtccctgacactatccccaacgctgtcgccacctgtccctgacactccccaacgctgtacccacctgtccaacagtgtcccccagactgtctccacatgtgcctgacactatccccaatgctgcacccacctgtccctgacactgtcccccacactgtcacaaactgtccctgacactgtcccccacacgttccctgtccctgacactgtcccctgtgctgtcacaaactgtcactgacagtgtcccccacactatccccacctgtccctgacgctgtcccccacactatccccacctgtccctgacgctgtcccccacactatccccacctgtcccggacactattccccacactgtccccaccagtccccaacactgtaccccatgctatccccacctgtccccaacactgtcccccacagtcccctcctgtccctgaatgtcccccatgctgtttcctcctgtcccctcctgtcccgacactgtcccctacactgtcttctcgtctcctcctatccctgacactgtcccccacgctgtcccctcctgtccccaacaatgtcccccacagtttcctcctgtacctcacactgtcccccatgctgtcttctcctgtctcctcctgtccctgacactgtcccccacgctgtcaccacctgtccccgacactgtcccccatactgtccccacctgtccccgacactgtcccccacgctgtcccctcctgtccccaacactgtccccatgctgtctcctcctgtctctgacactgtcccccactctgtcccctacagtccctgacactgtccccatgctttcccctcctgtatgcaacactgtcccccatgctgtctcctcctgtccctgacactgtcccccatgctgtccccacctgtcccactgtcccacatgctgtccccacctgtccctgacactgtccccgacactgtctctcatgctgtccccacccatctccgacactgtaccccatgctgtccccacctgtccttgacactgtcccccatgctgtccccacctgtccctgatgctgtcccccacactgtccccatctgtccctgacactctccccaatgctgtccccacctgtccctgacactgtcccccacgctgttcccacctgtccccgacactgtcccccacactgtccccacctgtcccaacaatgtcctcacactgtccccacctgtcccgacactgtccatgctgtccgcacctctccctgacactgtcccccatgctgtccccacctctccctgacgctgtcccccacactgtcccctctccctgacactgtcccccacactgtccccacctttccctgacactgtcccccacgctgtccccacctccccctgacactgtcccctacactgttcccacctctccctaacactgtcccccacgctgtcccctcctgtccccaacactttcccccacgctgtccccaccagtccccaacactgtacaccatgctttccccacctgtccccaacactgtcccccacactgtcccctcctgtccccaaaaatgtcccccacactgtttcctcctgtccccaacactgtccaccactctgtctcctcctgtccctgacactgtcccccactctgtccccacctgtccccaacactatcccccacactgtctccacctgtccctgacgctgtcttctgtactgcccacatgctgttggtgccctggctctgctctccatgtccaggcctcagagcaggcagtggtgaggccctggcacctgggtggactgaagggcggatgggcctcaggggcagggctgtggcctgggtggcatgaggggtgggtggaccttgggggaagagatgtggccctcagtgccctgaggggtgggtggggctcggggacagggctgtggcctcgctcacccctgtgctgtgccttgcctacaggtgaagtggatcttctcctcggtggtggacctgaagcagaccatcgtccccgactacaggaacatgatcgggcagggggcctagggccaccctctgcggggtgtccagggccgcccagaccccacacacgagccgtgggccatgctcagccaccacccaggccacacctgcccccgacctcaccgccctgaaccccatggctctctggcctcgaagtcaccttctgacccctgacacgccccccttccagaccctgtgcatagcaggtctaccccagacctccgctgcttgatgcatgcagggcgctgggggccaggtgtcccctcagcaggacgtccctgccctccagaccaccaggtgctcacacaaaaggagtcagtgaccggcatcccaggcccccacccaggcaggacctcgccctggagccaaccccgtccacaccagcctcctgaacacaggcgtggtttccagttggtgagtgggaaaatcagccgccaaggtagggaagccacagcaccatcaggccctgttggggaggcttccaagagctgcgaaggctcactcagacggccttcctcccagcccgcagccagccagcctccattccgggcactcccgtgaactcctgacatgaggaatgaggttgttctgatttcaagcaaagaacgctgctctctggctcctgagaacagtctcggtgccagcaccaccccttggctgcctgcccacactgctggattctcgggtggaactcgacccgcagggacagccagccccagagtccgcactggggagagaaggggccaggcccaggacactgccacctcccacccactccagtccaccgagatcactcagagaagagcctgggccatgtggccgctgcaggagccccacagtgcaagggtgaggatagcccaaggaagggctgggcatctgcccagacaggcctcccagagaaggctggtgaccaggtcccaggcgggcaagactcagccttggtggggcctgaggacagaggaggcccaggagcatcggggagagaggtggagggacaccgggagagccaggagcgtggacacagccagaactcatcacagaggctggcgtccagtcccgggtcacgtgcagcaggaacaagcagccactctgggggcaccaggtggagaggcaagacgccaaagagggtgcccgtgttcttgcgaaagcagggctgctggccacgagtgctggacagaggcccccacgctctgctgcccccatcacgccgttccgtgactgtcacgcagaatccgcagacaggaagggagactcgagcgggagtgcggccagcgcctgcctcagccgtcagggaggactcccgggctcactcgaaggaggtgccaccatttcagctttggtagcttttcttcttttaaattttctaaagttcattaattgtctttgatgtttcttttgtgatgacaataaaatatcctttttaagtcttgtacttcgtgatgggagccgccttcctgtgtccacgtgcctcctgcccccggtgggaaacacggtcaggaggaggctggtccagctgcacctcgggggctccctgcacacgccccccgcctcctgcagccacacgcattgcccgagcgaccctccctggcccctgtcgctacatggacccccggggcttctcctcttttctacatggatgcagtttctcctcctgctgggcacggtgctgcctgccctggtcactctgcgggggacagggcctccagggaaagctgggtcgaggctgggagctggctcaggctggccaggcagagccacagggagggccttccagaaccaaccatggtccgaagcgagaggtgggtgtcagatctgtgtgagtcagctcaggaccacagcggggcggctcccacggcagacatggatcctcccaggcctagagaccaggaatctgagatcaggatgcaggcagggctggtttctctcaagccctctctccttggcttgtagacaccgtctcctccctggtcctcacgtggccatccctctgtgtgcccgtgtcctaagcttctcttcttagaacacacatcggattagattagtgaccccctatgaacttaatgacctctgtaaagaccccatctccaaatagtcacattgtgaggccagggattaagacttgaatatatgaatttgtaggggccacaatttaacccatcacagtccagactctgggccccaaaattcatgttcttctcacatgcagaatacattcatcctgtctcagcatccccctgggcactaggtcatgtagcaaggacagattttcaacagaaataactattgcaacagaagaaagagtccggcatgacctggactcaccttcatctgtgcagaggccacagccttgtaaagggaggtggtagggggagcagggagggtgctcggggctcagtcttcggggaagggaaaagttgcccagcgctggtcagcgtccccgggatgggacccgctgtgtccgtgccggccactgttgaggtcaggattctgtcctcccagagcctggagacacaggccccatccttcccaatggggacacttcagggagcggctctcaagtcttgagaaagaccctcctgggtcacaggaaatgcacagacatcgggaacggatagaaggtcgtgtggttgcggccctctcagcagataccctgagaaagggaggtcggggttggtccaaacggtgagttctggtgcacggagctttctcaggcaggtgttgacggggcaggggtcggcctaggggtacggccagaagctgttagaaactgttagtgtctgctcaagtctttacaagccaaggttgaggccgagtggagaggctccgaggagcctggctggaactcagtcaaggacagggtcttgttactgcagtggctgcggtggctgcggtggctggaaaatgccgtcggagttgcctgtggcaggagagagaccatctcacccaggaaggaggagtggttggattcgtttgtgtggcatcgagcagctggagctgcaccagagttgggggtgaaatccccagagcccggaccctgctgtgccgtgggagggctcgccgctggagggtgggcttcagggtgcctggcctgaactgggtgctgaagcccagccctttaactctcaggacacgctgctgcagccccgcggggggtgagggagagagcacctggggtgcagggcgggcagcagctgcatcaccggctctatcccaagcccaaggatggcccctccctgaagcacccaggccccacctccccctttccacctggaaccgagcatcctccagagggccagtcctcctgcaggaacaccacgcccagccccaggaccctccctcaactctccagcaaggctgcctccacgcaccccctagcagtccatgctgtgatgtaacatgacatggtgtgatgtggtgtgatatccatggtgtgccagggtgtaatgtgtgatgtgacaggacatggtgtgatgtggtatgacagagtgtgacatccctggtgtgacatggtgtgatgtggtgtgatgtgatgtgacatggttggacatggtgtgatgtggtgtgacatagtgggatggggcatgacatccctagtatgataggatatgatatggtgtgatgtggtatggtgtgacatggtgggacatcctgtgacagagtgtgacacccctggtgtgatgtggtgtgacgtagtgtgatgtgatatgacctgatgtgatgcggtgtgacatccctggtgtgatggggtatgatatcatttaacgggtgtgatgtgatgtgatgtgatggagtgtgacatctctggtgtgacatgtgtgatgtggtgtgacagagtgtcacatcgttggtgtgatgtaatgcagtgtgacatggtgtgatgtggcatgatggggtgtgacagggttcgacctccctcatgtgatgaggagttgcatggtgtgatgtggtatgacatggtgtaatgtcccttctgtgatgtggtgttgggctacaaggttggacatggtgtgatgtggtgttacatccctggtgtgatgcagtgtgacatagtattatatggtatgacatccctggtatgatggggcataatatggtttgatgtggaatggtgtgacatgatgtgatgtaatgggacaaggtgtgacatccctagtgtgatgtggtgtgatgaagtgtaacaggctgtgacatagtgtggtgtggtgtggtgtgacatgatgtgatgtggtttggcataatgtgacgtgttctgatggggcgtgacgcccctggtgtgatggggtgtgatgttgtgtggcattatgtgaagtggtgtgatgacgggtgacatccacggtgtgatggggtgtgatgtggtgtgatgtggcatgacataaggtgatgtggcataacatccctggtgtgatggggtgtgatgtggtgtgacacaatttgatgtggtgtattgtggtgtgacataatgtgatgtggcataacatccctggggtaatggggtatgatgtagtttgacatggcgtgacgtaatgtgatgtggtgtgatggggtgtgacaactctggtggggtggggtgtgatgaagtgtggtgtgacatgatgtgatgtctgatgtgctgtgtcagggtgtcacatacttggtgtgatgtgatgcggtgtgacacagtgtgatgtggcatgatggggtgtgacctggtacgacatccccagtgtgatgaggagttacatagtgtgatgtggtgtgacatccctggtgtgacatagtgtgatatggtgtgatgaagggaacccctggcttatagaggtgtaaaataggtcaaaggaaataaaagatgcagagctcaatagaatgaaataacctggaagagggtacaagacgatgccttgctttccatggaaggcacctactaatcttttgtttttctcaatgtttcctataaacatatataactgactgacacaaacagatccataatataaagaagacccctgtaaaccaacgagaaaaaaaatcaaataattcaacaaggaataggcaaaagaattgaacagatgttttacagaagatatccaaatagccgctaaacatatgaaaaggtgttgaaccacactagtcaacagggaaatgaaaatgaaaaaccacatgagagaaagtagttctgattccagtaatgctggagcagctaatatcagactagccctttggcagatggcaattataaacactggaaaagctgtaagcacacacaacacccacacacaccaattgcaggcactggaacatgaccagaagtaggcaaacactagtaaggattattcccggaaatattggtctgaagtcacaccccagggcatgtaatgggtgcagctagagttcaagcaggaaactgcagccctcctggtgaggagtgggatgcagggctgcattttcagagcagctggaaatgaagagaagatgtccataaaggagaaggtcaccaaagggaaaccccacaatctgcaagtaaactccactgaaacctctggccgatcccttaggtgtgcatgggtagggaaaactccaaagggcccagcagaaagcagcacctgtaaggtcgagagaactgagattccagctactgccaactgccaggcagacagacttgggagtttgagtcaactcaagctgtttcctaacattgaaaaaaacaatcaatgccctgccaaggaagaacgcaaaacccatagcctgtaccacatgttatcaacaacatcaggtgcacatccaaaattaccatatatgcaaagaaacatgaaaatgtgatccatagtcagaagaaaaagggatcaatggagatcaactccaagatgacctagatgcagacccagttttcacacaaggactttaaagaagtcatgttaaatatgttcaaagacttaaaggacaatatggttataatgagtgactagatggggaatctctgtaagaaagggaaaatattaacaagaaccaaatgaaaattctagaactaaaagtatgattctgaaatgaaaaacatcatttggccaggcacagtggcccatgcctgttatcctagcactttgggaggccaagaaggaaggatcacttgatcccaggagtttgagaccagcctgggcaacatggagaaatcccatctctattttattaaaaaagaaaagaaatagaaaaacattactcaagtttcataacagaatggagcagacatgagaaggaactgaaaacttaaagatgcatcaatagactatgtcaattatttttaatctaatgcaaagaagagagagaaaaatactaaaaatgaaaagagactcatcctgctggacaaggcgaagcattctaaaacatgtgaaactggagtccagagggggatgtaatacttccatgggaaaggtcaaccctaagctatatgcaaatgtacctgcgtaggctggtgtgctgggttgatggcatctccctggccaaatgtatgcccacctggaacctcagaatgtgaccatatttagaaatagggtctttacaaattagtttaaggacttgagatgatatcatactaaattttcgatgggtcccaaatccaaagactggtgtcctcatgagaggagaggacacagacacacatggaagtagccagatgatgacaaaggagaagatgaggggtgtgtcaggagccacctgtgtttgtccctttgcattactgtaaagaaatacatgaggctgggtaacttataaaggaaagagattgaattagctcacagttctgcaggctttataggaagcatggcatcagcatctgcttctggcgaggacctcaggaaacttacaatcatagcagaaggtgaagggagagcaggtatgccacatggcaagaatgggagcaagaggctgagggggggcccagacttaaacaactagactgtgtgtgagctgactgggggagaattcactcatcaccaaggggaagatgctcaatcattcatgagggatctgcccccttgatctaatcacctcctagtggccccacttccaacactgggaatcatattacaacatgagatttggaggggacaaatatataaaccatatccttccacccctggtcccccaaatctcatgtccttctcatgttgcaaaatacaatcatgccttctcaacagtcccccaaagtcttacctcattccagaatcaacaaaaaattcccaagtcccaagtctcatctgaagatgagtcccttccacctatcagcctaggaaatcaaagacaaattgactcccaaaatacaatgagagtgcagacattgggtaaacattcccattccacaagggagaagttggcaaaaagaaaggatctacatgccccatacacgtcagaaatccagcagggcagttattaaatcttaaagctccaaggtaatctcctttgacttcatgtcccatatccagggcacactggtgcagggggtgggctcccaaagccttggacaactctacccctgtggctttggaggatgtagcccctgtggcttctctcacacgatagagttgagtgcctgtggcttttccagattcagggtgcaaactgccagtggatctaccattctggggtctggaggacagtggcccccttcccacagctccactaggcagtgccctggtggggacattatatgggggttcaaccccacattctctttggcactgctctagtagaggttctctgtgagggctccatgctggcaggaggcttctctctgggcacctagggtttctcatacatttctgaaatctagagtgaagatgccaagcctccttcactcttgcattctgggggcctacaggcttaacaccagatggaagttcccaaggcttatagtggcttgcactctccaaagaagcagcctaagctgtacttggggccctttgagccaaggctggagccagaggaaccaggatgtggagagcagtgtcccaaggctgcacaggcagcagtggccatgggcatggcccacaaaaccatcctttccctcttggcctctgggcctgttatgggaaagaccacctcagagatttccgaaaggccttcaaggcctttttccctttgttctggatatgagcacttagctcccttttagttatgctaatctctctagcaactggctgctccatagcctacttatatttgtctcctgaaaataccttttcttttctaccacatggccaggctgtgaattttccacattttttatgctctgcttccctttgttgatgaaaaaagccaaactccataaaacacttgacgagattgattctgagccacatgtgagagccatgaactgtggcacagcctcaaaaggtcctgagaacacctgtgcaaggtggttgggttgcggcctgcttttatgttttagggagacatatcaatcaatacatgtaaagtatacattggtttggtttggtttggaaaagcaggacaattcaaagtggggaattccaaatcataggtggatttgaagattttctgattggcaattggctgaaaaagttaaattatctaaaaagttgaagtcagcaaaaagcaatgcttaagataagggggttgtggaagccaagtttcttgttatgtagatgaagcctccacgttccagagagaagagatggtcaatgtctcttatcagaacctaaaaggtgccagactcttggataaatctctcctgaatcaggaagagacctggaaagggaaaaagattctcaacagaatatacatttcctccacaagagacggctttgcagggcccttccaaaatgtgtcagagaaatatattctggcataaaatactttaatttccttccatgcctgccacctgtcatgtgatgctataccagaatcaggttgggatttgatatcttattgctacaaagagtctgctttgtcagtcttaagctccctgttttaatgttaacactggtcagctgagcctaagctccaacagggagagggtatagtgagggagtccaaaccaccctccccttcctgtcatggcctgaactggttttccaggtttctttggaatccccttggattagcattttattttgtcgtttacaccttttaaatataagttccaactttaagtcatttctttgctcccatatcttaccatagactgttagaagcaaccaggtcacaccttagaaacatctgcttagaaatgtcttccacagatgccctaagtcatcactcttaaggtcaaccttccacagatccctagggcatgaacacaatgcagccaagttgtttcttaggatttaacaagcgtgacctttacaccagttcccaataagtttctcatttccatctgagatttcatcagcctggctttcacagtccatatgtctatcagcattttggtgacaaccatttaatagtctctaagaaattccaaactttccctcatcttcctgtcttcttctgagtcctccaaattcttctaacctctctgcctgttacctgattccaaagctgcttccacattttcaggtatccttatagcaatgttccactcctcaataccaatgttctgagttagtctatttgtgttactagaaaaaaaaaaaaaacatgaatctggtaatttataaagaaaagaggtttgcaccaggcactgtggcaaggaagggaggattaactagctcacagttctgcagccattccggaaacacggccctggcatctgcttctggcgaggcctcagggagattgcaatcacggcagaaggcgaagggggagcaggcatgtcacatggcaagagggagcaagagaagagaagtggcacgtcctagacttttaaacaaccagctgtcacagggactaactgagggagaactcactcatcacctgggagatggtgctaggccattcatgaggggtccagccccatgatctaatcacctcccaccaggcccacctccaacactgggaatcacatctcaacatgaaatttggagagacacacatccaaactattgcaccacaggaagctggaagaggtggacggtcctcccctggagcactcagagacagccaccaacaccttgatctcagattcctgactcccagaactctgaaaaaatttttgttgttttaagccacatttgtgatattttgttacggcagccacagcacggatatagctggtaacagagttctttagcctccaaaatacaagcctggggtaaataactattgaatttggccacatggaaatcaggaagaatgtaataagcatcatcgatggacgggatgacctgggagatcgtggcaagtttaaagctaattggaagttggcaaccaaaaaatcctgtcttgcaaattgccaggaaattgccaagaaaacttttagaaaacatggttaaagatggagaaacctggatgaatccctggtttctgaagaggtgcttaggcattgaagtgagactgatgagacttcacactgtaccttcagaagggcagacactcacgagatcatcaaccacggctccctcgctgggaggcagacacagagctggaggcggcggccacaaactaggtgggcagagaggcgtcagcatcgggacttgcgggaggccctgggaaggaacaggcagcggtggggcctggacagccctggggaaaggaagttacttggaggagaccaggggcttgcatttgggccaaaaccaaggacaagagatcagctggtcccagggaactctggagcccagcaccccaccacgggtgcagggtcctgacaacccgagagggctgtgggcaccgggcaccagcctgtggggattctgaaggctgctgcccagccacacgtcccggttctgaacaaagggttcaagagacacctgcaaacctacctttctgagagcagcctcttagcctcagctggtattggcctttggtcaccccacatgccccgacagtggggcctggcctcagaaaggggcccctccatttgtactttctatctgatccttgacacagtgctaacaccaaagaccaaacccgaatcttggttcacatactctgcaaagaaatgactaagactagttcttccggaggtcagttttagaacgtttattctgacttaattctgccttatctctgtgcaccaagaaaactatctgcacatctgtagtaaaatgtgaaggtaccttcattttgtttgtatactaaacttttaagaaatacctcactttttaaaacttggttttgtgttttgtatgcttataatattttccataatagatcattttaatgatgaactctgagtcttctgacagaatgcagatcaatggattcctagccatcagggaggcgttgattgcaaaggggcctggtggaatttttggagagattctacatcttcttgcaactgttcatctggattacggtggtggttgcatgactgtgcatttgttgaaacttacatgtcacaggatggattatactgaatgtaaactacacttgagtaaatatgacttttaaaactttaaaaagttgggggatggttcactgccccggctcgaagccccctggccacgctgcctggccagcccacccccatccctgccagcgcttgcctccagcgtcccaacagcctcctgaccccctgggctgctctaaaccctcaggagcgcagccatccgggatcagctggatggagatggggagcccgagactcgtgccacaccacgtcctcccgcccacaccagccacacgcagacgtcaaagcagcactgtcctcgcacgcactgctcccacccaccctggcacggccattccaggcctggggcaggaaggcagatgctccccctgcccccagacacaagcattcctgcacacacccccagcacacacacgcactcccatgcgcacactgacacacacaggtgtgtgcagctgagacacagcccgttcccaggaagcccagcccccatcactgagggaaaggggcagcaccgtagggccacaggagtggcagctggacacagagccaggagctggtgaaggcccaggccactgaggcgggctgccggcatggctgggcgtgaaggccagaagagggcaggaggggctgggggcactatgcctattgggcctaggtgggcacacgccgggcaggagaggaacagcccagcccctcagacaggaaggggtgggggcaggggccatttgtggaggccagggcagggccagcaccccaaggaaaagcagagcagggtgagaacggacatggggctcagagctgagcaggcctgctgggccccaggagggagacacagatgaccggagatctcaaggctggcagaggccagagatggagccccagctgggaagccatcctccttcctgggggcccacgctgcccggcccctccagcccagcaagcttggggcattggatagaaccgggagagagccgaccaggcactgaggcccctgccccaaatgcccacagcctggggaaaatgagcaggtacatgggaggggcaagtggagccccaggcacacccacacagtgcacacggcctcacctgggccggagggggcaggaggctcgccaccccgctgtggtttctctcctaatctcaccctgggtttctctcacacttgatgcagatgatgtttctctgacattgtggactaagagttggtgctggaaggggttagccatcttggagatgttgctatgggatgcagggattttgcgtgtgagaaggacatgattatggggggaacggagggcaaactgtcatgggttaaaatgtgtcccctataaattcatgtgttgaagtcctaacccccaggaccgcagaatgtgaccttgtctggaaacagtctttgcagctgcaatcaagttcagatgaggtcaccctggagtagggcaagcctctgatccaatatgactgctgtcctcatgaaaagggggaatctgggcacagacagcacgtggggagaacgccctgtgaagatggtgctgcttccataagccaagagcaccagagacggccggcaaagcccagcagcaaggagagagcctgggacagagtctcccatgacacagaggagccagccccaccgaggcctccatcccagatgcccggcctccagaaccaggacggaataaacgtctgttgtttaagccacgcagtctggggtgcagtgttgccagggccacagttaacggatacgagtgttgtcctgagctgccagccccacaggctgcacgaggcctccctgccccagcccagtgcagactccccagccccctgggtgtgccatgggcagtggggggcccctcactccgtcctcccccagcctgggaggttgagcccattatgagctccatggggtgaagctggaacgagaggctgggagccgactgggagcctgcggctggaggatggatttccccagggacccacacgtgcacctccacctgtctcctggacattctctctgagggcagggctggtgccagctcagggatccagcagggtcacaagggcaggccgggtccttgtggagagcacatttagtgggagggacatgatttcccttcaaagtgcccattctggacgcttcccgttccatgctggacgcttcctcttccacgctggatgcttcctgttccacgctggatgcttcctgttccacgctggatgtttcctgttacactctggatgcttcctgttccacactggatgcttcctgttccatcctggatgcttcctgttccatgctggacatttcctgttccactctggatgctccctgttccatgctggatgcttcctgttccatgctggatgcttcctgttccatgctggacatttcctgttccactctgcatgcttcctgttccactctggatgcttcctgttccacactggacgcttcctgctccacgctggacgcttcctgttccatgctggatgcttcccgttacattctggatgcttcccgttccatgctggacgcttcctgttccacgctggacgtttcttgttccactctggatgcttcctgttccacgctggatgcttccttttccacgctggacacttcctgttccgcgctggacacttcctgctccacactggacgcttcctgctccaggctggacgcttcctgttccatgctggatgcttcctgttacattctggatgcttcccgttccatgctggacgcttcctgttccacgctggacgtttcttgttccactctggatgcttcctgttccacgctggacgcttcccattccactctggatgcttcctgttccatgctggacatttcttgttccactctggatgcttcctgttccatgctggatgcttcctgttccatgctggatgcttcctgttccatgctggacgtttcttgttccactctggatgcttcctgttacatgctggatgcttcctgttccatgctggacgtttcttgttccactctggatgcttcctgttccatgctggatgcttcctgttacattctggatgcttcctgttccatgctggacatttcctgttccactctggatgcttcctgttacattcttgatgcttcctgttccatgctggacatttcctgttccactctggatgcttcctgttacattctggatgcttcctgttccatgctggacatttcctgttccactctggatgcttcctgttacattctggatgcttcctgttccatgctggacatttcctgttccactctggatgcttcctgttacattcttgatgcttcctgttccatgctggacatttcctgttccactctggatgcttcctgttacattctggatgcttcctgttccactctggacgcttcccattccactctggatgcttccttttccatgctggacctttcttgttccactctggatgcttcctgttccatgctggatgcttccttttccattccggacacttcctattccattctggacacttcctgtgcgacacctcctcgggcttttggtctgcccagtccctctggcctcataccatccccccttacctcccacttccacgttcgtccttcctcagctcctccctctctctagagcttcggcctggcaaggtccctcctgatctcagtccaggctcccccagcacaggtaggagacttgcacctgcccttggacctccccaccctgcatgatgccagcatcccccaggccccagggaggccccatttctctctctgcttgtagtccagtggccctggagtgccactgcaactcgggtgtgcccctcgcctctgaggaagctaagtgccctaagctaagcagaggccatcccctctgctcagccccagggccctgccccctaccccttcccctcacctgcaccacaggctctggccaactctgcccaggctctgaatgggcccctctggctcccctctgctgctacactgccctgcaccacctccactcagcttcagtgtgttcatccacctgtcccacgtcccctcggcccccaggagcacagctggtggccctggctcctggcagcccatcttgttccttctggagcaccagcctcagaagccttcctgtgcagggtccactcggccagccctgggaccctcctggtctcaagcacacacattctccctgcagccagacctgcccctgcctgtgagctcagacctgagccttggaacgccttcccttctccatcccagctcgcctttgccagctgctcagcgggatgaactcacactcccctccctgcaccatgagtgagagccagctggagagacgcccaggccaaagcagccaccagggcccagtgggggtcagaagcttcaggtgagaggcccaggtattgagaggctgagaccacgggcagaatggtcataatcactgccagtatcagtccagccccagggactcagagacagagaaaagagcagtgaacaaggtccgggctccccaccttctcccacgagtatgggggcagccaccacccccatccccacacacccatgaggcagcctcggctgtgtctggactcccccttaccctgtgacacagaaaccaccagaagaaaagggaacttcaggaagtaagcggtgccgccggtttcaatcctgttcttagtctttgcagcgtggagttcacacccctggggacctgagggccgagctgtgatttcctaggaagacaaatagcagctgacggcgtgggcaagtctgcccacatgtaccgcgccaaaacaggaagggctgagacccccacctcggtgagtagggtcagcacagggcaagggcacaggctcgggaggagaaggacagagcctgggtgcagccgtgggcgctcctggacctcagctgctgaacaggctacaagaggctggggagacgtgggggcaaggccagccccacatggagacccaagcggagccagcacgggggaggtgggcagccttcaggcaccaacgcccacccagtgcaagatgacggggaccgtgggcaggggcttccaagccaacagggcaggacacaccagaggctgactgaggcctccatgacgaccaggctgggagcacgaggaacctgacgggatgcggcagagccggccgtggggtgatgccagcatgggcaggacccacctgagctgaggaggcagtagaacgagggaggaggagaggccccaggtgaacggaggggcttgtccaggccagcagcatcactggagcccagggcagggtcagcagtgctggccgtggggccctctctcagccaggaccaaggacagcaggtgagccgggagcagagcagggagggtgagtgtggcagcaggacaggagggtggaagccaaggagcccagaggcagaggcagggacaggggaggcacaggggctaggctcagagccacctgatggcgctggggcacctgctggcggggagcagggctgtggtcagcagcggagtggaggggagagctgtgctgagtgcacagatgggaggagggaagagtccagggaggcccagaaaggcccagagtgcagcaggcctggggcgaggggaggggtgaggctccgtgcgttcagggagctgacccagcagagcagaggccactgaggagctgaggttctggagaggcttccagagcaggagcagtgcagggacgggaggatctgggagctcacccaggaggggcacatgggcaagggcaaggggctctgttggggagacctgactggacactggggctgctccacagcatagggaacaagccaagtgctgcaaaaacaaaaatgaggccagaaaaacagcccaaacctggacagagggtgccaggacaggcaggggggcaacagtgacctgagtgacattgctgcccgggttgagggagggcagagtgagcagggggcaggcattggagttcagggtaccaggaccgagcagccacaggtgagcagggcaggtgggggcagaaggagcagggggcacctcctggagctcagcagaccagggcagagcaactgaaggtgaacaagggcaggtgggaggcaggatgagcagggggaagaccctggagctcaggggaccagggcagagcagcctcaggtgcctcaggtgagcaggggctggtgggtggcaggacgagtaggggacagctcctggagctcaggggaccaggacagagcatcaagagctgagcatggctagtgggaggtgggcgaacagggtgcagcccctggaactcgggaccagggcagagcagcggcaggtgagcacgggctggtgggaggcaggaggaacagggggcagctctgggacttcaggggaccaggggagggcatctgaaggtgaacaggggctggtgggggcaggaagagcagggggaagcccctggagctcaggggaccagggcagagcagccacaggtgagcaggggctggtaggaagcaggaggagcaggggacagcccctggagctcagagcaccagggcagagcaccctcaggtaagcaggggcaggtaggaggcaggacgagcaggggacagcccctggagctcaggggacagaggagagcatcagaaggtgagcaggactgaggcttagcctcagggaatcagagcagagcagccacaggtgagcagggccggtgggaggcaggacgagcaggggacaggcactagagctcagggcaaggcaaccacaggtgagcagggccggtgggaggcatcactcagctcctagattttggcaggagctgggtagttgctggcagcagacagctgagggctggtgaaagtgcagtgcagcctcctggtgccaggaagggagtgtgagcccatcccactgagcagttggcaagggtgagctgggatggagaagggaaggcattccagggctcggggctgagctctcaggcaggggcaggtgtggctgcagggggaatgtgtgcttgagaccaggagggtcccagggctggccccagcggaccctaggcaggaaggcctctgaggctggcgccccagaaggagcaagatgggctgccaggagccagggccaccagcacaatgaagctgagtggaggtggtgcagggcagtgtagcagcagagggctgccagaggggcccattcagggcctgggcagagtcagccagagcctgtggtgcaggtgaggggaaggggtggtgagcggggccctggggctgagcagaggggatggcctggctgagggcagggcacttagcctcctcagaggtcaggggcacaccccacctgcagtgggactccagggccactgggccagcggcagagagaaatggggcctccctgtggcctgggggtcctggcaccacgcagggtggggagggccaagggcaggtgcaaggctcctacctgtgctggggggcctgggttgagcccagcagggaccttgccgggggaagctctggagagagggaggaggtgggctggtggccgagaaggccaggccagggctgggagggtgaggttgtggtgactgagcctccagaagtaatgcaggacactgggaggcagggggcatccaggcactcagggccctgacctgggctgctgcacactggggctaaggggaaaggaggggagaggctgaggaggaggctccaggaggctattccaaggcagggggttccggggccctggggctgaagggcgccgaccctatgcagtgtctggcccctctgctgcacagaagaaaagggccttggagggcagagggcaggctatgaccagggccctgggcaagtcaggcccactcactagcggagggccacgctggggcggcagggtcaggagcttcaggggactcgggggacccacgagaagccatctgagaacagtgtccactggtcaagccaggcacccataaaaggctggagtggggccaatgggcatgagccgtccctgaggtggcaccgatggccagagctgaggccaagctagaggccctggactgtgctgactcccggcaggcacagagcgctgacctggctgccgagccccgcctcctaggctgcaggggtgcctgcagaagggcaccacagggccaccggtcctgcaagctttctggggcaggccgggcctgactttggctttggggcagggagggggctaaggtgacgcaggtggcgccagccaggtgcacacccaatgcccgtgagcccagacactggaccctgcctggaccctcgcagatagacaagaaccgaggggcctctgcgccctgggcccagctctgtcccacaccgcggtcacatggcaccacctctcttgcagcctccaccaagggcccatcggtcttccccctggcgccctgctccaggagcacctccgagagcacagcggccctgggctgcctggtcaaggactacttccccgaaccggtgacggtgtcgtggaactcaggcgctctgaccagcggcgtgcacaccttcccggctgtcctacagtcctcaggactctactccctcagcagcgtggtgaccgtgccctccagcaacttcggcacccagacctacacctgcaacgtagatcacaagcccagcaacaccaaggtggacaagacagttggtgagaggccagctcagggagggagggtgtctgctggaagccaggctcagccctcctgcctggacgcaccccggctgtgcagccccagcccagggcagcaaggcaggccccatctgtctcctcacccggaggcctctgcccgccccactcatgctcagggagagggtcttctggctttttccaccaggctccaggcaggcacaggctgggtgcccctaccccaggcccttcacacacaggggcaggtgcttggctcagacctgccaaaagccatatccgggaggaccctgcccctgacctaagccgaccccaaaggccaaactgtccactccctcagctcggacaccttctctcctcccagatccgagtaactcccaatcttctctctgcagagcgcaaatgttgtgtcgagtgcccaccgtgcccaggtaagccagcccaggcctcgccctccagctcaaggcgggacaggtgccctagagtagcctgcatccagggacagaccccagctgggtgctgacacgtccacctccatctcttcctcagcaccacctgtggcaggaccgtcagtcttcctcttccccccaaaacccaaggacaccctcatgatctcccggacccctgaggtcacgtgcgtggtggtggacgtgagccacgaagaccccgaggtccagttcaactggtacgtggacggcgtggaggtgcataatgccaagacaaagccacgggaggagcagttcaacagcacgttccgtgtggtcagcgtcctcaccgtcgtgcaccaggactggctgaacggcaaggagtacaagtgcaaggtctccaacaaaggcctcccagcccccatcgagaaaaccatctccaaaaccaaaggtgggacccgcggggtatgagggccacatggacagaggccggctcggcccaccctctgccctgggagtgaccgctgtgccaacctctgtccctacagggcagccccgagaaccacaggtgtacaccctgcccccatcccgggaggagatgaccaagaaccaggtcagcctgacctgcctggtcaaaggcttctaccccagcgacatctccgtggagtgggagagcaatgggcagccggagaacaactacaagaccacacctcccatgctggactccgacggctccttcttcctctacagcaagctcaccgtggacaagagcaggtggcagcaggggaacgtcttctcatgctccgtgatgcatgaggctctgcacaaccactacacacagaagagcctctccctgtctccgggtaaatgagtgccacggccggcaagcccccgctccccaggctctcggggtcgcgcgaggatgcttggcacgtaccccgtctacatacttcccgggcacccagcatggaaataaagcacccagcgctgccctgggcccctgcgagactgtgatggttctttccgtgggtcaggccgagtctgaggcctgagtggcatgagggaggcagagcgggttccactgtccccacactggcccaggctgtgcaggtgtgcctgggccgcctagggtggggctcagccaggggctgccctcggcagggtgggggatttgccagcgtggccctccctccagcagcagctgccctgggctgggccacgggaagccctaggagcccctggggacagacacacagcccctgcctctgtaggagactgtcctgtcctgtgagcgccctgtcctccgacctccatgcccactcgggggcatgcctagtccatgtgcgtagggacaggccctccctcacccatctacccccacggcactaacccctggctgccctgcccagcctcgcacccgcatggggacacaaccgactccggggacatgcactctcgggccctgtggagggactggtccagatgcccacacacacactcagcccagacccgttcaacaaaccccgcgctgaggttggccggccacacggccaccacacacacacgtgcacgcctcacacacggagcctcacccgggcgaaccgcacagcacccagaccagagcaaggtcctcgcacacgtgaacactcctcagacacaggcccccacgagccccacgcggcacctcaaggcccacgagccgctcggcagcttctccacatgctgacctgctcagacaaacccagccctcctctcacaaggtgcccctgcagccgccacacacacacaggcccccacacacaggggaacacacgccacgtcgcgtccctggcactggcccacttcccaatgccgcccttccctgcagctgaggtcacatgaggtgtgggcttcaccatcctcctgccctctgggcctcagggagggacacaggagatggggagcgggtcctgctgagggccaggtcgctatctagggctgggtgtctggctgagtcccggggccaaagctggtgcccagggcaggcagctgtggggagctgacctcaggacactgttggcccatcccggccgggccctacatcctgggtcctgccacagagggaatcacccccagaggcccgagcccagcaggacacagtattgaccacccacttcctgtccagagctgcaactggaggagagctgtgcggaggcgcaggacggggagctggacgggctgtggaccaccatcaccatcttcatcacactcttcctgctaagcgtgtgctacagtgccaccatcaccttcttcaaggttggccgcacgttgtccccagctgtccttgacattgtcccccatgctgtcacacactgtccccatgctgtccccacatgtccctgacactgtcccccatgctgtccccacctgtcccggacactctcctccgcgctgtcttgacctgtgcccaacactgtcccccacgctatccccccatccccaacaatgtcccccacagtttcctcctgtcccctatccccgacactgtcctccacactgtccccacctctccctgtcactgtcgcccatgctgcccccacctgtcccaacactttcctccaagctgtcctcacctgtccccaacactctcccccacactctctccacctgtccctgacactctcccccatgctgtccccacctgtccctgatgctgtcctccacactgtccccacctctccctgtcactgtccccatgctgtcccctgtccctcacactttcctccatgctgtcctcacctgtccccaacactctcccccactgtctccacctgtccctgacactgtcccccacactgtccccacctgtccctgatgctgtcgtctgtgctgtccacatactgttggtgacctggctctgttctccaagttcaagcctcagagcaggcagtggtgaggccgtggcacctgggtggcctgaggggtgggcgggccttgggggcagggctgtggcctcgctcacccctgtgctgtgccttgcctacaggtgaagtggatcttctcctcagtggtggacctgaagcagaccatcgtccccgactacaggaacatgatcaggcagggggcctagggccaccctctgtggggtgtccagggccgcccagaccccacacaggagccgtgggccatgctcagccatcacccaggccacacctgcccccgacctcaccgccctcaaccccatggctctctggcctcgcagtcgccctctgaccctgacacgccccccttccagaccctgtgcatagcaggtctaccccagacctccgctgcttggtgcatgcagggcgctgggggccaagtgtcccctcagcaggacgtccctgccctccggcccgccaggtgctcacacaaaaggaggtagtgaccagcatcccaggcccccactcaggcaggacctcgccctggagccaaccctgtccacgccagcctcctgaacacaggcgtggtttccagatggtgagtgggagcatcagtcgccaaggtagggaagtcacagcaccatcaggccctgttggggaggcttccgagagctgcgaaggctcactcagacggccttcctcccagcccgcagccagccagcctccattccaggcactcccgtgaactcctgacatgaggaatgaggttgttctgatttcaagcaaagaacgctgctctctggctcctgggaacagtctcagtgccagcaccaccccttggctgcctgcccacactgctggattctcgggtggaactcgacccgcagggacagccagccccagagtccgcactggggagagaaggggccaggcccaggacactgccacctaccacccactccagtccaccgagatcactcggagaagagcctgggccatgtggccgctgcaggagccccacggtgcaagggtgaggatagcccaaggaagggctgggcatctgcccagacaggcctcccagagaaggctggtgaccaggtcccaggcgggcaagactcagccttggtggggcctgaggacagaggaggcccaggagcatcggggagagaggtggagggacaccgggagagccaggagcgtggacacagccagaactcatcacagaggctggcgtccagccccgggtcacgtgcagcaggaacaagcagccactctgggggcaccaggtggagaggcaagacgacaaagagggtgcccgtgttcttgtgaaagcggggctgctggccacgagtgctggacagaggcccccacgctctgctgcccccatcacgccgttccgtgactgtcacgcagaatccgcagacagggagactcgagcgggagtgcggccagcgcctgcctcagctgtcagggaggactcccgggctcactcgaaggaggtgccaccatttcagctttggtagcttttcttcttcttttaaattttctaaagctcattaattgtctttgatgtttcttttgtgatgacaataaaatatcctttttaagtcttgtacttcgtgatgggagccgccttcctgtgtccacgcgcctcctgcccccggtgggaagcacggtcaggaggaggctggtccagctgcacctcgggggctccctgcatacgccccccgcctcctgcagccacacgcattgcccgagcgaccctccctggcccctgtcgctacatggacccccggggtttctcctcttttctacatggatgcagtttctcctcctgctgggcacggtgctgcctgccctggtcactctgcgggggacagggcctccagggaaagctgggtcgaggctgggagctggctcaggctgcccaggcagagccacagggagggccttccagaaccaaccatggtccgaagcgagaggtgggtgtcagatctgtgtgagtcagctcaggaccacagcggggcggctcccacagcagacatggatcctcccaggcctagagaccaggaatctgagatcaggatgcaggcagggctggtttctctcaagccctctctccttggcttgtagacaccgtctcctccctggtcctcacatggccatccctctgtgtgcccgtgtcctaagcttctcttcttataagaacacacatcggattagattagtgaccccctatgaacttaatgacctctgtaaagaccccatctccaaatagtcacattgtgaggccagggattaagacttgaatatatgaatttgtaggggccacgatttaacccatcacagtccagactctggcccccaaaattcatgttcttctcacatgcaaaacacattcatcctgtctcagcatccccctgggcactaggtcatgtagcaaggacggattttcaacagaaataactattgcaacagaagaaagagtccggcatgacctggactcaccttcatctgtgcagaggccacagccttgtaaagggaggtggtagggggagcagggagggtgctcggggctcagtcgtcggggaagggaaaagttgcccagcgctggtcagcgtccccgggatgggacccgctgtgtctgtgccggccactgttgaggtcaggattctgtcctcccagagcctggagacacaggccccatccttcccaatggggacacttcagggagtggctctcaggtcccgagaaagaccctcctgggtcacaggaaatgcacagacatcgggaacggatagaaggtcgtgtggttgcggccctctcagcagataccctgagaaagggaggtcggggttggtccaaacggtgagttctggtgcacggagctttctcaggcaggtgttgacggggcaggggtcggcctaggggtacggccagaagctgttagaaactgttagtgtctgctcaagtctttacaagccaaggttgaggccgagtggagaggctccgaggagcctggctggaactcagtcaaggacagggtcttgttactgcagtggctgcggtggctgcggtggctgcgaaatgccgtcggagttgcctgtggcaggagagagaccatctcacccaggaaggaggagtggttggattcgtttgtgtggcatcgagcagctggagcttcaccaaacacagagttggggactaaatccccagactccaggccctgccatgccgtgggaaggctcgccactggagggtgcgctccagggggcctggcctgaactgggtgctgaagcccagccctttaactctcaggacacgctgctgcagccccgcggggggtgagggagagagcacctggggtgcagggcgggcagctgctgcatcaccggctctatcccaagcccaaggatggcgtcccagagatgcaggagagctttgtccagagaaggtgccagccctcagggaccctgctggagagatctccaccctctgcccttcaaggggccctacgggcctccaggtgctctggtggggtgggctccagtccactgtctgaggatggacggcctggccaggataaggaaaggaaacccaggacggtgccgggctccgggtcattccgtgcactgagcaggctgagttgggaagaagcagatgcttcctgcagctgctgccccctgcagggcctggcgcctggaccaggttcccctggggaaattgggcccctccctgagccacccggggcccacctcccactttctacctgggaccgagcatcctccagagggtcagccctcctgcgggaacaccatgcccagccccaggaccctccctcaactctccagcaaggctgcccctgcacaccccccagcagcccatgctgtgatgtaacatgacatcgtgtgacatggtgtgatgtcctatcacagtgtgacatccctggtgtgatgtggtgtgacatggtgggatgtggtgtgacatggtgtgatgtccctggtgtgaggtggtgttggacatagtgtgatgtgatgcgacagatgtaacatccctggtgtgatttggtgtgacgtagtgtgatgggtatgacatccctggcttgatgaggtataatatgaaatgatgtggaatggtgtgacatgatgtgatgtgatgggacagggtgtgacgtccctggtgtgatgtgatgtaacaggctgtgacatagtgtgatgtgggtggtgtgacatgatgtgatgtggtgtgatggtgtgggacatccctggtgtgatggggtgtgattaaaccttgattccatgcagcacatgtttctgtgagcacagggttggggctaaagttacaggttaacagcatctcaaagcagaacaatttttctttgtacagatcaaaatggagtttcttatgtgttccttttctacataggcacagtaacagtctgatctttcttttccccacagtgtgacatggtgtgacatttctggtgtgactcttgtgttgtgacatttgtggtcaccccaggatacagaggtctctgtggccaagggaagggggagaatggaaccatctgagcatgttgacctggaggaattggtggcccttgagtccacgaagcccacccttccaggtgcccctgccccacgtgacccaagtgggcttgcagagcagcaagcaggactctggttagacaggaggaaggacctgccaccacgtggccttgtgaggagacagagcgaggctgtgacctcggcgtccgcccagcacagggtgctgctgaagctcctccggtcctctcagcagcggtctcagagcaaggcccaaggcaggctgaagagaggggcagagggaggatgctggggaggcaggtgtgaggggactgagagcccaggtttcagctgagcccctccacagggaaggagcctagctgaacacccatctccccacacgctcccaaccctgcctctgcccgaccacctcccagagggcacctcgaaccctctgctacccacactcagcaaggggtatggtgcccccaccaagcccagccagcaaagcctggcacagccacgcctgtgcccaccactcccatggccaaggtcactgctaacatggcaggacagagccaggcctggaggagacagaacatcagtcccatggggaagctccctgctcacacggcagggccaggcctggagaagacagaacaccccatctggcatggtactcaggctgcacatgcctgccacgaacgggggccacgcgacaatgcctgccacacatgggggccacgcaacgatgcctgccacacatgggggccacgcgacgatgcctgccacacatgggggccacgcgacgatgcctgccacgcatgggggacacgtgacacacacatacacacacgggcctcacaggcacacaaatgcttgcgaacccagcacccacccagcacactcaggcataggctccctgggcaggtcacaacctcacgccttgagctagtccatgtgccaggcccgtcacccacgtactcgtccccggtgctagctattgagccacaccgtcttctctgtggatccctcccagcccactcagcacaatggacatgctctctcccgtccagtgactgcaccggcctcttcccctcagcacccaagtctggccatctcccaggaaacccggaccaccacgggcagggaccacgttcctcactgtccacgtggaccaccccacacctgaccccagatgcagtcacactacgtcctgcttcaatattgaaaaggggaaaagctggaggagggtaaagatgaaagagaaaaaagcaagaggggagggtcacattcttctgaggctttgattacatctcactgagcccccacgttgcatgaaaaggaggggtggagggagcaattacacatttgccttgtgctcagtaaatctgcactttataagcaaataaacagagtagaggaagaagtcaaatatgcattcgtctcaggggcaggagggatgatttcttgtctcattttgtcccatgtcatgaagaccgggctgttaatttatattgtcagggtgagggaggccacctgggtagacctggcctatctgctgctgctctcagtttggaaacaaaaggaaacgcatgactttttttttttttttcatgactcagcttcccacctcaactgttctttttggcatagtgactttagggtcctgagattttattttcctttcacaatggtcaagatcacaccctcagtattcaggagagctggtccaacccagacccctgccgtccctggacgcttttcaaatacgtgctgcagtctctgacactctctcaccatggtagaaactgaggtcttggtgagtctgcagcccctgctcatggggacaatgcaggctgaaacccgcatttctgaccccaaagctcctgttcctttcactcacccccacaccagctctttgagtccagagctttgtccttgcctgagtcctaccctcagggacaggggcccaacccagccaccaacacatcataccctgagagggtgccaggagcccagagatgtttggagagcacagtagccctggaagctctgtggagatgctgcacatttctctattcaacagatactcgccaggtggccagcagcagagatgccacatggcatggagctcgccttggccaacaggacaggtgtggggttgggaggccttcccagggcactccttgaagcagagctgtggggaaaagttggggccaatctcagatctccccgtcaacaccgggtctcctgccctcctgggccacagaaaactaagctccgtggatactgcggctgggtggggccgtgggggagaagaaatcacaacgagttaaaagatcattttctaaaactgttatgatcaggactcacataaccatatgacgacacatttcagagatgctctttatctcattaattaaggtgtcgtaaccagttcaaagtggaattctaagtactacacttacataattgattcaggaatgctaaaaggagttcatagatagatgcaaaactggccttttccctggaagatgaggagcaattcattgtccttccaaagatgagaacttgaatttctaccaactcaaagagcttttgcattgctatcaattatgtacaacttagagcagtggtccccaacatttttggcaccaggaaccagttccatggaagacaatttttccacagaccaggatcgggggatggcttggggacaaagctgttccacctcagatcattaggcattagggtgtcataaggagtgtgcaacttagatcccgggaatgtgcggctcgcaatagggttcgctcctgtgagaatctaatgctgccactgatctgacaggaggtggagctcgggcaggaatgctcacacacccctcacctcctgctctgtggcccagttcctaacaggccatgaaccggttccagtgcatgacccagggattggggacccctggcttatagaggtgtaaaatagttcaaaggaaataaaagatgcagagctccacagaatgaaataacctggaagagtgtacaagacgatgccttgctttccatggaaggcacctactaatttttctcaatgtttcctataaacatatataactgactgacagaaacagatccataatataaagaagacccctgtaaaccaatgagaaaaaaaatcaaataatccaacgaggaataggcaagagaattgaacagatgttttacagaagatatccaaatagccactaaacatatgaaaaggtgttgaaccacactagtcaacagggaaatgaaaatgaaaaaccacatgagagaaagtagttctgattccagtaatgctagagcagctaatatcagactagccctttggcagatggcaattataaacactggaaacactgtaagcacacacaacacccacacacaccaattgcaggcactggaacatgaccagaagtaggcaaacactagtaaggattattccgtgaaatattcgtctgaagtcacaccccagtgcatgtaatgggtgcagctagagtttaagcaggaaactgcagccctcctggtgaggagtgggatgcagggctgcattttcagagcagctggaaatgaagagaagatgtccataaaggagaagctcaccgaagggaaaccacacaatctgcaagtaaactccactgaaacctctggccgatcccttaggtgtgcatgggtagggaaaactccaaagggcccagcagaaagcaacacctgtaagtcgagagaactgagattccagctactgccaactgccaggcagacagacttgggagtttgagtcaactcaagctaactgctaacattgaaaaaaacaattaatgctctgctaagaaagaatgcaaaccccatagcctgtacgcatgttatcaacatcaggtgcacatccaaaattaccatggatgcaaagaaacatgaaaatgtgatccatagtcagaagaaaaagggatcaatggagatcaactccaagatgacctagatgcagatacagttatcagacaaggactttaaagaagttatgttaaacatgttcaaagacttaaaggaaaatactattataatgagtgactagatggggaatctctataagagacggaaaatatttacaagaaccaaatgaaaattctagaactgaaagtatgattctgaaatgaaaaacatcatttttcagagcagggtgagaatggacatgggactcagagctgagcaggcctggtgggccccaggagggagacacagaggactgggggatttcaaggctggcagaggccagagatggatccccagctgggactggacctgggcttatgggagcaacaggtgacccatcctccttcctgggggcccaccctgcccggcccctccagcccagcacaggcattggatagaaccgggagagagcaggccaggcactgaggcctctgccccaaatgcccacagcctggggaaaatgagcagatagatgggggggcaagtggatccccaggcacacccacacagtgcacacagccccacctgggccagagggggcaggaggctcgccacccctgctgtggtttctcccacacttgatgcaggtgatattcctctgagattgtggactaagagttggtgctggaaggggttagccatcttggagatgttgctatggggtgcagggattttgcatgtgagaaggacatgattatggggggagcggagggcaaactgttgtgggttaaaatgtgtcccctataaattcatgtgttgaagtcctaacccccaggaccacagaatgtgaccttgtttggaaacagtctttgcaactgcaatcaagttcagatgaggtcaccctggagtagggcaagcctctgatccaatatgactgctgtcctcatgaaaagggggaatctgggtacagacagcacgtggggagaacaccctgtgaagatggtgctgcttccataagccaagagcagcagagacggccggcaaagcccagcagcaaggagagagcctgggacagagtctcccatgacacagaggtgccagccccgccgaggcctccatcccagatgcccggcctccagaaccaggacggaataaacgtctgttgtttaagccacgcagtctggggtgctgtgttgccagggccacagttaacggatacgagtgttgtcctgagctgccagccccacaggctgcacgaggcctccctgccccagcccagtgcagactccccagccccctgggtgtgccatgggcagtgcggggcccctcactgcatcctcccccagcctgggaggttgagcccattatgagctccatggggtgaagccggagccagaagctgggagccgactgggagcctgcggctggaggatggatttccccagggacccacacgtgcacctccacctgtctcctggacattctctctgagggcagggctggtgtcagctcagggatccagcagggacacaagggtgggccgggtccttgtggagagcacatttagtgggagggacatgatttcccttcaaagtgcccattctggatgcttcctggtccacgctggacacttcctgttccacgctggacgcttcctgttccacgctggacgcttcctgttccacgcttgatgtttcctgttccatgctggatgcttcctgttccatgctggacatttcctgttccactctggatgctccctgttccattctggatgcttcctgttccatgctggacatttcctgttccactctgcatgcttcctgttccactctggatgcttcctgtgcgaaacctcctcgggcttttggtctgcccagtccctctggctgcatctcgtcccccgctacctcccacctccacatccgtccttgcccagctcctctctctctccagagtttccacctggcaaggtccctgatgagctcagtccaggctcccccagcacaggtaggagcctagcacctgcccttggacctccccaccctgcatgatgccagcatccccaggccccagggaggccccatttctctctctactgctggcccagtggccctggagtcccactgcaactcgggtgtgcccctgacctctgaggaagttaagtgtcctgtccctagccaggctatcccctctgctcagccccagggccctgccccttaccccttcccctcacctgcacgataggctctggccaactctgcccaggccctgaatgggcccctctggctcccctctgctgctacactgccctgcaccacctccactcagcttcagtgtgttcatccacctgtcccaagtcccctcggcccccaggagcacagctggtggccctggttcctggcagcccatcttgttccttctggagcaccagcctcagaggccttcctgtgcagggtccactcggccagccctgggaccctcctggtctcaagcacacgttctccctgcagccagacctgcccctgcctgtgagctcagacctgagccttggaacgtcttcccttctccatcccagctcgcctttgccagctgctcagtgggatgaactcacactcccctccctccaccatgagtgagagtcagctggagagatgcccaggccaaagcagccaccagggcccagtggggggccagaagcttcaggtgagaggcccaggtattgagaggctgagaccatgggcagaatggtcataatcgctgccagtctcagtccagccccagggactcagagacagagaaaagagcagcacacaaggtccgggctccccaccttctcccgtgagtatgggggagtatgggggcagccaccacccccatccccacacacccatgaggcagcctcggctctgtgtggactccccctcgccctctgacacagaaaccaccagaagaaaagggaacttcaggaagtaaggggtgccgctggtttcaatcctgttcttagtctttgcagcgtggagttcacacccctggggacctgggacctgagctgtgatttcctaggaagacaaatagcggctgacggcgggggcggggccgcccacatgtacctcgccagaacaggaagggttgagacccccacctcggtgagtggggtcagcacagggcaggggcacaggctcgggaggaggacagcctgggcgcagccgtcggcgctcctagacctgagctgctgaacaggctgcaagaggctggggagacgcgggcgcgaggccagccccacatggaagcccaagcggagccagcacgggggaggtgggcagccttcaggcactgatgcccacccagtgcgagacgacggggaccgtgggcaggggcttccaagccaacagggcaggacacaccagaggctgactgaggcctccaggacgaccgggctgggagcacgaggaacatgacgggatgcggcagaaccggctgtggggtgatgccaggatgggcacgaccgacctgagctcaggaggcagcagagcgagggaggaggagaggccccaggtgaacggaggggcttgtccaggccggcagcatcaccagagcccagggcagggtcagcagagctggccgtagggccctcctctcagccaggaccaaggacagcaggtgagccgggagcagagcagcgagggtgagtgtggcagcaggacagaagggtggaagccaaggagcccagaggcagaggcagggacaggggagggacaggggctgggctcagagccagctgatggggctggggcacctgctggcggggagcagggctgtggtcagcagcggagaggaggggagagctgtgctgagtgcacgggcgggaggagggaagagtccagggaggcccagaaaggcccagagtgcagcaggcctggggcgaggggaggggctgaggcccagcagagcagaggccactgaggagctgaggttccggagaggcttccagagcaggagcagtgcagggacgggaggatccgggagctcatccaggaggggcacataggcaaggggctctgttggggagacctgactggacactggggctgctccacagcatagggaacaagccaagtgctgcaaaaacaaaaatgaggccagaaaaacagcccaaacctggacagagggtgccaggacaggcaggggggcaacagtggcctgagtgacattgctgccccgggttgagggaggacagagtgagcagggggcaggcattggagttcagggtaccaggaccgagcagccacaggtgagcagggcaggtgggggtagaaggagcagggggcagctcctggaactcaggggaccagggcagagcagccacaggcaaacaggagaggggagggggggcaggaggagcagggggcagctcttggagctcaggggaccagggcagagacgccgcaggtgagcaggggcaggtgggggggcaggaggagcagggggcagctcttggagctcaggggaccagggcagagcagccacaggtgagcaggggcaggtggggggcagaaggagtagggggcagctcttggagctcagaggaccagggcagagcagccacaggggaggaggggcaggtgggaggcaggatgaacagggggcggctcctggaactcaggaaacaggggagagcatcagaaggtgagcagggccagtgggaggttgcagagcaggggacagctcctggagctcaggggaccagggcagagccgccgcaggtgagcaggggcaggtggggggcaggaggagcagggggcacctcctggagctcaggcgaccggggcagagcagcctcaggtgaaaagggccggtggggggcaggaggagcaaggggcagctcctggaggtcaggggaccagggcagagccgccgcaggtcagcagggccggtgggaggcaggacgagcaggggacaggcactagagctcagggcaaggcagccacaggtgagcagggctggtgggaggcatcactcagctcctagactttggcaggagctgggtagttgccggcagcagacagctgagagctggtgaaagtgcagtgcagcctcctggtgccgggaagggagtgtgagtccatcccactgagcagttggcaagggcgagctgggatggagaagggaaggcattccagggctcagggctgggctctcaggcaggggcaggtgtggctgcagggggaacgtgtgcttgagaccaggagggtcccagggctggccccagcggaccctgggcaggaaggcctctgaggctggcgccccagaaggagcaagatgggctgccaggagccaggaccatcagcacaatgaagctgagtggaggtggtgcagggcagtgtagcagcagagggctgccagaggggcccattcagggcctgggcagagtcagccagagcctgtggtgcaggtgaggggaaggggtggtgagcggggccctggggccgagcagaggggatggcctggctgagggcagggcgcttagcctcctcagaggtcaggggcacaccccacctgcagtgggactccagggccactgggccagcggcagagagaaatggggcctccctgtggcctgggggtcctggcaccatgcagggtggggagggccaagggcaggtgcaaggctcctacctgtgctggggggcctgggttgagcccagcagggaccttgccgggggaagctctggagagagggaggaggtgggctggtggccgagaaggccaggccagggctgggagggtgaggttgtggtgactgagcctccagaagtaatgcaggacactgggaggcagggggcatccaggcactcagggccctgacctgggctgctgcacactggggctaaggggaaaggaggggagaggctgaggaggaggctccaggaggctattccaaggcagggggttccggggccctggggctgaagggcgccgaccctatgcagtgtctggcccctctgctgcacagaagaaaagggccttggagggcagagggcaggctatgaccagggccctgggcaagtcaggcccactcactagcggagggccacgctggggcggcagggtcaggagcttcaggggactcgggggacccacgagaagccatctgagaacagtgtccactggtcaagccaggcacccataaaaggctggagtggggccaatgggcatgagccgtccctgaggtggcaccgatggccagagctgaggccaagctagagacactggactgtgctgactcccggcaggcacagagcgctgacctggctgccgagccccgccccctaggctgcaggggtgcctgcagaagggcaccacagggccaccggtcctgcaagctttctggggcaggccgggcctgactttggctgggggcagggagggggctaaggtgacgcaggtggcgccagccaggcgcacacccaatgcccgtgagcccagacactggaccctgcatggaccatcgcagatagacaagaaccgaggggcctctgcgccctgggcccagctctgtcccacaccgcggtcacatggcaccacctctcttgcagcttccaccaagggcccatcggtcttccccctggcgccctgctccaggagcacctccgagagcacagccgccctgggctgcctggtcaaggactacttccccgaaccggtgacggtgtcgtggaactcaggcgccctgaccagcggcgtgcacaccttcccggctgtcctacagtcctcaggactctactccctcagcagcgtggtgaccgtgccctccagcagcttgggcacgaagacctacacctgcaacgtagatcacaagcccagcaacaccaaggtggacaagagagttggtgagaggccagcacagggagggagggtgtctgctggaagccaggctcagccctcctgcctggacgcaccccggctgtgcagccccagcccagggcagcaaggcaggccccatctgtctcctcacccggaggcctctgaccaccccactcatgctcagggagagggtcttctggatttttccaccaggctccgggcagccacaggctggatgcccctaccccaggccctgcgcatacaggggcaggtgctgcgctcagacctgccaagagccatatccgggaggaccctgcccctgacctaagcccaccccaaaggccaaactctccactccctcagctcagacaccttctctcctcccagatctgagtaactcccaatcttctctctgcagagtccaaatatggtcccccatgcccatcatgcccaggtaagccaacccaggcctcgccctccagctcaaggcgggacaggtgccctagagtagcctgcatccagggacaggccccagccgggtgctgacgcatccacctccatctcttcctcagcacctgagttcctggggggaccatcagtcttcctgttccccccaaaacccaaggacactctcatgatctcccggacccctgaggtcacgtgcgtggtggtggacgtgagccaggaagaccccgaggtccagttcaactggtacgtggatggcgtggaggtgcataatgccaagacaaagccgcgggaggagcagttcaacagcacgtaccgtgtggtcagcgtcctcaccgtcctgcaccaggactggctgaacggcaaggagtacaagtgcaaggtctccaacaaaggcctcccgtcctccatcgagaaaaccatctccaaagccaaaggtgggacccacggggtgcgagggccacatggacagaggtcagctcggcccaccctctgccctgggagtgaccgctgtgccaacctctgtccctacagggcagccccgagagccacaggtgtacaccctgcccccatcccaggaggagatgaccaagaaccaggtcagcctgacctgcctggtcaaaggcttctaccccagcgacatcgccgtggagtgggagagcaatgggcagccggagaacaactacaagaccacgcctcccgtgctggactccgacggctccttcttcctctacagcaggctcaccgtggacaagagcaggtggcaggaggggaatgtcttctcatgctccgtgatgcatgaggctctgcacaaccactacacacagaagagcctctccctgtctctgggtaaatgagtgccagggccggcaagcccccgctccccgggctctcggggtcgcgcgaggatgcttggcacgtaccccgtgtacatacttcccgggcgcccagcatggaaataaagcacccagcgctgccctgggcccctgcgagactgtgatggttctttccacgggtcaggccgagtctgaggcctgagtggcatgagggaggcagagcgggtcccactgtccccacactggcccaggctgtgcaggtgtgcctgggccgcctagggtggggctcagccaggggctgccctcggcagggtgggggatttgccagcgtggccctccctccagcagcacctgccctgggctgggccacgagaagccctaggagcccctggggacagacacacagcccctgcctctgtaggagactgtcctgttctgtgagcgccctgtcctccgacccgcatgcccactcgggggcatgcctagtccatgtgcgtagggacaggccctccctcacccatctacccccacggcactaacccctggcagccctgcccagcctcgaacccacatggggacacaaccgactccggggacatgcactctcgggccctgtggagggactggtccagatgcccacacacacactcagcccagacccgttcaacaaaccccgcactgaggttggccggccacacggccaccacacacacacgtgcacgcctcacacacggagcctcacccgggcgaaccgcacagcacccagaccagagcaaggtcctcgcacacgtgaacactcctcagacacaggcccccacgagccccacgcggcacctcaaggcccacgagccgctcggcagcttctccacatgctgaccagctcagacaaacccagccctcctctcacaaggtgcccctgcagccgccacacacacaggggaacacacgccacgtcgcgtccctggcactggcccacgtcccaatacagcccttccctgcagctggggtcacatgaggggtgggtttcaccatcctcctgccctctggggctcagggagggacacgggagacggggagtgggtcctgctgagggccaggtcgctatctagggccgggtgtctggctgagccccagggccaaagctggtgcccagggtggacagcttccgggagctgacctcaggacattgttggcccatcccggccgggccctacatcctgggccccgccacagagggaatcacccccagaggcccaagcccagggggacacagcactgaccacccccttcctgtccagagctgcaactggaggagagctgtgcggaggcgcaggacggggagctggacgggctgtggacgaccatcaccatcttcatcacactcttcctgctaagcgtgtgctacagtgccaccgtcaccttcttcaaggtcggccgcacgttgtccccagctgtccttgacattgtcccccatgctgtcacacactgtccctgacactgtcccccactctctccacaaactgtccctgacactgtcccccatgctgtacacacctgtccaacagtgtcccccaggctgtctccacatgtccgacactgtcccccatgctatcccccatcctgacactgtcccccacactgtccccacctgtccttgatgctgtgccccacggtctccccacctctccctgattctgtcccccacgctgtacctgtccccaatgctctcccccagcctgtccccaacactgtccgccatgctgtcccacctttcccccacactgtcccccagtctccgcctgtccctgacgctgtcccacatgcggtcccccattcctgatactgtcccccatgctgtccccaccttccccaacactgtaccccacagtccccaccttccccaacactgtccccacctgtccctgacactcccccatgctgtccccacctgtcccccactcaccccccacactgtccctgtctctgacactgtcccccatgctgtccgcacctgtccccgtcccccacgctgtccctacctgtccctgacactgtcccccatgctgtcccccactttccccagctttccctgtcccccacgctgtccctacctgtccctgacactgacccccatgctgtccgcacctgtcccccactctccccacctctccctgtcacccacgctgtccctacctgtccctgacactgtcccccatgctgtccccacctgtcccccaatctccccacctctccctgtcccccacgctgtccccacctgtccctgacgttgtcttctgtgttatccacatgctgtcactaccatggctctgctctccatgtccaggcctgggggcaggcagtgtagagccccggtacctgggtggcctgaaaggcagatgggccttgggagcagggctgtggcctgggtggcctgaggggtgggtggggctcaggggcagggctgtggcctcgctcacccctgtgctgtgccttgcctacaggtgaagtggatcttctcctcagtggtggacctgaagcagaccatcgtccccgactacaggaacatgataaggcagggggcctagggccaccctctgcggggtgtccagggccgcccagaccccacacacgagccgtgggccatgctcagccaccacccaggccacacctgccccctgacctcaccgccctcaaccccatggctctctggcttcgcagtcgccctctgagccctgaaacgccccccttccagaccctgtgcatagcaggtctaccccagacctccgctgcttggtgcatgcagggcgctgagggccaggtgtcccctcagcaggacgtccctgccctctggaccaccaggtgctcacacaaaaggaggtaaccggcatcccaggcccccactcaggcaggacctcgccctggagccaaccccgtccacgccagcctcctgaacacaggcatggtttccagatggtgagtgggagcatcagtcgccaaggtagggaagccacagcaccatcaggccctgttggggaggcttccgagagctgcgaaggctcactcagacggccttcctcccagcccgcagccagccagcctccattccgggcactcccgtgaactcctgacatgaggaatgaggttgttctgatttcaagcaaagaacgctgctctctggctcctgggaacagtctcggtgccagcaccaccccttggctgcctgcccacactgctggattctcgggtggaactggacccgcagggacagccagccccagagtccgcactggggagagaaagggccaggcccaggacactgccacctaccacccactccagtccaccgagatcactcggagaagagcctgggccatgtggccgctgcaggagccccacagtgcaagggtgaggatagcccaaggaagggctgggcatctgcccagacaggcctcccacagaaggctggtgaccaggtcccaggcgggcaagactcagccttggtggggcctgaggacagaggaggcccaggagcatcggggagagaggtggagggacaccgggagagccaggagcgtggacacagccagaactcatcacagaggctggcgtccagtcccgggtcacgtgcagcaggaacaagcagccactctgggggcaccaggtggagaggcaagacgacaaagagggtgcccgtgttcttgcgaaagcggggctgctggccacgagtgctggacagaggcccccacgctctgctgcccccatcacaccgttccgtgactgtcacgcagaatccacagacaggaagggaggctcgagcgggactgcggccagcgcctgcctcggccgtcagggaggactcccgggctcactcgaaggaggtgtcaccatttcagctttggcttttcttcttcttttaaattttctaaagctcattaattgtctttgatgtttcttttgtgatgacaataaaatatcctttttaagtcttgtacttcgtgatgggagccgccttcctgtgtccacgcgcctcctgcccccggtgggaagcacggtcaggaggaggctggtcgagctgcacctcgggggctccctgcactcgccccccgcctcctgcagccacacgcattgcccgagcggccctccctggcccctgtcgctacatggacccccggggcttctcctcttttctacatggatgcagtttctcctcctgctgggcacggtgctgcctgccctggtcactctgcgggggacagggcctccagggaaagctgggtcgaggctgggagctggctcaggctggccaggcagagccacagggagggccttccagaaccaaccatggtccgaagcgagaggtgggtgtcagatctgtgtgcgtcagctcaggaccacagcggggcagctcccacggcagacatggatcctcccaggcctagagaccaggaatctgagatcaggatgcaggcagggctggtttctctcaagccctctctccttggcttgtagacaccgtctcctccctggtcctcacatggccatccctctgtgtgcccgtgtcctaagcttctcttcttataagaacacacatcgcattagattagtgaccccatatgaacttaatgacctctgtaaagaccccatctccaaatagtcacattgtgaggccagggattaagacttgaatatatgaatttgtaggggccacaatttaactcataacagtccatgctatggccccccaaatttcatgttcttctcacatgcaaaatacattcatctgtctcagcatcccccaagtcttagtcctttcagcatcaattctaagcctaaaatctcatcaaactgtcaccctcatcaggcacaggtgaaacctggtgtgtgattcattctatggtaaaattcagcccataggacacatggtgggtgccaggaacgaggacaaggcaggagaggcaaaggtggagagagacattttcaaagataaagctgggcactagatcatgtagcaaggacggattttcaacagaaataactattgcaacagaagaaagagtccggcatgacctggactcaccttcatctgtgcagaggccacagccttgtaaagggaggtggtagggggagcagggtgggtgctcggggctcagtcgtcggggaagggaaaagttgcccagcgctggtcagcgtccccgggatgggacctgctgtgtccgtgccggccactgttgaggtcaggattctgtcctcccagagcctggagacacaggccccatccttcacaaaggggacacttcagggagcggctctcaagtcttgagaaagaccctcctgggtcacaggaaatgcacagacatcgggaacggatagaaggacgtgtggttgcggccctctcagcagacaccctgagaaagggaggtcggggttggtccaaacggtgagttctggtgcacggagctttctcaggcaggtgttgacggggcaggggtcggcctaggggtacggccagaagctgttagaaactgttagtgtctgctcaagtctttacaagccaaggttgaggccgagtggagaggctccgaggagcctggctggaactcagtcaaggacagggtcttgttactgcagtggctgcggtggctgcggtggctggaaaatgccgtcggagttgcctgtggcaggagagagaccatctcacccaggaaggaggagtggttggattcgtttgtgtggcatcgagcagctggagctgcaccaaacacggagttggggactaaatccccagactccaggccctgccatgccgtgggaaggctcgccactggagggtgggctccagggggcctggcctgaactgggtgctgaagcccagccctttaactctcaggacacgctgctgcagccccgcggggggtgagggagacagcacctggggtgcagggcgggcagctgctgcatcaccggctctatcccaagcccaaggatggcgtcccagagatgcaggagagctttgtccagagaaggtgccagccctcagggaccctgctggagagatctccaccctctgcccttcaaggggccctacgggcctccgggtgccctggtggggtgggctccagtccactgtctgaggatggacggcctggccaggataaggaaaggaaacccaggatggtgccgggctccgggtcattccgtgcactgagcaggctgagttgggaagaagcagatgcttcctgcagctcctgcccctgcagggcctggcgcctggaccaggttcccctagggaaattgggcccctccctgagccacccggggcccaccgccccctttccacctgggaccgagcatcctccagagggtcagccctcctgagggaacaccatgcccagccccaggaccctccctcaactctccagcaaggctgcactgtgggcggcccctgcacataccccagcagtccgtgctgtgatgtaacatgacatggtgtgacgtggtgtgatgtctctggtgtgacgtggatgtcatgtggcatgatgtgacaggacatggtgtgatgttgtatgatgtggtatgacagtgtgatatccgaggggtgatgtgatgtggtgtgacatgttgtaatgtccctggtgtgaggtggtgttgcacatggtgggatgtggtgtgacatggtgtaatgtccctggtgtgaggtggtgttgcacatggtgggatgtggtgtgacacagtgtgacatccctggtgtgatgtgctgtgacatagtgtgatgggtatgacatccctggtatgatgagctataatatgaaatgatgtggaatggtgtgacatgatgtgatgtgatgggacaaggtgtgacatccctggtgtgatgtggtgtgatgaagtgtaacaggctgtgacatactgtgatatggtgtggcatgtgacgtggtgtgacatgtgatgtggtgtgatggggtgtgacatccctggtgtgatggggtgtgaggtagtttgacgtggtgtgatgtaatgtgatgtggtgtgatggggtatgacatctgtggtgtgatgaggtgtggtgtgacatgatgtgacgtgtgacgtgctgtgacagggtgccacatccttggtgtgatgtgatgcggtgtgacatggtgtgatgtggcaggatggggtgtggcagggtacgacatccctagtgtgatgatgagtttcatggtgtgatgtggcgtgacatccctggcatgacatagtgtgatgtggtgtgacatggtgtgacattcctggtgtgactctgctgttgtgacatttgtggtcaccccagcatacagaggtctctgtggccaagggaagggggagaatggaacgatctgagcaggttgacctggaggaactggtggcccttgagtccacgaagcccaccctgctaggtgcccctgccccacgtgacccaagggggttgcagagcagcaagcaggactctggttagacaggaggaaggacctgccaccacgtggccttgtgaggagacacagagcgagcctgtgacctcggcgtccacccagcacagggtgctgctgaagcccctcctgtcatctcagcaggggtcccagggcaaggcccgaggcaggctgaagagaggggcagagtgaggatgctggggaggcaggggtgaggggagtgagagcccaggtttcagctgagcccctgcacagggaaggaacctagctgaacacccatctccccacacactcccaaccctgcctctgcccgaccacctcccagagggcacctcgaaccctctaacacccacactcagcaaggggtatggtgtccccaccgaatccagccagtgaggcccggcacagccacgcctgtgcccaccactcccatggccaagctccctgctaacatggtaggacagggccaggcctggaggagacagaacatcagtcccatggggaagctccctgctcacatggcagggcagggcctggaggagacagaacgccccatctggcatggtactcaggctgcacatgcctgccacgcacgggggccacgcgacaatgcctgccacgcatgggggacatgtgatgctgcctgccacgcatgggggacacgcaacaatgcctgacacgcatgggggccacgtgacacacacatacacacacgggcctcacaggcacacgaatgtttgcaaccccagcacccacccagcacactcaggcacaggctctccaggtgggtcacagcctcacgccttgagctactccatgtgccaggcccttcacccacgttcctgtccccagtgccagctgttgagccacaccgtcttctctgtggatccctcccagcccactcagcacaatggacatgctctctcccgtccagtgactgcactggcctcctcccctcagcacccacgtctggccatctcccaggaaacccggaccaccacgggcagggaccaccttcctcactatccacatggaccaccccacacctgaccccagatgcagtcacactatgtcctgcttcaatattgaaaaggggaaaagctggaggaggggaaagatgaaagagaaaaaagcaagacgggagagtcacattcttctgaggctttgattacatctcactgagcccccacgttgcatgaaaaggaggggtggagggagcaattacgcattcgccttgtgctcagtaaatctgcactttataagaaaataaacagagtagaggaagaagtcaaatatgcatttgtctcaggggcaggagggatgatttcttgtctcattttgtcccatgtcatgaagaccgggctgttaatttatattgtcagggtgagggaggccacctgggtagacctggcctatctgctgctgctctcagtttggaaacaaaaggaaacgcatgactttttttttttttcatgactcagcttcccacctcaactgttctttttggcatagtgactttagggtcctgagattttattttcctttcacaatggtcaagatcgcaccctcagtattcaggagagctggtccaacccagacccctgccgtccctggacactttcaaatacgtgctgcagtctctgacactctctcaccatcgaagaaactgaggccttggtgagcctgcaagcccctgctcatggggacaatgcaggctgaaacccgcatttctgaccccaaagctcctgttcctttcactcacccccacaccagctctttgagtccagagctttgtccttgcctgagtcctaccctcagggacaggggcccaacccagccaccaacacatcataccctgagagggtgccgggagcccagagatgtttggagagcacagaagccctggaagctctgtggagatgctgcacatttctctattcaacagatactcaccaggtggccagcggcagagatgccacatggcatggagctcgccttggccaacaggacaggtgtggggttgggaggccttcccagggcactccttgaagcagagctgtggggaaaagttggggccaatctcagatctccccgtcaacaccgggtctcctgccctcctgggccacagaaaactaagctccgtggatactgcggctgggtggggccgtgggggagaagaaatcacaacgagttaagagatcattttttaaaactattatgatcaggactcacataaacatatgacgacacatttcagagatgctctttatctcattaattaaggtgtcgtaaccagttcaaagtggaattctaagtactacacttaacataattgattcaggaatgctaaaaggagttcatagatagatgcaaaactggccttttccctggaagatgaggagcaattcattgtccttccaaaggtgagaacttgcatttctaccaactcaaagagtttttgcattgctatcaattatgtacaacttagagcagtggtccccaacatttttggcaccaggaaccagttccatggaagacaatttttccacagaccaagatcgggggatgtcttggggacaaagctgttctacctcagatcattaggcattaggatttcacgaggagtgtgcaacttagatcccaggaatgtgcagctcgcaatagggttcgctcctatgagaatctaatgctgccactgatctgacgggaggtggagctcgggcaggaatgctcacacatccctcacctcttgctctgtggcccagttcctaacaggccatgaaccggttccagtgcatgacccaggggttggggacccctggcttatagaggtgtaaaatagttcaaaggaaatgaaagatgcagagctccacagaatgaaataacctggaagagtgtacaagacgatgccttgctttccatggaaggcacctagtaatcatttggtccatttcagttcttcttaatgcttcctataaacatatataactgactgacacaaacagatccataatataaagaagacccctgtaaaccaatgagaaaaaaaatcaaataatccaacgaggaataggcaagagaattgaacagatgttttacagaagatatccaaatagccactaaacatatgaaaaggtgttgaaccacactagtcaacagggaaatgaaaatgaaaaaccacatgagagaaagtagttccgattccaataatgctggagcagctaatatcagactagccctttggcagatggcaattataaacactggaaatgctgtaagcacacacaacacccacacacaccaattacaggcactggaacatgaccagaagtaggcaaacactagtaaggattattccctgaaatattcatctgaagtcacaccccagggcatgtaatgggtgcagctagagttcaagcaggaaactgcagtcctcctggtgaggagtgggatgcagggctacattttcagagcagctggaaatgaagagaagatgtccataaaggagaaggtcaccgaagggaaaccccacaacctgcaggtaaactccactgaaacctctggccgatcccttaggtgtgcatgggtagggaaaactccaaagggtccagcagaaagcagcacctgtatagtcaagagaactgagattgcagatactgccaactcccaggcagacagacttgggagtttgagtcaactcaagctaactgcttgctaacatgaaaaaaacaattaatgctctgctaaggaaggatgcaaaccccatagcctgtacacatgttatcaacaacatcaggtgcacatccaaaattaccatggatgcaaagaaacatgaaaatgtgatccaaagtcagaagaaaaagggatcaatggagatcaactccaagatgacctagatgcagatacagttatcagacaaggactttaaagaagttatgttaaaaatgttcaaagacttagagaatatggttatcatgagtgactagatgaggtatctctataaaaaactgaaaatagttacaagaaccaaatgaaaattctagaactaaaagtatgattctgaaatgaaaaacatttggccaggcccagtggctcatacctgtaatcctagcactttgggggcccaacagggaagtatcacttgatctcaggagcttgagaccagcctgggcaacgtggtgaaaccccatctctattttattaaaaaagaaaagaaagagaaaaacattacccaagtttaataacagattggagaagacaaaagaaggaactgaaaacttaaagatgcatcaatagaatatatcaattatttttaatccaatccaaagaaaagagagaaaaatactaaaaaaggaaaaaagactcatcctgctggagaaggcgaagcattctaaaacatgtgaaactggagtccagagggggatgtaatacttccatgggaaaggtcaaccctaagctatatgcaaatgtacctgcataggctggtgtggtgggctgatggcatctccctggccaaatgtatgcccacctggaacctcagaatgtgaccatatttagaaatagggtctttacaaattaggttaaggacttgagatgatatcatactaaattttggatggatcccaagtccaaacactggtgtcctcataagaggagaggacacagacacacgtggagataagccacatgatgacaaagaagaagatgaggggtgtgtcaggagccacctgtgtttgtccatttgcattactgtaaagaaatacctgaggctgagtaagttataaaggaaagaggttgaattggctcacagttctgcaggctgtataggaagcatggcaccagcatctgcttctggcgaggacctcaggaaacttacagcatagcagaaggtgaagggacagcaggtatgccacatggcaagaatgggagcaagaggctgaggggggccccagacttaaacaactagattgtgtgtgagctgactgggggagaattcactcatcaccaaggggaagatgctcaatcattcatgagggatcttcccccttgatctaatcacctcctaccaggccccacttccaacactgggaatcatattgcaacatgagatttggaggggacaaatatataaaccatatccttccacccctggtcccccaaatctcatgtccttctcatgttgcaaaatataattatgccttctcaacaatcccccaaagtcttacctcattccagaatcaacccaaaattcccaagtcccaagtctcatctgaagatgagtcccttccacctatcagcctaggaaatcaaagacaaattgactcccaaaatacaatgagtgtgcagacattgggtaaacattcccattccacaagggagaagttggcaaaaagaaaggatctacatgccccatacttgtcagaaatccagcagggcagttattaaatcttaaagctccaaggtaatctcctttgactgcgtgtcccatatccagggcacactggtgcagggggtggactcccaaggccttggaaatctctacccctgtggctttggaggatgtagcccctgtggcttctctcacacgatagagttgagtgcctgtggcttttccagattcagggtgcaagctgccagtggatccaccattctggggtctggaggacagtggcccccttcccacagctccgctaggcagtgccctggtggggacattatatgggggttcaaccccacattctctttggcactgctctagtagaggttctctgtgagggctccatgctggcaggaggcttctgtctgggcagctaggctttctcatacatttctgaaatctagagggaagatgccaagcttccttcactcttgcattctgggggcctacaggcttaacaccagatggaagtcaccaaggcttatagtggcttgcactctccaaagcagcagcctaagctgtacttggggccctttgagccaaggctggagccagaggaaccaggatgtggagagcagtgtcccaaggctgcacaggcagcagtggccatggccatggcccacaaaaccatcctttccctcttggcctctgggcctgtgatgggaaagaccacctcagagatttccaaaatgccttcaaggcctttttccctttgttctggatatgagcacttagctcccttttagttatgctaatctctctagcaactggctgctccatagcctacttatatttgtctcctgaaaataccttttcttttctaccacatggccaggctgtgaattttccacattttttatgctctgcttccctttgttgatgaaaaaagccaaactccataaaacacttgaaaaattgattctgagccaaatatgagagccatgaactgtggcacagcctcaaaaggtcctgagaacacctgtgcaaggtggttgggttgcggcctgcttttatgttttagggagacatatcaatcaatacatgtaaagtatacattggtttgatttggtttggaaaagcaggacaattcaaagtggggaattccaaatcatggtggatttgaagattttctgattggcgattggctgaaaaatttaaattatctaaaaagttgaagtcagcgaaaagcaatgcttaagataagggggttgtggaagccaaggttcttgttatgtagacgaaggctccacgttccagagagaagagatggtcaatgtctcttatcagaacctaaaaggtgccagactcttggataaatctctcctgaatcaggaagagacctggaaagggaaaaagattctcaacagaatatacatttcctccacaagagacggctttgcagggcccttccaaaatgtgtcagagaaacatattctggcaataaatactttaatttccttccatgcctgccacctgtcatgtgatgctataccagagtcaggttgggatttgataccttattgctacaaagagtctgctttgtcagtcttaagctccctgttttaatgttaacactggtcagctgagcctaagctccaacagggagagggtatagtgagggagtccaaaccaccctccccttcctgtcatggcctgaactggttttccaggtttctttggaatccccttggtttagcattttattttgtcgtttacaccttttaaatataagttccaactttcagtcatttctttgctcccatatcttaccatagactgttagaagcaaccaggtcacaccttagaaacatctgcttagaaatgtcttccacagatgccctaagtcatcactcttaaggtcaaacttccacagatccctaaggcatgaacacaatgcagccaagttgtttcttaggatttaacaagcgtgacctttaccccagttcccaataagttcctcatttccatctgagatttcatcagcctggctttcacagtccatatgtctatcagcattttggtgacaaccatttaatagtctctaagaaattccaaactttccctcatcttcctgtcttcttctgagtcctccaaattcttctaacctctctgcctgttacctgattccaaagctgcttccacattttcaggtatccttatagcaatgttccactcctcaataccaatgttctgagttagtctatttgtgttactagaaaaaaaaaaaaacatgaatctggtaatttataaagaaaagaggtttgcaccaggcactgtggcaaggaagggaggattaactagctcacagttctgcagccattctggaaacacggccctggcatctgcttctggcgaggcctcagggagattgcaatcacggcagaaggcgaagggggagcaggcatgtcacatggcaagagggagcaagagaagagaagtggcacgtcccagacttttaaacaatgagctgtcacagggactaactgagggagaactcgctcatcacctgggagatggtgctaggccattcatgaggggtccagccccatgatctaatcacctcccaccaggcccacctccaacactgggaatcacatctcaacacgaaatttgaagagacacacatccaaactattgcaccacaggaagctggaagaggtggacggtcctcccctggagcactcagagacagccaccaacaccttgatctcagattcctgactcccagaactctgaaaaaatttttgttgttttaagccacatttgtgatattttgttacggcagccacagcacggatatagctggtaacagagttctttagcctccaaaatacaagcctggggtaaataactattgaatttggccacatggaaatcaggaagaatgtaataagcatcctcgatggatgggatgacctgggagatcgtggcaagtttaaagctaattggaagttggcaaccaaaaaatcctgtcttgcaaattgccaggaaattgccaagaaaacctttagaaaacatggttaaagatggagaaacccggatgaatccctggtttctgaagaggtgcttaggcattgaagtgagactgacgagacttcacactgtacccttcagaagggcagacactcacgagatcatcaaccacagctccctcgctgggaggcagacacagagctggaggcggcggccacaaactaggtgggcagagaggcgtcagcatcgggacttgcaggaggccctgggaaggaacagggagcggtggggcctggacagccctggggaaaggaagttacttggaggagaccaggggcttgcatttgggccaaaaccaaggacaagagatcagctggtcccagggaactctggagcccaacaccccaccacgggtgcaggggcctgacgacccaagagagggctgtgggcaccgggcaccagcctgtggggggtctgaaggctgctgcccagccacacatgtcctggttctgaacaaagggttcaagagacacctggaaacctacccttctgagagcagcctcttagcctcagctggtattggcccctggtcaccccacatgccccgacagtggggcctggcctcagaaaggggcccctccatttgtactttctatctgatccttgacacagtgctaacaccaaagaccaaacccgaatcttggttcacatactctgcaaagaaatgactaagactagttcttccggaggtcagttttagaacgtttattctgacttaattctgccttatctctgtgcaccaagaaaactatctgcacatctgtagtaaaatgtgaaggtaccttcattttgtttgtatactaaacttttaagaaatacctcactttttaaaacttggttttgtgttttgtatgcttataatattttccataatagatcattttaatgataaactctgaatcttctgacagaatgcagatcaatggattcctggccatcagggaggcgttgattgcaaaggggcctggtggaatatttggagagattctacatcttcttgcaactgttcatctggattacggtggtggttgcatgagtgtgcatttgttgaaactcacatgtcacaggatggattatactgaatgtaaactacacttgtgtaaatatgacttttaaaactttaaaaagttgggggatggttcactgccccggctcgaagccccctggccacgctgcctggccagcccacccccatccctgccagcgcttgcctccagcgtcccaacagcctcctgaccccctgggctgctctaaaccctcaggagcgcagccatctgggatcagctggatggagatggggagcccgagactcgtgccacaccacgtcctcccgcccccaccagccacacgcagacgtcaaagcagcactgtcctcgcacccgctgctcccacccaccctggcatggccattccaggcctggggcaggaaggcagacgctccccctgcccccagacacaagcattcctgcacacacccccagcacacacacgcactcccatgcgcacactgacacacacaggtgtgtgcagctgagacacagcccgttcccaggaagcccagcccccatcactgagggaaaggggcagcaccgtagggccacaggagtggcagctggacacagagccaggcgctggcgaaggcccaggccactgaggcaggctgccggcatggctgggcgtgaaggccagaacagggcaggaggggctgggggcactatgcctattgggcctaggtgggcacacgccgggcaggagaggaacagcccggcccctcagacaggaaggggtgggggcaggggccatttctggaggccagggcagggccagcaccccaaggaaaagcagagcagggtgagaacggacatggggctcagagctgagcaggcctgctgggccccaggagggagacacagacgactggggatctcaaggctggcagaggccagagatggagccccagctgggatgccaacctccttcctgggggctcaccctgcccggcccctccagcccagcacagcttggggcattggatagaaccgggagagagccgaccaggcactgaggcccctgccccaaatgcccacagcctggggaaaatgagcaggtacatgggaggggcaagtggagccccaggcacacccacacagtgcacacagcctcaccggggcccgggaagtgggggaacaggaggctcaccacccctgctgtggtttctctcagaatcatgggtccttccagggaactcagcattttcccctcagcctcccacacggcacctttctccagggccacaagcagggcatgggggccttggacagcctgggaacactcacccccagcctgcgttccctgagcctcacatcatagccctccagggccctggcagccagcagcccttctggtgtcttccacacgtggtgagcatctctctgagggcaccaggcccgacagcccctctccctccacaggacaaccagccctgggcacccagggtcccaggggcaggtcccagtgtctccctccccaaagattctatacaacccacccctccccagtggccactccatgcatgctggcctccaggggacaggcaggccaatggtgtgaaggaaattatctcgctcagagcagagcactgggtgcaaccagggacgaatgccatgggcgcctccaggaaggccaccgagcccgagcccagccttctccatgtgcccacgcccacccatggcatagacggggcacagtgtccccagcctccagcagcttcaaggaccttgcagagccaccagccacctccgcacagctccctgccagcccccagccaggccccagccttcatgtgctcgccttgaggagcagcccagcttgggacccccggctgcaggacagtgacctgggagtgagtacaaggtgaggccaccactcagggtgccagctccaagcgggtcacagggacgagggctgcggccatcaggaggccctgcacacacatctgggacacgcggcccccgagggccagttcacctcagtgcgcctcattctcctgcacaaaagcgcccccatcctttcttcacaaggctttcgtggaagcagaggcgtcgatgcccagtaccctctccctttcccaggcaacgggaccccaagtttgctgactgggaccaccaagccacgcatgcgtcaagagtgagagtccgggacctaggcaggggccctggggttgggcctgagagagaagagaacctcccccagcactcggtgtgcatcggtagtgaaggagcctcacctgacccccgctgttgctcaatcgacttcccaagaacagagagaaaagggaacttccagggcggcccgggcctccgggggttcccaccccatttttagctgaaagcactgaggcagagctccccctacccaggctccactgcccggcacagaaataacaaccacggttactgatcatctgggagctgtccaggaacccgacagggagccggacgggccacaccatccacaggcaccaaatggacgacccggcgcttcaggtatcccagcccaccgggagccccaatcgaggggccggcccaggcagcagtgagggagaggctgcctgggcccctgacagcgaggggactcctgggccaccctcacagcatcaaccaagcttcttggtcactgcgtggactctaggcatcccttccctgcatggggacacaggaaagctagaaacagcctaacgccgacctggagaaggcagggggctgggaatcttggctgggcccaagaccaagaaggtcagagaccccacgctgggcagggctaggctgggtgcagactgcctgccacccctaggacagggacagccaacccagagctgggagggagggtggggaggcggcagcagggagctgtcctgagctccactgcgcaactggctgatcttggcaagtctgagctgggcggactgaggggggcttggctgagtggactagactgagacgggcctaacagactgagctgaggcgagctgggtgggctgagagggctaccctgtcccttagaggacaggtggccaagctgggctgtcctgagccagggcgatcggggctggcccgggccaggcgggtttagctgagttgagtgagtggactgggtagagggaaatgagctaggctcagctgagctaggcttgagctgggttatcctaagccctaaggtggactgagctgggctgagctggacttatctggggggcagggcaaagtcaggctgagctgaggtggcctgccctgggtggtccaggattgagttaagctgaattaggctgacctggacttgactggacttggttgaaataagctgggccgacacaggagtagggacaagctacagttctctacttaggataaaatgggtgctcgtggactatccgggctgaaggagaccaagctggggtattacctgctgagcttacctgacctggcctgagttcagcagggctgcgctgagctggacagacctgagccaagcttagctggttgggctgagtaagctgggctgagctaaatgggattgagctgaggagggctaggctgggggagagacctgacgacggacagggttaaaagctggagtgagcaggccttaaattattgaactaaattgggctggggtgatctgaatttagctgggatgagctgggctgggctgaactgtgcccacgtgaactgggctaaactaggctcgcctgagtggactcagctgggttggtctcaactgggttcagctgggctgggctgggctgagctaggttagactggggcaggctgggctgggttgggctgggttgggctgggctgctctaggctaagctaacctaacctaacctgggttcagctggcctaggttgggctgggttgggctaaactgggttcagctgagatatgctaatatgggctgggctgggtcaggttgaggttaactgaactgggctgacctgggctgagctcaactgagttcacatgggctgggctggcctggcctggcctaaactgggtttggctgggctgggccaactggactgaggtggatggagctgggctgagctggcctggccgggcctgagctgtgattggaagacctgggctgagctggacagacctgagccaagcttagctagttgggctgactaagctggtttgggctaaactgggttgagctggggaggactaggctgggtgagtgacctgagatggacagggttataagaagctggactgagctgggcttggattattgaaccgaattgggttggggtgatttaaactgagttctgctgggataagctgatctacgctgggctgaactgagcagagctgaacctagctgggctgggctaaactgggctagcctgagtgggctgaactgggctgctgggctggactgggtaagctgggctgagctgggttgggtggaaatgggctgagctgagctaggctaaactgggtttggctgggctgggctgggctgggctgggttcagctgagcggggttgggttagactgggtcaaactggttcagctgagatgggctgatatgagctgggctgggccaggctgagctcagctaaactgggcagtgctggactgggctgagctagactgggcaactgtattcagctgggctggcctggcctcggctaaactgggttcagctgggctgggctgagcaggcctgagcaggattagttgagctggtcgtaactggatttaactagctaggctaggcttaactgactaagctgatctggactgtattcatctggatgaagctggggtgaggtggctactttaggtccagctttgctgagctaaactggaccgggctaaattgatctggactgaccattctcacctggctaagaggagctgagtcagaagcaagctggttgagctggctggactgaaataagagtttgctgcctgcaaggggaggtcctgggctgacctgggccaggctgaaccaggctggcttagagtgaacttcagagggcgactcccccggtaggccagtctcagctgaacttggctgtcccggtgggcagagcggggctggatactgtgattttgggggtacctagagcagacttcaagaccaagctaaactgggctccaggggcaggatgggctggggacttgggactccaggccaggggcgaagggccacgctgtacagaccgcactatctgggccagggttctgtggtgggagggactgactgcctggggcatcagggcaagtcttcccgccctcccctagaggtcaggggtgggcagagcaccatgggggtctggcaggtcaggtgagggctgctgtgatggggagatccaggcttggcactcaagagcccgaggagctgagaccacagccttggggggttggggtcagggttggagggcaggcagaccatccaccatgagcccagagagagtttgaagggggagggctctggggtcccaggccccatggggtccctgggtttcagcctaggggcatggcccagtgtctctgctcctgagtgcccaccgtgcagcacttgcagggggaggctggggtcatcctggaggcaccccccttcctgagcccagcctgatgatagtggctgagcaacagcttctggtgggggaatgggggccctgggagccgccctgggcctggggattgtggggaaaaaggcccagaatgagcctggccatctggatccctgccacggggtccccagctcccccatccaggccccccaggcctgatgggcgctggcctgaggctggcactgactaggttctgtcctcacagcctccacacagagcccatccgtcttccccttgacccgctgctgcaaaaacattccctccaatgccacctccgtgactctgggctgcctggccacgggctacttcccggagccggtgatggtgacctgggacacaggctccctcaacgggacaactatgaccttaccagccaccaccctcacgctctctggtcactatgccaccatcagcttgctgaccgtctcgggtgcgtgggccaagcagatgttcacctgccgtgtggcacacactccatcgtccacagactgggtcgacaacaaaaccttcagcggtaagagagggccaagctcagagaccacagttcccaggagtgccaggctgagggctggcagagtgggcaggggttgagggggtgggtgggctcaaacgtgggaacacccagcatgcctggggacccgggccaggacgcgggggcaagaggagggcacacagagctcagagaggccaacaaccctcatgaccaccagctctcccccagtctgctccagggacttcaccccgcccaccgtgaagatcttacagtcgtcctgcgacggcggcgggcacttccccccgaccatccagctcctgtgcctcgtctctgggtacaccccagggactatcaacatcacctggctggaggacgggcaggtcatggacgtggacttgtccaccgcctctaccacgcaggagggtgagctggcctccacacaaagcgagctcaccctcagccagaagcactggctgtcagaccgcacctacacctgccaggtcacctatcaaggtcacacctttgaggacagcaccaagaagtgtgcaggtacgttcccacctgccctggtggccgccacggaggccagagaagaggggcgggtgggcctcacacagccctccggtgtaccacagattccaacccgagaggggtgagcgcctacctaagccggcccagcccgttcgacctgttcatccgcaagtcgcccacgatcacctgtctggtggtggacctggcacccagcaaggggaccgtgaacctgacctggtcccgggccagtgggaagcctgtgaaccactccaccagaaaggaggagaagcagcgcaatggcacgttaaccgtcacgtccaccctgccggtgggcacccgagactggatcgagggggagacctaccagtgcagggtgacccacccccacctgcccagggccctcatgcggtccacgaccaagaccagcggtgagccatgggcaggccggggtcgtgggggaagggagggagcgagtgagcggggcccgggctgaccccacgtctggccacaggcccgcgtgctgccccggaagtctatgcgtttgcgacgccggagtggccggggagccgggacaagcgcaccctcgcctgcctgatccagaacttcatgcctgaggacatctcggtgcagtggctgcacaacgaggtgcagctcccggacgcccggcacagcacgacgcagccccgcaagaccaagggctccggcttcttcgtcttcagccgcctggaggtgaccagggccgaatgggagcagaaagatgagttcatctgccgtgcagtccatgaggcagcaagcccctcacagaccgtccagcgagcggtgtctgtaaatcccggtaaatgacgtactcctgcctccctccctcccagggctccatccagctgtgcagtggggaggactggccagaccttctgtccactgttgcaatgaccccaggaagctacccccaataaactgtgcctgctcagagccccaggtacacccattcttgggagcgggcagggctgtgggcaggtgcatcttggcacagaggaatgggccccccaggaggggcagtgggaggaggtgggcagggctgagtccccccaggagaggcggtgggaggaggtgggcagggctgaggtgccactcatccatctgccttcgtgtcagggttatttgtcaaacagcatatctgcagggactcatcacagctaccccgggccctctctgcccccactctgggtctaccccctccaaggagtccaaagacccaggggaggtcctcagggaaggggcaagggagcccccacagccctctctcttgggggcttggcttctacccccctggacaggagcccctgcacccccaggtatagatgggcacacaggcccctccaggtggaaaaacagccctaagtgaaacccccacacagacacacacgacccgacagccctcgcccaagtctgtgccactggcgttcgcctctctgccctgtcccgccttgccgagtcctggccccagcaccggggccggtggagccgagcccactcacaccccgcagcctccgccaccctgccctgtgggcacaccaggcccaggtcagcagccaggccccctctcctactgccccccaccgccccttggtccatcctgaatcggcccccaggggatcgccagcctcacacacccagtctcgcccactcacgcctcactcaaggcacagctgtgcacacactaggccccatagcaactccacagcaccctgtaccaccaccagggcgccatagacaccccacacgtggtcacacgtggcccacactccgcctctcacgctgcctccagcgaggctactgccaagcccttcctctgagccatacctgggccgctggatcccagagagaaatggagaggccctcacgtggtgtcctccagtccaaccctccctgtcaccctgtcagcagcagcaccccacagccaaacacaggatggatgcgtgggctccatcccccactcacccacaccggaaccccagagcaggctacgtgcccctcacagacctcaaacccacatgtgcatctgacaccccagatccaaacgctccccccggtcatgcacaccaagggcacagcacccaccaaatccacacggaaacacgggcaccgggcaccccatgagcacaaagcccctccatgtctgaagacagtccctgcacaccgtcacagccatacattcagcttcactctcacgtcccagcccacctgcacccagctctgggcctggagcagcagaaagaggtgtgagggcccgaggcgggacctgcacctgctgatgacccgggaccagcaggcagctcacggtgttggggaagggagtggagggcacccagggcaggagccagagggaccaggctggtgggcggggccgggccggggtagggccaggaggcagctctggacacccacaggcctgggctcatagtccacaccaggacagcccctcagagcacccatgcagtgagtcccaggtcttgggagccaggccgcagagctcacgcatccttccgagggccctgagtgaggcggccactgctgtgccgaggggttgggtccttctctggggagggcgtggggtctagagaggcggagtggaggtaaccagaggtcaggagagaagccgtaaggaacagagggaaaatggggccagagtcggggcgcagggacgagaggtcaggagtggtcggcctggctctgggccgttgactgactcgggacctgggtgcccaccctcagggctggctggcggctccgcgcagtcccagagggccccggatagggtgctctgccactccggacagcagcagggactgccgagagcagcaggaggctctgtcccccacccccgctgccactgtggagccgggagggctgactggccaggtcccccagagctggacgtgtgcgtggaggaggccgagggcgaggcgccgtggacgtggaccggcctctgcatcttcgccgcactcttcctgctcagcgtgagctacagcgccgccatcacgctcctcatggtgggcacccacctccaggggcccggccagggcagggggttgggcagagccagcagagcgccctgacccacgccctcccctcaggtgcagcggttcctctcagccacgcggcaggggaggccccagacctccctcgactacaccaacgtcctccagccccacgcctaggccgcgggccactcacgctccaccaggcccagctttttctctgccagcgcctgagcctccctcgggctgcgccctgccctgggtgggaaaagggaagcagacaagaaaagggggcacaaggtcactactgtgggctgatggccagtgaacctgagcccagaggggccggctcagccgcaaggttacaggcgccgagagaaccaccagtcgcagcccccacccgaaaaccgtgtctgtcccttcaacagagtcatcgaggaggggtggctgctagccgttctgagctcatcccaggcccctgggtctccgggtcactcccattctgactgtacaatcaccaaaagccaaggagggcccggcacccagcccaggacacagctgagtctgcgtccagcccaacaccagcccacggcctcactccccagcctcggtctgacccttctagccctgaggtccaagtgtctggcatccccgtcccccaagcctcacccagaccttctttcccttcacccacccctcctgccacccatccacagcccccatcccttcacccacccctcctgccatctatcctcagcccccatcccttcacccacccctcctgccatccatccacagcccccatcccttcacccacccctcctgccatctatcctcagcccccatcccttcacccacccctcctgccatccacctgagcccccatcccttcacccacccctcctgccatccacctgcagcccccatttctgcagcctgaaggcacagggaagccctctgaggccaggccacaggacagttgagggcttcgggcccctggagtgggtagaggggctcccacagccagagaaggggtttcctgcagggacagcagctgccgacctcgtccctatgacctcgtccagcctctggcttcagcagtcatacttctttctctctgggtttcttagtaaagatccttttcacaaaccccacgtctccggagggctctgtgggaggtgtgtgtggccctggagtggctggcgggaggcaggacccctgaggacgtgcaggaggagccagaggggaaggaagggcaggggccattctggggtcctgagagccaaagtgcccaagcagtggttcccatcaatcacccctcagcaccccagagactccccagctcggccctgtcatacctggtctgctggtctccagcccagactcatgcctccttctcaggtaaagtcaaagcaacaatcaacatcgacccctttgtgggcaaaaccagaagaggcccatgctgtggtcagcacaggaggccccaagaatgcagctgcacagtcaccaaggtggaggctgatgggggcccctaggaccactggccacacaccctgatccagcacccactgagcacagacaaagctgactccccagcccacagccgcccaccagcctggacctcctgaagagctgagaggtgacccaggagcaggctggggccccagagccatcggggccacaggtgggcttgacccacaccagtcctcagggcaaatgtgcagcctccctggctggagaggcctgcttacaagggtctccacaacatcctaaaaatgggagagaacgcatgataggcatgacaaagggcagggttccctcatatacaaagagcactcagagatcactaagaagaaaggtgagcaataggttcttcatggaaaggaaaaacccagtggccgataatataaagaaaccattttaacaatgagaaaagtgaaaggaaggaggaggggatgaagggggtggaggtgcttcttggccctgactgagggcacgtaaatcattaagaccactttttagggccagttggcaaaatgccccaatgcaggagagtcctctcacagtgatggccccacagggagagcctcgctctgtgccaggagagccacgtcacatggagtctggcacaaagcggaatgaagcaagcctgcctcagtctgacagcggcacctgggccctccgccctgtcctctgctgcgacctcggagcagccgggcacgggggagaaggtgaggagcgacggctccctacggggtagaaaaccccaaagcgggcagcgctgaggccgactgggtccaaacaacaccagaggagggggcgtcgcaggacagggccaaggccacagccgctgcccagctcccctcacacactccctcattcacagacacacacgcaggcacacactcgcacatgcaaaaacacacaggttcacacacacagactcaacctctcatacacatttgcactcacacacaccaatcatgcactcacacaggctgacacgctcgggcacgctcataccaacacacacacagtctcaggaagccaggccctccatccaccccatcaccagcccagggtgtcgcaaacccacatctcctacaacagaccggccctccgcagccaaggtgccccggaccgggagcccccccgggggacagagctcagtgactttctctgccccgcaccctagatcatgagacctccatggccccagagcaagggcaaggagtcagctcactgccccactgtgtggcaggcgtcctcacgcacagaaaattccatcgcctcaaaggcctgagaggaagaccagatgagcacccacgtagaggagacagacggggcccgtggggaggggcagaggcccggattcacacccaggctcggaacagcgcccctgccttccacatggcctggcctcccgggagcaagaggatgccgtctcagggcctctccatccccctcttcattcccctattaacccacccgtgggtacaaccatggcccccaaaagatagagccacatcctagcccctggggccattgagtgcggcattatttgtcaaaagggcctttgcagatcccatcaagataaggatttcgaggtgagggcaccctggattgtcaaggatttcgaggtgagggcaccctggattgtcaaggatttcgaggtgagggcgccctggattgtcaaggatttcgaggcgagggcgccctggattgtcaaggatttcgaggtgagggagccctggattgtcaaggatttcgaggtgaaggaaccctggattgtcaaggatttcgaggtgagggcaccctggattgtcaaggatttcgaggtgaaggaaccctggattgtcaaggatttcgaggtgagggcaccctggattgtcaaggatttcgaggtgaaggaaccctggattgtcaaggatttcgaggtgagggcgccctggattgtcaaggatttcgaggtgaaggaaccctggattgtcaaggatttctaggtgagggcaccctggattgtcaaggatttcgaggtgaaggaaccctggattgtcaaggatttcgaggtgagggcaccctggattgtcaaggatttcgaggtgagggcgccctggattgtcaaggatttcgaggtgagggagccctggattgtcaaggatttcgaggtgagggagccctggattgtcaaggattttgaggtgaaggaaccctggattgtcaaggatttcgaggtgagggcgccctggattgtcaaggatttcgaggtgagggaaccctggattgtcaaggatttcgaggtgagggcgccctggattgtcaaggatttcgaggtgagggcgccctggattgtcaaggatttcgaggtgaaggaaccctggattgtcaaggatttcgaggtcagggcaccctggattgtcaaggatttcgaggtgaaggaatcctggattgtcaaggatttcgaggtgagggcgccctggattgtcaaggatttcgaggtgagggaaccctggattgtcaaggatttcgaggtgagggcgccctggattgtcaaggatttcgaggtgagggcgccctggattgtcaaggatttcgaggtgagggcgccctggattgtcaaggatttcgaggtgaaggaaccctggattgtcaaggatttcgaggtgaaggaaccctggattgtcaaggatttcgaggtgaaggaaccctggattgtcaaggatttcgaggtgagggcaccctggattgtcaaggatttcgaggtgagggcgccctggattgtcaaggatttcgaggtgagggaaccctggattgtcaaggatttcgaggtgagggcaccctggattgtcaaggatttcgaggtgagggcaccctggattgtcaaggatttcgaggtgagggcgccctggattgtcaaggatttcgaggtgagggcgccctggattgtcaaggatttcgaggtgagggcgccctggattgtcaaggatttcgaggtgaaggacaccctggattatcgagggggctaggtccgaggacaagtgtcctagctggagacagacgaggagacacagggatggggagaggcagaggcagacaggggtggtgctatggtctgagggtctgtgtctgcccgaaactcctgtgtgacagccgtcatcccagagtgagagcatgcagagctggggcctcagggaggtggttagggcctgagggggaacactcaaaaatgtgactcggtccctgatctcactagagacccaaaagaaaagggaccccagagagcagccctgccctctttccaccatgtgaggacgcagcgaaaagatgggggtctgtgaaccaggaatcggcccttcctggaacttgaccctgctgccatcctgaccttgaacttccagcttccctgagaaatgaatgttgctgctgaacccaccagtctatggtatttttgttattgcagccagaaatgactaagacgcagcagccacgtccccctggcgagggccgggggcatcccaaggttcataacaaaagctccagagcttccctgaaccgccaggtgtgtcttcccaggaccctggggcagccccaggctacctccctcctcctctggccccacctgccctgatccggcctcactgtcactccctggatttcacccgacagcctccgccggggtggcccggccccatggccagggcatcttccattcacgcccacgctttccaggactccgctgcagcagctcctctgtgaagcgcccctggcctcccattgccggtgccacccgagcccccagacatagctggcctcccccgactccagggccagcatcgctggcgggatctctccaacgcaacggccagctctctggtgacccacagtaggagtgccacctgggcagtgctggacagggtagagcaggcaccttggccgccctgacccgcagggctgcaggctaggagacggggtgcccccatgcccccaccctgggctgcagtctggggcccccagtggcccatggggcaggccgagggaggccaggcccgagtggctccaacccagcagcgcaagactcactctccccagcctgatgcccgccctgtggccccaaggccccttcaacgggagtccactcacaggcgcccttcccctgcgggtggtcggggaccctctctggccctgtgtctcccctttgccatctctgtctcggggtctctgagcctctaactgtgtctgttcctgtttccctgcagcgtggcccccaccccgccctgtggagccatgtggagccgtgaggctccacggccggtggggtcacagagccctggccacacacacctggccccaccacagccagaccacaggccagacatgacgtggagccgcgcagccgtgtctgctggggcaggaagtgggcgagtgaccccgtctgtaggccagacgtacgggcatgcaggccctcccctccagcccctcagcatccagccacatctgtggacacagccagcgcggcggagcagggctctgctaaggacagacggccatcaaggcaggacctgggccgggccagggctccctccccacagcagccctcttggcaggcagccagacgcccgtgagggtggacctgccatgagggcctgcacgccggaggccgcccactcagcactgcgggccctccagcagcctgaccaggtgggtcttggaggtctccaggcctccgtctccttctctgcacattgaggagtccagccaggctggtcctggccccttctggaagcaaaaggtggagaacaggcaccaagacaagagggaaggacaaaagaggtcaccacagggactccggaaccacagggcagggcttcctaaccaggcaggaaggatctgggcactgggggctgagccaggctggccaggcctaagctgggatgacccggcccttcctgggatacaaggtgaacagctttcatggctgagctgaggcctaagttgagccgaggcctaggctgagccgagccagagggcagaggagaagatgacctggagccaactgatacacgtccatgtgggctgccctgagctgccctggcctgggctgggctgagctaggctacactgggctgagctaggctacactggactgggctgagctgaactgagctgagctgggctgagctgggctgggctaggctgggctgagctgggctgggctgagctgagctggagctggggctgaggtggactgggctgggctgggctgggctgagctgggctgagctgagctggactgagctgggctgggctgggctaggctgggctgggctgggctgggctgggctgggctgggctaggctgggctgggctggactgggctgggctagattgggctgggctggactgggctaggctgagctgggctgagctgagctggactgagctgggctgggctgggctgggctgggctgggctgggctgggctagattgggctgggctggactgggctaggctgagctgggctgagctgagctggactgagctgggctgggctgggctgagctgggctgggctgggctgggctgggctgggctaggctgggctgggctgggctgggctgggctgggctaggctgggctgggctgggctgagctgggctgagctgagctggactgagctgggctgggctgggctaggctgggctgggctgggctgggctgggctagattgggctgggctggactgggctaggctgagctgggctgagctgagctggactgagctgggctgggctgggctgggctgggctgggctgggctgggctaggctgggctgggctgagctgggctgggctgggctgggctgagctgggctgagctgagctggactgagccgggctgggctgggctaggctgggctgggctgggctgggctgggctgggctgggctgggctaggctgggctgggctgggctagattgggctgggctggactgggctaggctgagctgggctgagctgagctggactgagctgggctgggctgggctgggctggcctgggctggcctgggctgggctggcctgggctgggctgagctggactgggctagactgggctagactgggctgggctggactgtgctgggctggactgtgctgggctggactgggctgggctgggctgggctgggctgagctgggctgggctagattgggctgggctggactgggctgggctgggctgagctcggctgggccgggctgagctgggctgagctagactgggctgagctggactgggctgggctgggctgagctcggctgggccgggctgagctgggctgagctagactgggctgagctgggctgagctgggctgagctgggctgtgctgagctgggctgagctgagctgggctgagctggactaggctggggtgagctaggctgggctaggctgggctgggctgagctgggctgggctgagctgggctaaactggactgggctaggctgagctgagctgagctgagctgagctggactgggccgggctgggctgagctgagctgggctaggctgggctgggctgggctgacctgatctgagctggactgggctgaactgggtgagcttaggtggactgagctggtctgggctgagctgagctgggctgagctgggctgggctgagctgagctgggctgagctgggctgggctgagctggactgagctatgctgagctgagctgggttgcgttgacctgggctgagctgggctgggctgggttggactgggctgggctgagctgagctgagctgggctgggctgagctgagctgggctgggttggactgggctgggctgggttggactgggctgggctgagctgagctgtactgagctggactgacctgggctaagctgagctgggctgacctgtactgggctgggctagactgggctgagctggactgagctgagctagactgggctgagctgggtgagcttaggtggactgagctgggctgggctgggctgagctgagctgagctgggctgggctgggctgggatgagctgtactgagctgccctggggtgggctgggctgagctgggctgagctgggctgggctggactgagctggactgagctggactggcctgggctgggctgggctggatgagctgaggtggctgctaatgtgggaaggaggccgtgggttgagtgtgactccacctgcagagccctgagcccagctgtgttcttaggggttctgagggccacgcagctctgttgcaccatgattctgtcttctctcttgcccactgcctgaaggaaatttggagtgggctgggcccagagctcccctgggtaacaggccctgtcctggagggcctggcagggacatggcttagcctgttggcctctagtcccgagacctcataggccacaggggtccactgtggcttgtttgggcctggggtggggctcatggagtggtgggtgttggactgagactctgaccagggacagggggatggggtcacagccaagccactccacccctaccccatgcacacagcactcagagcccaggccccctcctcagagcccccaccaaaatcctctctaggggcaggggaaagagcaagacatgtcccccacccagagcaggaactggggtcagggagctcaggggactcagccactccatggcagagccctgtttaatataacttgtgtctgggatggcctgggtcagaggccctatctaaggagcatgttcagaaactgtgtcgctgggatgagacagctgggtccaaccgcaggcccatggtgcaggagctgtgtaaccttggggctgtcaccaggcctctctgtgctgggttcctccagtgtagaggagaggcaggtacagcctgtcctcctggggacatggcatgagggccgcgtcctcacagcgcattctgtgttccagcatccccgaccagccccaaggtcttcccgctgagcctcgacagcaccccccaagatgggaacgtggtcgtcgcatgcctggtccagggcttcttcccccaggagccactcagtgtgacctggagcgaaagcggacagaacgtgaccgccagaaacttcccacctagccaggatgcctccggggacctgtacaccacgagcagccagctgaccctgccggccacacagtgcccagacggcaagtccgtgacatgccacgtgaagcactacacgaattccagccaggatgtgactgtgccctgccgaggtcagagggcaggctggggagtggggcggggccaccccgtcctgccctgacactgcgcctgcacccgtgttccccacagggagccgccccttcactcacaccagagtggaccgcgggccgagccccaggaggtggtggtggacaggccaggaggggcgaggcgggggcacggggaagggcgttctgaccagctcaggccatctctccactccagttcccccacctcccccatgctgccacccccgactgtcgctgcaccgaccggccctcgaggacctgctcttaggttcagaagcgaacctcacgtgcacactgaccggcctgagagatgcctctggtgccaccttcacctggacgccctcaagtgggaagagcgctgttcaaggaccacctgagcgtgacctctgtggctgctacagcgtgtccagtgtcctgcctggctgtgcccagccatggaaccatggggagaccttcacctgcactgctgcccaccccgagttgaagaccccactaaccgccaacatcacaaaatccggtgggtccagaccctgctcggggccctgctcagtgctctggtttgcaaagcatattcccggcctgcctcctccctcccaatcctgggctccagtgctcatgccaagtacagagggaaactgaggcaggctgaggggccaggacacagcccagggtgcccaccagagcagaggggctctctcatcccctgcccagccccctgacctggctctctaccctccaggaaacacattccggcccgaggtccacctgctgccgccgccgtcggaggagctggccctgaacgagctggtgacgctgacgtgcctggcacgtggcttcagccccaaggatgtgctggttcgctggctgcaggggtcacaggagctgccccgcgagaagtacctgacttgggcatcccggcaggagcccagccagggcaccaccacctacgctgtaaccagcatactgcgcgtggcagctgaggactggaagaagggggagaccttctcctgcatggtgggccacgaggccctgccgctggccttcacacagaagaccatcgaccgcatggcgggtaaacccacccacatcaatgtgtctgttgtcatggcggaggcggatggcacctgctactgagccgcccgcctgtccccacccctgaataaactccatgctcccccaagcagccccacgcttccatccggcgcctgtctgtccatcctcagggtctcagcacttgggaaagggccagggcatggacagggaagaataccccctgccctgagcctcggggggcccctggcacccccatgagactttccaccctggtgtgagtgtgagttgtgagtgtgagagtgtgtggtgcaggaggcctcgctggtgtgagatcttaggtctgccaaggcaggcacagcccaggatgggttctgagagacgcacatgccccggacagttctgagtgagcagtggcatggccgtttgtccctgagagagccgcctctggctgtagctgggagggaatagggagggtaaaaggagcaggctagccaagaaaggcgcaggtagtggcaggagtggcgagggagtgaggggctggactccagggccccactgggaggacaagctccaggagggccccaccaccctagtgggtgggcctcaggacgtcccactgacgcatgcaggaaggggcacctccccttaaccacactgctctgtacggggcacgtgggcacacatgcacactcacactcacatatacgcctgagccctgcaggagtggaacgttcacagcccagacccagttccagaaaagccaggggagtcccctcccaagcccccaagctcagcctgctcccccaggcccctctggcttccctgtgtttccactgtgcacagctcagggaccaactccacagacccctcccaggcagcccctgctccctgcctggccaagtctcccatcccttcctaagcccaactaggacccaaagcatagacagggaggggccgcgtggggtggcatcagaagcaggccagtgagacagggcctgcccagggccctctgcatgcctctggcttctgcctggggctcccaggagtgaaagaacagtcccacaaccactgtggggacacctggcacccagactcccacaagggggcagtgaggcccctgctcgtgccttagacatcttccgggcctccccaggggcccccgccttctggctgcctccctctgctctcagggccaaggtgaggtggaggccactgtcacccctgagggtccagtcaccagagggtaattgagagcaacaggtcacttggggaagccctgccacagagaagccctccagcccatgggacccaggacctggcctggggaggggcttttaaagagagggggaaagagagagaatcaacagatgaggggctgaaccagcagacagagatcaggcagacacatgggtagatcctaggacatataatgaatggatgggtggatggagggtgggtagatgaaggatggatggg

SEQ ID NO: 29042 - DNA, 139182 bp, Homo Sapiens
cttgatgagattccatagtttactcatgcaacagaacataatgtctaaatgaagtttctggtctctgttttacatggatgattgagtaaaatcattccctattcctggaagaatagctaagaaaggattcacaggtgaggacatgcgttttttcagaagatgagaacaaagatgagaagatgagagcaacagaatgtcctatatcctaatgctctgtgctgacttcggagtggccaatatgatagagatggaaggaactctgaaaacaaattgccagaatttctaaggaacaggagatgttgagtgagtgaatcaagccatggactggctgtatgggggcagctattagagacaactacccttagacttctttggtgattggtcaagctaatcttttccttcagagtctctcaattataagacttagcttgtgccatttagaacagacaagaacacagagaattatagaacaatctgactacaggttcttaagttatagcaatgaaacttgtagttggccggcaggaaaatattctgagatgtggattcaaagtttctaagtgtgcacacgtacacacacacacccctacctgcatgcgttttctaatttacaaagactactcaagtaaagaggggtaatttcacaccccaggaggtctgtataaagataactctggtctttaaagcatcgggtttcaggtagaggtgaagagagaatgaatcaaactcaaactgccatcctcccaggttaaagatgagtccagtcattgtggagccctctattaacacaggacatgctaggaaggcccattaacccactgccctagcacatttgttaacgtcctagtgcatttgttgatatcaacagttcacagtttttattctgatagggatctattccagcagaccagcttctgtgacctctcaggatgcgaaaaagtaacacaagaaaagcttcttatgtagtgaattgagaaggaaatacctagatcaatattccctcagcacctctggtaggaagtccttagtaggagaaaaacaccatgaagacccttagtgcagaaggaaaagggggtagggggtggtggaagggaagctaaaagaaggggctggaggttctcagaattcaaaccacacaaacaaatgaagtattgaggtcccagacttgatctgggcccagtgtgaaagccctaacttatttctccagaagaatatgtcctctggttttagacttggcactgtggggagaaccagagtgatctatggtggatatacacacaaacatagacacacatatttgcatttagtaatttttgtaaaatttccatttgcttctctgatcctgtctgtatctttgggaatagatgtaagaatattacatctctcaggcttgctctgccccaggtttctgaacgtggaatacatttctccagggaaactcagtattatgagatttgggaggtggaagttaggccacagccatctcagggacaggtttcacagacatgagttttggcagcagccttgtgttctaaagacatttactcctaggggctctagaggatctgcaacatcagcagaggcttcctgtgggttcctgatcttttaaaattagggttctgcagtgacttctgctcctccagaccccctaacagttttaagggctaattccctgtaatatattcagttctgcttagactgattacagggattcctatttcttgactgaattctcatggctatagtggctcgtcaccatttgacatcaccaagaagtcctcattcaggtgcctttggaaattccctcaaacacacaggaaattagagtttgaaagaaaacggagaaccatgagcactgtccaaataggaacttctctcctatcacagagaaagggaactgaaagtcatttctcaagtctcccaaatttagtaatctcacaagaagaaccaatcagtgttctaggactaaacagtgtcataagttgctgagcaacaacttggattgaagatgctattataatatatgaaatgtctttgaatttaccatgtttttctcaagcaccatttaagaacaaggcattatggcagccagcaaagggcagacatagaaaattatacatggttttgcctctaaaagaggagatgacaagcttaaatcataggatcagactcttagcacagactgataccataggctctcatctggcccattctcctgactctttacctttcaggaaaggtattcctgaaaaattgcaggagagaccatgctgtaggtctctttctagcgatctaggagttaatgccacagtgtgttcaaagccctttgatgcgatcagataatcagtaatgtatggaatatttgtgttcataacttgtgagaacggctgcatggcaggacaagaccccagcacaacagtatggaaaatccaccctaagcagacatgtcatgactgatgttgaacaatggactcaccagccaggcacggtggctcatgcctgtaatcccagcactttgggaggcagaagcaggcagatcacgaggtcaggagatcaaaaccatcctggttaacatggtgcaaccccgtctctactgaaaatacaaaaaaaaaaaaaaaaaaattggccgggcatggtggcgggtgcctgtagtcctagctactcgggaggctgaggcaggagaatggcgtgaacccaggaggcagagctttcagtgagccgagatcgtgccactgcactccagcctgggcgacagagcaagacttccgtctcgaaaacaaaacaacaacaaaaaaaacaatggattcaccatccgatgggctccctcactgccaggtcactcttcatggaagtatttgtattccagtcctttctgtggaaagaacttaacattctccttttcataacactgtatcttcagaaacaagagagtcgaagtctcctaattttcaggagtgtctatgttgaacatcaaaatatattctttagagcagatctttaataatcatatgacaagagaaaaactttcataatcttatgacatgagggaaggaatattaaagccgttctgtgggttattatctctaacgttcccaatagaataggctttgccagctgggtgcggtggctcatgcctgtaatcccagcactttgagaggccaaggcgggcaaatcacgaggtcaggagtctgagaccagcctgaccaacatggtgaaaccccgtctctactaaaaatacaaaaattagccgggcatggtggtgggcgcctgtaatcccagctactcaggaggctgaggcaggagaatcgcttgaacccgggaggcggagattacaatgagctgagatcacgccaccaactccagcttgggcgacagagcaagactctgtctaaaaaaaaaaaaaaaaaaaaaaaaaaaaaaaaaaaaaaaaaaataggctttgcccattatactctctcatattcattgacctgaatcctcaaatgaggtgtgtccattagtcaactccaatctcttgtcatatataagatggtagagatgagaagaaggtagctcctttacagcccactatttccactaactactacctgtgtttcaagatacagcctttcatccttctccagtgttgagagtgttgaacctcagagtttctcctctcattttctctaaatgagatacaatgccagccatcccaagctcttggcctgagttgttcatcttgaagtctaggactccaagaagcatgaaagagcttctttagtgaagctatgtcctcagtactgccaaaattcagacaatctccatggcctgacaatttaccttctatttgggtaatttattgtcccttacgcaaactctccagctgtcatggcacagacatatgatctgtatttagctctcactttaggtgtttccattgattctattctcactaatgtgcttcaggtatatccctgtctagaactcagattggggttaaagagtctgtccgtcattgaccaacagtcttaaatacttgatttgttgtcgttgttgtcctgtttgtttaagaactttacttctttatccaatgaacggagtatcttgtgtcctggaccctttgcaagaacccttcccctagcaacagatgcgtcatctcaaaatatttttctgattggccaaagagtaattgatttgcattttaatggtcagactctattacaccccacattctcttttcttttattcttgtctgttctgcctcactcccgagctctactgactcccaacagagcgcccaagaagaaaatggccataagtggagtccctgtgctaggatttttcatcatagctgtgctgatgagcgctcaggaatcatgggctatcaaaggtaggtgctgagggaatgaaatctgggacgatagactacgaagcattggagaaaagacctatggacatttggaagataatgtgtggagtgaaagaatagtgtgacaggtattatgtggtctcgacagaaagtataacaaattgtggtttggtggagttcttccctcaccacaaactgaagtaagtcaaatttggtttagaggatcaaaactgagttgtgtattgatgaatagcaaggtcctgctacaagccaaactgggggtgggggtgggggtgggggaggaagaatattttctggcaagcattaacaagttatatttctgggctttaattattctttctggaaaattagtaaaattaaaaactaaaaaccacacatagttttgctagaattaaatgaaaaaaaaagttattagccctgttcttatctgaatacatgatacagtagttattttttggagtgtaaatcctgtcggtatatattgagcacatatattgtgttgaagattactagaaggaaaagtcatcaaaaagcaacaatttaccccaggaaaaggggagggaaggcatgctgatatgagttgcctcatgggacagtgatagccattccctgccttcccatctccatggtacagcagatcttatatcatgttaacttagtaatatttccaagagagtagaaaaatgagtaaggaaatggggaatctgatattattctctctcatctccagagcaacattggtgctgttgtaaagatgtactgtagaaaagtattcttcacccagcatgacccccacagaaggtgtcaggtagacttgaaataagcaaagtaataacccagctcccatacccatagtggcaattgtagatttctattgccccaaaagagccatacatagggatacttacctagaaagacagaggctcttcccttggtttgtgaagaggcagctagtatatttgtgtgtgtttgcatagatgcaaacggtaaataaattcctaggtttatcaatacacagtcaaacattaaagtctctcatcttggctgggcacggtggctcacgcctgtaatcccagcactttgggaggccgaggcaggcggatcacgaggtcaagagatcgagaccgtcctgggcaacatggtgaaaccccgtctctactaaaaatacaaaaaattagctgggtatggtggcacacgcctgtagtcccagctactcgggaggctgaggcaggaggattgcttgagcccaggaggcggaggttgcagtgagctgagatggtgccactgcactccagcctggcgatagagcaagactccgtctcaaacaaccaaaccaaaacaaaacaaaatatctcaccttatctttgaagactaaggaaaaaaaaatctcccactcatcgatacactccacagaggcagcatactctccaagtgtagctttctcttttcatgttcattattcccttggtgttggttattctcaatgtcaatcataacagaacatcttccataataacagtcccaatttaaggagcattaagataaaaggtggaattgccaaggtcaatccagacgagaaccttctcatagaggtaaccaccgtgtgggtttggatgctgggaagcagggggactatgacgctacaaggtctcagtcttaatttttggagtatttcagtccccaggtatattttccatagatttggcccttaaataaaaagaagcttctgactctaaaatgtaaacagtgcttgttacagtcttgttgatatattaagaaattactcaccttatctcatttaatcttaaaaacaaacccctgacaggatcaaaaccacagcagggctacataataggaaaactatacataaataggtagaataatctgctcaggatcactaggtaagttgctgaataagaattcaagatgtttttgatcccagagtttaaaacccaacctttcaaacagcgtttctttcttcttagagtacaatgttctgagaaagagatcctctggaattctggcctaagtgtatttaatgcccgggtaaagaaagtgagagaacatttctctttaggggctgctgctggatttctaaaaagaaaataatttctcagctagtaacatggagccaaacaacagcttcacaagactctgggttctttagccctcatctccttcaatccaccctctttataaccagtccttcttgtttttcccctcccagctttgttcagcagcatgcccttcacccagaccttgtcttgtcactcatccctactcgccatcattctttcattcctcttggcccaatctctctccaccacttcctgcctacatgtatgtaggttattcatttccctctcttgattccccccacccaactctctttctccacttctcgcctttcagaagaacatgtgatcatccaggccgagttctatctgaatcctgaccaatcaggcgagtttatgtttgactttgatggtgatgagattttccatgtggatatggcaaagaaggagacggtctggcggcttgaagaatttggacgatttgccagctttgaggctcaaggtgcattggccaacatagctgtggacaaagccaacctggaaatcatgacaaagcgctccaactatactccgatcaccaatggtacctccctctctgctgcactcctggacatgggaatccatagtttgaaagtagttgcttcagctctttgtgttagattattgtaactgattttccctccaagggcctaaccttgccattaacaagccccaaattctcatgccagaggtctgagaactttatgggtttgatcctatcttgttgtgctcaagtcttgtctctgtcatccatggtctcctacaaagtcattgccctaagttcatgctgggggagccagaagggaagtccttggatatcttatacctcaatattggctcaatttcttggggagggggtgctgtcagagattgttatctgaggatgtgacatagatttctcagggcacaatttcaactactttttcagctttagggtttttagatacgtttgtaccacaattgagcatgggagggagaggggtgagcctaagcagtgatggctgatttctgtcatgtctgtcatgtgtcccccagtacctccagaggtaactgtgctcacgaacagccctgtggaactgagagagcccaacgtcctcatctgtttcatagacaagttcaccccaccagtggtcaatgtcacgtggcttcgaaatggaaaacctgtcaccacaggagtgtcagagacagtcttcctgcccagggaagaccaccttttccgcaagttccactatctccccttcctgccctcaactgaggacgtttacgactgcagggtggagcactggggcttggatgagcctcttctcaagcactggggtatggaccaacactcaatctcctttatttcaaggtttcctcctatgatgcttgtgtgaaacttggtgttctaactgtttcataatatctgctacaattaatataactgtcttctcctactatccagcttccgcctttttttaatctgtaattctctcaatacatcattctgtcttcctcttctttaatctatgaataacttttctctttattaagaaccctacatttgattctgagtgttacttcttcccacactcattaccatgtactctgccttatttccccccagagtttgatgctccaagccctctcccagagactacagagaacgtggtgtgtgccctgggcctgactgtgggtctggtgggcatcattattgggaccatcttcatcatcaagggattgcgcaaaagcaatgcagcagaacgcagggggcctctgtaaggcacatggaggtgagttaggtgtggtcagaggaagacatatatggagatatctgagggaggaaaacagggtggggaaaggaaatgtaatgcatttaagagacaaggtaggaacagatgtggctcttgatttctctttgctagaacgaatcagacattggtatcatctggtatcccaaagcttcagggtctgtcatccctttctatagacgggcaccttgatcacggctccagtcttagaaatcatctccagtacctaaaaccattgtttcacattagaatactgagtctagggatctagaaaatactgagtctagggatctagaaaaataagcctcaagatttgggcacatcctagcttgtatttcctggggcaggtcatcagttcagaagcatttccagatcctggctcctttcaggttagggtcaattcattgcatgaaatgggaatctcttagaggccaatgcctgcttttgcttctttagtctcaaatgtagtatgagaaactctaaaaaaaggtaaagcatggttgcttattatgttcagttggagagtagggtatacagttagttcatgttggaaaggttagatgaacattgaaagaattttgcaaagtcaaaggattaagagagaagaggaaggaatctgaagcaaggagctcaaaactgatcttaaactccttggtaactatgtgtgtcttgctataggtgatggtgtttcttagagagaagatcactgaagaaacttctgctttaatggctttacaaagctggcaatattacaatccttgacctcagtgaaagcagtcatcttcagcattttccagccctatagccaccccaagagtggttatgcctcctcgattgctccatactctaacatctagctggcttccctgtctattgccttttcctgtatctattttcctctatttcctatcattttattatcaccatgcaatgcctctggaataaaacatacaggagtctgtctctgctatggaatgccccatggggcatctcttgtgtacttattgtttaaggtttcctcaaactgtgatttttctgaacacaataaactattttgaagatcttgggtggaatttttggtgtttaagccagttctttgggtggcggtggggggtggggagtcggtcctggggaatatatgtgatcctttcccggtaaaatatctgaatgttgaatttatcttataaattctagaattcatcagacatatcccggttcatttgggcttggtctcattttgtgcatctgcaggcaaccctcttgttgtggtctagtcctcatcaggaaaacctaaagtggggttggtttgttgggagatctctactgagcaatgatataactctatcttcagtagagtgaatctgaaaccccaaggtatggatctcagaatgcatgggatggaggggagcagatggggttagagtggggagaaggaagacagaagaatccataaacattgcaggatttacatatcaacatcgttcattccagatttaatgagcaaagagattggacactgaagactggccttacccattctgttagacatagtctcagatgcctattttattaccgagagagtagtctgactgattcttgaaaccaccttatatttgaagatgtgtctttgagtggaaaagctgagtgaaatttggggttggggagaaagatatgacattaagatgagaggaaggaatatttgaaacacgatgaactgttgctcatttgtctataaaactatgacttgatatttatctctaaaatagtttctagaacctgccataaaccactaagataaactattcatgatagtgtggtagactgcaaataaatgctgttgaaatgagttaggcttgggtttcatcttggctgtatcatttactagctatgttttcactggtatcttacttaacttagcctcacattactcatgaaaatactggtgttaatttttactacattgaattaatatcagaattaaaaggaaaacgcaagcaaagtaattagatacatgcttagtgataataaaatattgcaaaaaattatacattctgttgtttttctcaaaatttctatagagtgatgataaaaatctaagagaagctaaacaaaacaaggataaaccaaagcatcatgaccttctaagccttactaataaataagaagtttctcggctgggcacggtggctcacgcctgtaatccagcactttgggaggccgaggtgggcggatcacaaggtcaggaaatcaagaccatcctggccaacatggtgaaaccccatctctactaaaaatacaaaaattagccaggcgtggtgataggcgcctgtaatcccagctactctggaggttgaggcaggagaatctcttgaatccgggaggcagaggttgcagtgagccgagatcgcaccactgcgctcctgcctggcaacagactgagactccgtctcaaaaaaaaaaaaaaaaaaaaaaaaaagtttctctactgttggttcagagaatcaaagcagaatcttgagactactgacggtagaataggtatgaatgtctttcttacatgactacaaactttattataaaataaatagcttaacacagagaatacactaaaacttagacaagcatggattaagaaagcaaaaagtaaacccatatactaccatgtaagaaaaccatttttggccaggcgtggtggctcacgcctgtaatcccagcactttgggaggccgaggcgggcggatcacgaggtcaggagatcgagaccatcctggctaacatggtgaaaccccgtctctactaaaaaaaaaaaaaaaaattagccgggtgtggtggcgggtgcctgtagtcccagctactcgagaagttgaggcaggaaaatggcgtgaacccaagaggcagagcttgcagtaagccgagatcgcaccactgcactccagcctgggcgacagagcgagactccatctcaaaaaaaagaaaaaaaaaaaaaaaaaaaaaggaaaaccattttaatagacttttatttttagagctgttttaagctaacagaaaaattgcagaaattgtatacagagctcccccacccccagtttctacaatgcttaacatcctgtattaatgtggtacacttgttacaattgatgaaccaatactaataattattattaactaaaattcatagttatacgagggttcactctgtattacacagttatatgggttctgacaaatacataatatcatatatccaccattacaggattaaacaaaatagcttcactgatctaaaaatgacccaggctccatctactcatccttccttcctccctctgaaccattggcattctctgagctatttactagtgttttgcctttttcagaatgtcacatacttgtaatcatacagcatagagctttttcagatgagattcttttgcttagccatatgcatacaggtttcctgcgtatattgtcatagcttgatagcttatttttctttaatgttaaataatactccattgtataaatgtactatggtttatttacccattaatctattgaaggacatcttggttgcttctaatttttggcaattatgaataaagctgctataaacatccatgaacagatgtttgtgcagacacaagttttccactttggataaatacatagaagggcagttgctggatcatatggtaagagtatgtttagctttgtaagaaacaactagaatatcttccaaaatggctgtatcattttgcattcctaccagcaacgaatgagagtccctgttgttctatatccttgccagcatttggtattctggggtttgggatttcagcaagaaagccattttaatatttttttattttaaaataattatagattcaggggaaattgcaaagacagtatagagacattctgcatacgccttcacccagtttctccaaatgtttatattttaagtaattatagcacagtagcaaaaccaagaaaataccttgatacaatgtgtatgtatagttttatgcatgtcttaccacatttgtagattcatgtaaccaccaccacaatcaagcacagagctattccatatcacagagatcttcatcatgcttccctttatagccaaattccccccacacaatcaccttaacaacttaaaaccactaatttctttgctattaatctctagaatagtgtcattttgaaaatactagttaaatggaatcatgcagtatgtgactggtgtttttcacttagcataatacccatgagatccatccaagctgctgcatatatcaacaatctttttttttttattgctaagtagtattccatggtctaaatgcagcacagtttgcttaactatttgcctattgaaggacattttggctgtttctagtttggggtcactataaataaggctgttttgaacatgtgtttaaggtttttctatgagcatgagttcatgagttttcatttctctggtataaatgtctgggatataattcatgggcatatggaaatatatgtttagtttttcaagaaactgccaaacttagccaagtatgatggcttatacctgtaatcccagcactttgggaggccaaggaggaaggataaattgaggccaggaatttgaggccagccccagcgtctacacttttttttttttttgagacagagtctcgctctgttgccagactggagtgccatgatgcgatctcggctcactgcaacctccgcctcccaggttcaagcaattcttctgcctcagcctctcgagtagctgagactacaggtgcacaccaccacgcccaattaatttttgtatttttagtagagacagggtttcaccatgttggccaggatggtcttgacctcatgacctcgtgatccgcttgccttggcctcccaaagtgctgagattacaggcatgagccaccgtgcccggccaaatgttttgttttgtttttgttttttgtttttttgtcaggtggatgaggtggcatgcccctatagtcacagctacttgggaggctgaggtgggaggattgcttgagcccaggaattcgaggctgcagtgagccactgcacttcagcctatctgacagagcaagatcctgtctccaaaaggaaggaagggagggaagaagcaaggaaggaaggaaggaaggaaggaaggaaggaaggaaggagaaaaaagaaggtagggagggaggaaggaagggagggagggaggaaaaaagaaagaagaaaggaagttaaaaagaagggagggagggaggaaggaagaaaggaaagatggaagaaaggaaggaagggagggaggagaaagagaaagaaaaagaaggaaggaagaagggaaggagggagggaagggaggaagggagggagggtgaaaggaaggaaagaaggaaggaaggagaaagaaaaggaagagagaaagagaaagaaaaaagaaagaagaaagaaagaagaaagaaagagagagaaggaaaggaaagaaggaaggaaaggaaagaaagaaaaagaaaaaggaaggaaggaaagaaggaaggaagaaagaaaaagaaagaaagaaggaaggaaagaaagaaagaaagagaaagaaagaaaccgataaactattctctaattgctttgtgggagtatggccactttcatcatattgatttttcctttttttttttttttttttttttttgcgatagagtctggctctgtcgcccaggctggagtgcaatggcgtgatttcggctcactgaaacctctgcctcctgggttcaggtgattctcctgcctcagcctccctagtagctgggattacaggtgcacaccatcacgcctggataatttttttgtatttttactagagatggggtttcaccatgttggccaggttggtctcaaattcctgacctcaggtgattcgcctgccttggcctccggaagtgctaggattacagatgtgagccaccgcgcccagacaatattgattcttccttttccatgaacatgatatttttttccatttatttgtgtcatctctgagttctttgagcagtggtttgtagttttccttgtagagatctttctcctccctagttagctgtattcctaggtatttcgtgtgtgtgtggcaatcgtgaatgggattacgttcctgatttggctctcagcttgactgttgtggtgtataggaatgttagtaatttttccacattaattttgaatgccaagacttcgctgaagttgttaattagcttaaagagcttttgggctgagactatggggttttcttgatataggatcatgccatctgcaaataggcatagttcaatttcctctcttcctgtttggatgcctttaattctttttcttgcgtgttgccctggccaagacttccaatactatgttggataggagtagtgagagagggtatccttgtcttgcgctggttttcaaggggaatgcttctagctttttcccatttagtatggtattagctgtggggttgtcacagaaggctcttattattttaagttatgttcacttactactcagtttattaagagtttttaaatgaagggatattgaattttatcaaaaaccattcctgcatctattgagctaatcatgtggcttctgtctttagtactgcttatgtaatgaatcaaatttattgatttgcatatgttgaactaaccttgcatcaccaagataaagcatacttgatcattgtagattagctttttaatgtactgctggattcagtttgccagtattttgtggaggatttttgcataaatcttcatcaataatatttgcctgaagttttcttttgtgtgtgtgtctgccaggttttggtgctgatcctgatgatgctggcctcatagaatgagttagagaggtatccctcttcctcaattttttggactaattataacaggaatggtaccagctcttctttgtacatcaggcagaattcagctgtgaattattctagtcctaggggttttttttgtttggtagtctacttattactgatttaatttctgagatcattatcagtctgttcagggattgaatttcttcctggttctgtcttgggagggtgtacgtgtccagaaatttatcaatttcttctagttttcctagtttatgtgcatagaggtgtttttaatattctctgatggttatttgtgtttctgtggggtcagtggtaatatccccattgtaatttctgagtgtgattatttgaatcttctctcttttcttctttattagtctaactagaggtcttttttttttattaatttttttttaggaaaccaattcctggactcattgatcttttgagtgttgtttttttttctgtctcaatctcctttagttcagctctgattttggttatttcttgtcttctgctagccttgatattggtttgtacctggttgaccagttcttttagttgtgatgttaggttgttaaattgaggtctttctttttcatgtgggcatttgatgcataaatttcccacttaacactgccttagctgtgtcccagagattctggtatgttgtatcgttgttctcatcagttttaaagaacttctcaatttcttccttaatttcattatttacacaaaagtcattcaggagcaggcggttcaacttccatgtaattgtagggttttgaatgaatttcttagtcttaatttctaatttgattgcactgttgtctgaaagattgttttttatgatttcagttcttgtgcatttgctgaggagtatttgacttccgattatgtgatcaattttagagtacatgccatgtggtgatgagaagaatgtgtatactgttgttttggtgtggataattctatagatgtctatcaggtccatttgattcagtgctgagttcaagtcctgaatatctttgttaattttttgtctcgatgatctgtctaatattatcagtgagttgttaacatctccaagtattattgtgttggagtctaagtctctttgaaggtccctaagaacttgctttatgaatctgggtgttcctgtgttgggtgctgatctggtttggctgtgttcccattcaaatctcaccttgaattgtagctcccacaattctcacatgccacgggaggcacctggtgggaggtaattgaatcatgggtgcgggtctttcccatgctattctcatcatagtgaataagtctcatgagatctgatagttttataaagaggagtttccctgcacaagttctcttgtcttgtctgccaccatgtgagatgtgattttcaccttccatcatgattgtgaggcatccctagccatgtggaactgtcagtcaattaaatttctttcttttgtaaattgcccagtctcaggtacatctttgtcagcagcataacagactaatagaggagagtggagcactgctgaaaagatatctgaaaatgtggaagtgactttggaactgggtaacaggcagaggttgaaacagtttggagggctcagaagaagataggaaaatgtgggaaattttggaacttcctagagacttgttgaatgcctttgcccaaaatgctgatggtgatgtggacaataatgtccaggctaaggtagtctcagatggaaatgaggaacttgttgggaactggagcaaaggtgactcattatgctttagcaaagagactggtggcattttgtccctgtcctagagacttgtggaactttgaacttgagagagatgatttagggtatctggcagaagatatttctaagcagcaaagcattcaagaggttacttgcgtgctgttaaagccattcagttttataagggaagcagagcataaatgtttggaaaatttgcagcctgacaatgcaatagaaaagaaaatccaattttctgaggataaattcaagctggctgcagaaatttcatgggtaacgaggagctgaatgttaattattaagacaatggggaaaatgtctccaaggcatgtcagaggtgttttttttttttttccagagtctcgctctgtcgcccaggctggagtgcagtggtatgatctcagctcactgcaagctctgcctgccaggttcatgccattctcctgcctcagccttccaagtagctgggactacaggcatccgccaccacacctggctaattttttgtatttttagtagagacggggtttcaccatgttagccaggatagtctcgatctcctgacctcatgatccacccacctcggcctcccaaagtgctgggattacaggtgtgagccaccatgcctggccatgtcagaggtcttgatggcagccctgcccatcacaggcctggaggcctaggaggaaagaatggtttcttgggctgggcccagtgtccccgtgctgtatgcggtctttggacttggtgccctgtgtctcagccgctccagctgtgactaaaaggggccaacatagagctcaggccacgacttcagaggatgcaagccccaagccttggcagcttccatgtggtgttgagcctacgtgtacacagaagtcaagagttgaggtttgggaacctccacctagatttcagaggatgtatggaaatgcctggatgtccaggcagaagtttgctgcctgggcagggcactcatgtggaacctctgctagggcagtgcagaaaggaaatgtggagtgggcaccctcacacagagttctcaatggggcagtgcctagtggagttttgaaaagaggaacaccatcctccagactccagagtgatggatccactgacagcttgcatcatgcactggaaaagctgcagacactcaatgccagcccatgaaagcagcttggagggaggctatatcctgcaaagccacaggggcggagctgctcaagaccaggggaacccacctcttgtatcagtgtgacctggatgtgagatatggaatcaaaggaggtcattttttggagtttaagatttaagtgctctgctggatttcagagttgcatggagcctttaagtcccttcattttggccagtttcttccatttggaatgggtacatttattcaatgcctgtaccctcattgtgtctaagaagtaactagcttgcttttgattttacaggctcataggcagaagggacttgccttgtctcagatgagaatttggactgtggattttgagttaatgtagaaataagactttggggtactcttgagaaggcatgattggtttgaaatatgagggcatgagatttgggaggggccggtggtggaatgatatggtttggccctgtccccacccaaatctcaccttgaattgtaggtcccataatacccacatgttgtgggagggacctggtgggaggtaatttaatcatggggtaggtctttcccatactattcttgtgatagtgaataagtctcatgagatttgatggttttatgaaggggagtttccctgcacaagtcctcttctcttgtctgctgccatgtgagatgtgcttttcaccttccaccatgattgtgaggcctccccagccatgtggaactgcgagtccattaaacctccttcttttgtaaattgcccaatctcaagtatgcctttattagcagcatgataatggactaatataaatgaatatatatttaagaaatggataaattcctggacacatacaccctctcaagactgaaccaggaagaaactgaattcctaaacagaccaataatgagttctgaaattgagtcagtaataaaaagcctaccaaccaaaaaaagcctgggaccagatggattcacagctgaattctaccagatggataaagaagacctggtcctattcctattaaaattattccaaaaaaattgaggagaagggattactccccaattcattctgaggccagcatcatcctgataccaaaatcgggcagaaacaacaaaaaaagaaaatttcaggccaatattcttgatgaacatagatgcaaatatccttaacaaaatactaacaaaccaaatcaagcagcacatcaaaagctaatgtaccacgatcaagtagattttacccctgagatgcaaggttagttcaacatatacaaatcaacaaatgtgatccatcacataaagcagaatgaaaggcaacaaccacctgatcatctcaatagatgtggaaaaggcttttgataaaattcaacagcacttcatgttaaaaatgctcagttcacgcctgtaatcccagcactttgggaggctgaggtgggcagatcacaaggtcaggagattgagaccatcctggccaacatggtgaaaccttgtctctactaaaaatgaaaacttagctgggcatggtggcatgcgcctgtagtcgcagctactcaggaggctgaagcaggagaatcgcttgaacccagaaggcggaggttgcagtgagccaagatcccaccactgcactccagcctgacaacagagaaagactccatcttaaaaaaaaaaaaaaacctcagtaaactaggcattggaggaacatacttcaaaataataagagccatcaatgacaaacccacagccaacaacatagtgaatgggcaaaagctggaagcatcgctcttgaaaatcagcaggagacaaggatgccctctctcaccactgtttttttttttttttggagacagagtcttgctctgttgccaggctggagtagtgcagtggcgcgatctcagctcactgcaatctcgcttcccaggttgaagcaattctcctgcctcagcctcccaagtagctgggactacaggcacatgccaccacgcctggcctttttttttttttttttttttttttttagtagagaccaggtttcatcatgttagccaggatggtgttgatatcctcacctcgtgatccacccacctcagcctcctaaagcactgggattacaggtgtaagccactgtgcccggccctccctcaccattcttattcaagatagtattggaagtcctgaccagaacatcaggccagagaaagaaataaagggcattcaaagaggaagagtggaagtcaaactatccctgtttgcagatgatatgatcctgtgtctagaaaaccctaaatctccaaatcttggcccaaaagttcctttagctgataaacaacttcagcaaagtttcaggataaaaaaaatcaacatataaaaatcagcagcattcctatacacaaagaacactcaagctgagacccatatcaagaacataatcccactcacaatttccacacacacacatattacctaagaatacagctaactatggagatgaaagatctctacaagaagaactacaaaacactgctcagagaaatcagagatgacacaaacaaatggaaaaaattatcatgctcatggataggaagactcaatatcattaaaatggccatactgcccaaagtaatttatagattcaatgctattcccattaaactaccattgacagtcttcacagaactagaacaaactactttaaaattcatatggaagcaaaacagagcctaaatagctaaggcaatcctaagcaaaagaataaagtaagaggtactatgttgctcaacttcaaactatactatgaggccacagtaaccaaaacagcatggtactggtacaaaagcagacacacagacaaatggaacagaatagagagtccagaaataatgctgtacaactccaaccatctgatctttgacaaagatgacaaaaacaagcaatgaggaaaggactcctcattcaataaacagtgctgtactaactggctagccatacgcagaagactgaagctggactcctaccttacaccatatacaaaaatcaacttaaaatgaattaatgacttaaatgtaaaaccaaaaatcataaaaaccctggaaagtaacctagaatataccattctgaacataggacttggcaaagatttcatggcaaagacaccaaaagcaatcacaacaaaaacaaaaattgacaaatgggacctaatttaacttaagagcttctgtgcagtaaaagaaactatcgacagagtaaatagaaaacctagagaatggagaaaatgttaagtcctaattcgggaaaaggagtcaggctggtgggaccagaagaaagcaaagaggtaaaacaaataagctgtaagtctgtctttcctcatggtccagaacacacagccttcctgtgcaaataactcacagtcttcccgtgcccaactatcatcagacatctataagctagctcactgcaaccctggcattgttgctactgcacatagcactctgcagcctaagaaccatcctataaaatctcctgcaagcccttgtttccgtgcagtcagcttctcttctgctggcctgcctgcctgttgcctccttgcaacatattttcctactttctctaataaatctgcttttttttctacctacaactgtcttggtaaattcttttaccctggcgccactggcccagatagttattgctcacctgcaacagaaaatatttgcaaactatgcatctgacaaaggtctaatatccagaatctataaggaacttaaacaaatttacaagaaaaaaaccaaaccacctcattaaaatatgggcatgaacagacatgaacagacacttttcaaaagaagacatacatgcagccaacaaacataggaaaaaattcgcaacagcactaattattagagatatgcaagtcaaaatcacaataagataccatctcataccagtgtgaatggctactattaaaaagtcaaaaaataacagatgctggtgaggttgcagggaaagagaatgcttatacactgctaatagaaatgtaaattagttcagccattgtggaaagcagtggggtgcaaagaactaaaaagaaaattaccatttgattcagcaatcccattactgtgtatatacctaaaggaatataaaccattctaccataaagacacatgcacacatatgttcactgcagcactgttcacaatagcaaagacattgaatcaacctagatgcccatcaacagtggactggttaaaggaaacgtggtacatatacaccatggaatactatgcagccataaaaagaatgagattgtgtccagaattggttccttccggtgggttcttggtctcgctgacttcaaaaatgaagccatgaacccttgtggtgagtgttacagttcttaaagatggtgtgtccggagtttgttccttcagatgttcaaatgtatcccaagtttcttccttctggtgggttcgtggtcttgctgatttcaggagtgaagccgcagacctttgctgtgagtgttacagctcttaaaggtggtgcatctggagttgttcattcctcccagtgggtttgtggtctcgctgacatcaggagtgaagctgcagactttcacagtgagtgttacagctcttaaaggtggtgcgtcctgagttgttcgttccccctggtgggtttgttgtcttgctggcttcaggagtgaagctgcagaccttagcagtgagtgttacagctcataaaggtagtgcggacccaaagagtgagcagcagcaagatttattgcaaagagtgaaaggacaaagcttccacagtgtggaaggggacctgagtgggttgcagctgctggctgggttggccagcttttattcccttatttggccctgtccacatcctgctgattggtccattttacagagtgctgattggcacgtttacaaacttttagctagacacagagcactgattggggcatttctacagagtgctgattggtgcatttacaaacctttagctagatgcagagtgctgattggtgtgttttcacagagtgctgattggtgcttttacaatcctttagctagacagaaaagttctccaagtccctgcccaacccagaagcccagccagcgtcacctctcaagatcatgtcctttgcaggaacatggatggagctggaggccattatcttatgcaaactaacatagggacaaaaaaccaaataccacatgttctcacttataagtgggaactaaacattgagtacacatggatacaaagaagagaacagtagatatggggacctacttgagggtgaaggataggaggagggaaaggatcaggaaaaatacctgtgagatactatgcttattaccttggtgatgaaattatctgtacatcaaacacctgacatgcagtttacctatagagcaaacctgtacatgtatccctaaaactaaaataaaagtttaaaataaaaaagaaagaaattagttcaatacttttttctcagtgaaatgcttatgcaaacaaatatcatacacttttatttcagagatttcgggatcataaagggagtgtaccaaggacagtttgtgactagcctcctcacattatccctcacattatcatttctcatctcttctcccctaaactttcatgccaacagcagactaggtaagtttccctttcctgcatctctaatgattcagggcgattaaggtctccttctccagccccctgcaccaccattcccacccccatctcatctcatctctgcccagaaggctggaaggacaagctgaagctccctcctgtgttccctcccacagcagacacacagacaaatccccactctacactcacctacctgagccctcctaattccttctggctcacaatcctacaccctcccacagggtgcttacgtgtgcatacacacacactccctgttctcagggaccctactcccctcccccacccgccttgctcacctcgcctgtgcatggagaagctctcaaaaaccccgtagttgtgtctgcagtaggtgtccaacagaccccgcaagcagcccaagaggttcttctggctgtttgcattcctggactcttctccgctccagctccgccaccgcccggaactttccgacgtccctatggaagcgcgcatactccttccggtgtggatgagtctctgcacaaaccgcatccgctctgtcccattgcagaaatagcactcgtgtttaatctgctccaagaaatgtgccgcagggacatgaagaaccggtttcttgggcggcatcctaggaaaagagtgatggctatgcccacaatcagcagggcgaggggcggaacaccttgactggcccccaccagccacccccgaccacctaggggttcctcttccatctgcctgaggcggagggaggctgcgaggggcgtggaataccatttgggatccgctacccatttccgagctgagctggacgcctctttgcaaggctctggatcaggatcaccttcctcatcactgtctcctgcgcttcctcctcctgggagcctccatccaaaagacacttctgctccctcctatcatgccacactctactcattccttaaacaagacccactgcctccattctgtaaatgcttccttagtgcttaccttgtgtctcatctgtgctgtctcctgggaatccaaacgggaaaaatagacctcatccctccgctggaggagcttaaagagaagtgaaattgatggcaaaaaaccaaacacgcaacaccttatacaggaacgaaaaatgttaagagaagtgtggagttctagaagaaagaataggatgatctaaattacattagggtgccagagaaggactctgagagtgacagctcaaatgtgaccttacaggtttagtgggtgtgagccagggggcagagtggagcccgtgtgtgtctctggacaaaaagggaggcacatttcaggtaagcataatatcatgtacaaaagcttgaaagaattgatgaacttcttcaagaaaccagaaaaaagttcactaaagcacagcatgaaggaaaggaggggaaaagattaaactggagaaatcacaagaagggaacaattaaaatcattgtcatgttaggatttcgatttatactaaatgtaatgggaaacagttgaagagtccatgaccccaacacaggttcacaaacttttttttttggactttctaaatccagaaaactcacgaattcacttgctgctgtttttaatttgttgccgaaactcatttggcaaatctgatctgaagaggtaaggactcaaaagtgtcacagagctcttactggtgacatgtgcatctgtagtttcaatatatataaacatacaaacatacgtatgcatgtgtaaatatacacagatttcaaatactgtgcatgtatatatttttgatgtttttgtatttatgtttaaatgaactatgaaaaatcaaaaataaagaaaaatccttgtgtttaataaaatgagatgaatagaaagcatttttaaaataataatttttttttttaagttctgggtacatgtgcaggatgtacaggtttgttacataggtaaacatgtgccatggtggtttgctgcagctatcaacccattacctaggtattaagcccagcacgcattagctcttttccctaatgttctccccaactctgccctcccccagcagaccccagtaagtgttgttctcctccctgtgtccatgtgttctcattgtttagctcccatttatatgtgagaacatgcggtgtttggtttcctgtttctgtgttaatttgctgaggataatggcttccagcttcatccatgtctctgcaaaggacatgatctcattcctctttatggctgcatagtattccgtggtgtatatgtaccacagtgaatagaaagcatcttacattatcagtagtataaaatgtagaattactgcagaaatctgaggcattttactgaaaaatatttgggatagtcgtcaccatttatgacttataattaccagttgttgaaagttaatagaggtaataattatcaagaacacatcaaaattttgaaataaactgcataaagcaaaaaagtaaaaatgaagatcttgaacctgcattgattgaatggattcatcaagaaagcagtgaatttatgcaactgtctaggtttttttttttcggcaatgaaacaagcaaaactaagccatgaagagctgaactaagagataaatgtgttttaaaagtgtgagtatagaatttttagaagaaacacaatgtaaaccagtgttctcagccttggcactattgacattttggactagataatattttcttggtgagaggagctgtctactagggtccctagcttctacttgttacatgtcagaagaaactcctggtgtgacaaccaaaaatggctccagacattgccaaatgttccctagggagttgggagagggaagggagggacagaggggtggtgaactatccctgggtgagacccactagtgtaaccatctgaaacatctatggttaaaaagccgctattaattatggaatatttgagatttacactgaaaactctgccaatattctatctatttaaaatcttggtcctacataaaacttaggatttttaggaatctggtcccagtgcagagctatttttctagcaaaattaattcattcagaaccaaggtttactgatttatttgccttgccagtcgccaagtcatattcttaatttctgtgtcactggtccactactcactgcctcagctaattcattttctaactttcagtttcctactcccaacaatacaaggaggcatcaaattaccaaccttggacagaggcagaactcttatttctgtagttaagccttctcagaaggggagtgctatggtttggctgcgtaagcatttcaatcttgtcttgaattgtagctcccacaattcccaagtgttgtgggagggaccaggtgggagatagttgagtcatgggggcaggtctttccccatgctgttctcatgacagtgaataagtcttatgagatctgatggttttataaagggaaaaacccttttgcttgctgtcattcttctcttgtctgccatcatgtgagacatgcctttcaccttccgctgtgattgtgaggtctccccagccacgtggaactgtgagtctattatagccctttttccttataaattatccagtcttgagtatgtctttatccgcagcctgaaaacagactaatacagggagaaactaagaagatggcattctctcatagatagtttccaaaaaacgagcaagtccccagattttgagtagagactttcacaagctcccttcacccttcagaaatgatagcagagaggagagcactttggatgagataaggtctatcttattattcctaaattctctgagcaccttcttcacagataagaatgttggaaaataaaaatatgtgaagttgctgtcactgtagcttgcatggttagcactgcagtctatgctcatgtgccaagcttagattgccatatttagcaaataaaaatagagggtgcctagttaaatttggatttcaaatacattattgttgtttatctgaagttcggatttaactgggtatcctgtactatatttggcaacctgagcccaacttgctaataatgctcagaaggagtgaatttaatacttctttgtgttctttaacacatgcctatgacagcgtgcacatagggaagttttcaaatgataaatgcaaaatgaatgaaagtttctcctttacattgggactagcagaccttgcatctctctcccaccctgagacacaccctgtacataagaaattctatcaataattcagactcagtctagtcactattcactaatggtggttgtaagctcaggctctagaatcaggaaatctgaatttaaacatgaccccttctactagggttaattttaacaaccattaacctttaaaaatatatataaaatggatccaacagtaatatattcctcacaggattattgttgagggtaaaactaagtagtggctcttcttagtgctgataatataataatcactctaatatattaccattttatttttacaatccctataaaggaaagcttcattatttttctattccttaacttctaaagcaagtaacatctagatcatgatttggcaattgtcttttattaatttatcactaattaccattttaaacacatgagggcagaaacactggtttatgtataatagttcatatgcctaaacctcacacaaaaggagagtgctgatgtcaaagagagggaatttgtatatactcagattaaaattgcaatctgatttctagcactaactttgtgacagtgggtaagttacttacaccctttgaattttagattccaaagatgtatatgcttttaaataccaaagatatgataggataggtattagatttccataccaaaatttataagcctggtaattagtcactgcaaaatattacaatactccacgctaatacagaccagatttgctttgtttattactccattctcatcacccagagtaataactagtatattctaagtcactaataaatattggctgtatgaactaatagccttttgcataacctgtcaccactgtacacaggggccttctagtgcttcattgccaatgactgagcatctgtctctggttcgcaggtcatcctgcttctcttcagcttctttgttcattttctttaggtccagctggctccctgatcccagagcatagtctttccctgaggctcgctactcaaaagagtcaaacttcatccagccctcacttcttccacccgctcttcaaatggtccaatctactttccatcctggatactccactgactgcaaatatcaactccttcaaacgcagcacttgcttctctgtcacgttctcacttcactcacctgtcggtggttctcaccacaactggccactccctcacctcgaaaaaatcatttgtctttgattcccatgcatcacattctcttgggtttttttttttctccagcatctctggggaatcttctcagtcccttatgctgtcctgtggccctctgatattttttctacacaaaaatctatctccctctgcaacctcttccacttccctggaatttaacacagaacctgcatcgaccccaacataaatacctccaaccctggcctcaccctgaactcctctcttatattcagttgacttcctgattgcttcatgtgagttcaaaaatcatctcaattttaataaacacaattgtcatttctaatcacccacttcaaatcatttcctcccacattcttccctatttcaataagcagcaccaccatccacctatttatcaaggcaaaatacttagaaataagttacatttaatccattaacaagtcatgcaaaaagacatcccaagtctgttcactttatctggatctgtctttgtcactactacactacatgaagccaaaaatttgtcttccctggagaattctgctgttctccagttgtgaaccccaacaatccaatctccacatagtagctagaattatttttaaaattgaacattatcgggggacctgccctgataatcacgtaggttcttttctattttcctcagcgtcagctggcttgagaaataaagggacagagtacaaaagagagaaattttaaagctgggggagacatcacacgttggtaggatccacgatgccccacaagccacaaaaaccagcaagtttttattagggattttcaaaaggggagggagtgtgcgaataggtgtgggtgacagacatcaagtacttaacagggtaatagaatatcacaaggtaagtggaggcagggtgagatcacaggaccacaggaccaaggcgaaattaaaattgctaatgaagtttcaggcaccattgtcattgataacatcttatcaggagacagggttttgagatcaaccgatctgaccaaaatttattaggtgggaatttcctcttcctaataagcctgggagcgctatgggagactggagtctatctcacctctgcaatctcgaccataagagataggtacgccccggggggccagttcagagacctacccctaggtgcgcattctctttctcagggacgttccatgctgagaaaaagaattcagcaatatttctcccatttgcttttgaaagaagagaaatatggctctgttctgcctggctcaccggcagtcagagtttaaggttatctctcttattccctgaacaattgctgttatcctgttctttttcaaggtgcctacatttcatattgctcaacacacatgctgtacaatttgtgcagttaatgcaattatcacatagtcctgaggtgacatacatcctcctcggctgacaggattaagagattaaaggaaagacaggcataggaaatcacaagggtattgattggggaagtgataagtttccatgaactctttacaatttatgtttagagattgcagtaaagacaggcataagaaattacaaaagtattaatttggggaactaataaatgtgcataaaatcttcacaatccacgttcttctgtcatggcttcagccggtccctctgtttggggtccctgacttcccgcaacataatattaatggactctccttgtaacctcccaggagcttccaatatgtttaaataaaacttaattccttactatggccaccaaggccgaatatgatgcagctcctgactttctctctctcttacctcatcttctgccactccaccccttgctttccatccttcagcccctctaaccttctttctgtctcttcaacacagcacacgccttcccattccttggcctttccccttttctgtctgtctggaacacttgtcccttagatcttcacatggctgtcttattgttcttgtctcagctaaatgtgagctctcctcagagagggctcccaaactacctgtgaatccaatgtgaagtgaagttgggtgaatccaattctctctgtcctatcaccctgatgtctttttttttaaaggcaatattgctctctgaatttttcttttttgttaaatatttattgggatactgtctgtctcctctggtattgagttccatgagagtagggatcttttttatcttattcaagtagaattctctgagcctagaacagagaccagaacataacttttgctcagaaacatacctgtggtctaaatgaataaaccgaagttctgggaactgatcaccctgggtattctagaaagcagaaaagggctcaagctcctgcaccctttcattctaatgacatgctatatcccttctcctccctgtgagaaattaaggcaaacttcctttctctcctctttctagttggaagaaggattcacagataaggaaacagtgattgtaagaaagaaaaaattttcattgagaattatctcttttctgccgggcgcagtggctcatgcctgtaatcttagcactttgggaggctgaggcaggcggatcatgaggtaaggagtttgagaacagcctggccaacatggtgaaaccccgtctctactaaaaatacaaaaattacctgggaggtggaggttgcagtgagctgagactgcaccattgcactccagcctgggcaacagagcgagactccatcttaaaaaaaaaaaaaaaaaagaattatctgttttttttttaatagtttaagttttagggtacatgtgcacaacgtgcaggtttgttacatatgtatacatgtgccacgtggtgtgctgcacccattaactcttcatttacattaggtatatctcctaatgctatccctcccctcttcctccaccccacaacaggccccagtgtgtaaagttccccttcctgtgtccatgtgttttcattgttcagttcccacctatgagtgagaacatgtggtgtttgtttttttgtccttgcaatagttttctgagaatgatggtttccagcttcatccatgtccctgcaaaggacatgaactcatccttttttatggctgcatagtattccatggtgtatatgtgccacattttcttaatccagtctatcattgttggacatttgggttggttccaagtctttgctattgtgaatagtgccacaataaacatacatgtgcatgtgtctttatagcagcatgatttataatcctttgggtatatatccagtaatgggattgctgggtcaaatggtatttctagttctagatcattgaggaatcgccacactgacttccacaatggttgaactagtttacagtcccaccaacagtgtaaaagtgttcctatttctccacaacctctccagcacctgttgtttcctgactttttaatgaacgccattctaacaggtgtgagatggtatctcattgtggttttgatttgcatttctctgatggccagtgttgatgagcattttttcatgtgtcttttggctgcataaatgtcttcttttgagaagtctctgttcatatccttcgcccacatgttgattgggttgtttgtttttttcttgtaaatttgtttgagttttttgtagtttctgggtattagccctttgtcagatgagtagattgcaaaaattttctcccattctgtaggttgcctgttcactctgatggtagtttcttttgctgtgcagaagctctttagtttaattagatcccatttgtcaattttggcttttgttgccattgcttttggtgttttagacatgaagtccttgcccatgcctatgtcctgaatggtattgcctaggttttcttctagggtttttatggttttaggtctaacatttaagtctttaatccatcttgaattaatttttgtataaggtgtaaggaagggatccagtttcagctttctacatatgactagccagttttcccagcaccatttattaaatagggaatcctttccccatttcttgtttttgtaaggtttgtcaaagatcagatagttgtagatatgtggcattatttctgagggctctgttctgttcccttgatctatatctctgttttggtaccagtaccatgctgttttggttactgtagccttatagtatagtttgaagtcaggtagcatgatgcctccagctttgttcttttggcttaggattgacttggcaatgagggctcttttttcgttccatatgaactttaaagtagttttttccaattctgtgaagaaagtaattggtagcttgatggggatggcattgaatctataaattaccttgggtagtatggccattttcatgatattgattcttcctacccatgagcatggaatattcttccatttgtttgtgtcctcttttatttcattgagcagcagtttgtagatctccttgaagagatccttcacatcccttgtaagttggattcctaggtattttattctctttgaagcaattgtgaatgggagttcactcatgatttggctctctgtttgtctgttattggtgtacaagaatgcttgtgatttttgcacattgattttgtatcctgagactttgctgaagttgcttatcagcttaaggagattttgggctgagacgatggggttttctagatatacaatcatgtcatctgcaaacagggacaatttgacttcctcttttcctaattgaataccctttatttccttctcctgcctgattgccctggctagaacttccaacactatgttgaataggagtggtgagagaggacatctttgtcttgtgcccgttttcaaagggaatgctttcagtttttgcccattcagtatgatattggctgtgggtttgtcataaatagctcttattactttgagatacataccatcaatacctaatttattgagagtttttagcatgaagggttgttgaattttgtcaaaggccttttctgcatctattgagataatcatgtggtttttgtcgttggttctgtttatgtgctggattacctttattgatttgcatttgttgaaccagccttgcatcccagggatgaagcccacttgatcatggtggataagctctttgatatgctggtggatttggtttgccagtattttattgaggatctttgcatcgatgttcatcagggatattggtctaaaattctctttttttttgttgtgtctctgccaggctttggtatcaggatgatgctggcctcataaaatgagttagggaggattctctctctttctattgattggaatagtttcagaaggaatggtaccagctcctccttgtacctctgatagaattcggctgtgaatccgtctggtcctggacttttttggttggtaagctattaattattgcctcaatttccgagcctgttattggtctattcagagattcagcttcttcctggtttagtcttgggagagtgtatgtgtcgaggaatttatccatttcttctagattttcaagtttatttgcgtagaggtgtttatagtattctctgatggtagtttgtatttctgtgggatcggtggtgatacccctttatcattttttattgcatctatttgattcttctctcttttcttctttattagtcttattagcggtctatcaattttgttgatcttttcaaaaaacaagctcctggattcattgattttttgaagggttttttgtgtctctatttccttcagttctgctctgatcttagttatttcttgccttctgctagcttttgaatgtgatcgctcttgcttctctagttattttaattttgatgttaggttgtcagttttagatctttcctgctttctcttgtgggcatttagtgctataaatttccctctactttaaagctagaattagtttctaaaactgaacatgaattgactctccttgtaaccatccagtagcgtctcacatctatttaaataaaattcaggctgggtacggagactaatgactgtaatcccagcagtttgggaagccaagacaggcagattaccggaggtcaggagttcgagaccagcctggccaacatggtaaaaccctgtctttactaaaaatactaaaaaattagcctggcatggtggcaggcgcctgtagttccagctactcgggaggctgaggcaggaaaatcacgtgagcccaggaggcagaggttgcagtgagccgaggccacgccattgcatccagcctgggcaacaagaacgaaactccatctcaaaaaataaataatgaaataaaaaaatgaaaataaataaaataaaattcaaatttcttaccatggacatcagagcctaatataatgaggctcctgacttcctctctgcttcctacctcatcctctgcctctgcatttctttgaatgctatagttcagtctctctagccttctttctgtccctgcacataatttcccacaccagggcttcccaccccccctgcccccacattctgtctccctggaactttcgtcccttagatcttcacatggctctctacttattttgttgtctcagctgaatgtcactttctcaggcagagctttctaaacacatgagctaaagttgggtgaatccatttctctcttttccacaaacctgatgtcttttcttcagtgcactattactctctaatgttatcttctttgttaattgcatattgggttaatgtctgtctcctctattgttgtgtaacttccatgagagtcgggaccctctctatcttaatcaaatacaatgatttgaacttggaatggagccgagtacacagtagctgctgagaaaaataagtgtggtttacatgaataaaccagggatctaggaactgatcactgtttggatcctggaaagcaagaaggggctcaaactccagcactctttcattttgatgtcacactagaccccttctcctcccggtgtgaaatacaggcaaagttcttctttctcctccttctagttgtaagaattcacagataaagattaacagtgatttaagaaataataaatttttaaattaagattcatctattttttgcctgggtgcggtggctcaaacctataacccaagcatgttgggaggtcaaggctggaggattgcttgagtccagcagtttaagaccagcctgggtaacatagcaaagtctcatctctagcaaaattacaaaaatcagctgggcgtggtttcctgcctgtagtctccactactctggaggctgaggagggaggcccgcttgagcctgggaggcagaggttgcagtaagcctagatcataacactgaactacagcatgggtgacagagccaggccttgtctcaaaaaaaggaaaaaatctctttcaatggatctcatagtgctctgggtctgtgcaagctttaggaatttctggaaatgatgacaacatagctggggaaaaataaaaactggaggaagaggtaagcagacatggctaattaaggaaagctgagggcatgacgggtgaacctaggaaatttaagacaagaccccagtaagacaatgagttcccaggacttgcccattgactttcagccctatgagatgtgaacaatgtccacattgtctctgtaaccccacacagtatatagtttgaacattattaaatttctgatatttgactgtttttgacttacaaaaatagaatttcatataatttatcttacgttagttgaatatcttcttgttatgtctagttagagcatgtaggacatgtaggagaaatttctatagaaaggttagaagagattcataataaacactaagccgggccaggttttccgaggatgccttaagttctttaggcaccaaagaacaccccagagatgctctttatctgtagggtgactccaagtactaaagatcttagcttcagttccagggatttttccccataagaaagacagagcactaagtataacttctgtcagagaacctacatacactacagggatataggctttataaacattggagttcagaaagaaaaagaaaggagataatggggaggccattggtacatcctcacatttgaggaagaggggccaacaccaaagttcctgtggaggacatgacccaggatcctctagaagaaacgctttgaattatcttgactcccacaaaattttcagtaaaaacgtcattttgtctgacgtaagtcaacataataaagggaagtgctgtatggggaaattattttagcatccttattgccaaatcctctaaacaccctgaggacatgtgatgcaaaggttttattggtggagatttaaaaagaaatgatctgtacgaaggccccttacacagtctcatggactgtgtcatgagcaagtagtcaagctcctttcgtggaggagataatttgggatccaataatacagatgcacaatctctgaccaaaacgtcacaaagtcttaagggacatggcctgggcacaatgttaacaaaactccctattttccccaccccatagtagctcagcacccacaatgtgcgcttatgtcgggtgtccccagccaaagccagtgggaagctcagcaccatcagtgtcactgtcagcgctgccatgcaggagcctccagggagcttcagacacaccatgctggagaacaggaaaggaccaggggccagaggaggaggcaagtcttactcaggaagaactatgaacccctccacccacattccaaattatggggaggaagttactgactttcttgctcctgggtcgggtaatctcgtgttggagaaccaatcagcatctgagttcaatagcatcatcagttgctggtcagagatgctgtatgaaggtcctcttctgaaacagaatttccttctttaaaggattgtttttaaattagtgcttgaaagatttgatccagttgcatgtaaaacactttaattgggtccgattgtgagccagctctgtgctggtcagtgatgtgttcgtaagtttgagccttgtaagagcattcatttcccacttgacaagacaactgtttgcagaagtgagtgtgtgagtgtgtttaggagtaaaggagatggaaggaacatggttgtaaatccggagacatttaaactggtccttattgcaccatatcttaatgttgtagatttgggaaaattatttcatgtctcacagttgaaatgaaggcactgtgatctttcaggtctttcaatactggaaaatgctgtgattctgtggacgcctgaaggagcagcagccccgggtatctgataacatgacagaatgacagctattgactagagagcttaatccgtacctgtttacaggtagggatgtctttaataagttaaaggaaattgaaagtttgttaataatttaatctgagtaaaaatatctttttcaagtgtgtctcctgatgctgcccccaggtttagtggcccctccagaacacacacaggcaaggggctaacaggggccacctatgtgcaatggagggcctgaaggtggctttgtatggcatttaccctaacaatgtgataaggtcaactgtgcaatccaagtattcatgggtctgagagatcgatcgaagactgtgaaagtcagctgttcatagaacaactcttttttttttttgagatggagtctgtctctgttgcccaggctggagtgcagtggagcgatctcagctcactgcaacatctgcctcctcggttcaaagattctcctgcctcaacctcccaagtaactctgactacaggcacttgccaccatgcttggctaattttttgtatttttagtggagatgggtttcactgtgttagccaagatggtctcgatctcctgacctcatgttcttcctgcctcggcctcccaaactgctgggttacaggcgtgagccatcgtgcctggccacattatgttttaaaataatgaatattttatgtgaagagtgttcaatccctcattcttggttcccattatgatttcctcatttgattgaggctatagcactttatattatgtttctcttgttttatcataagggaagatacaagacgactttgctaactaatacatttcacaatattcaggaaagagaacactagggaaaactatgaattacatcagttgatgtaactatgtaatattaaacatattattatacatttagataattactatgctttttattaatataaatataacatctaagattcagaatggacttcagaatacaactatgcttataaagttctgcattaattcacatgctaccacataggcactcatttgtcttttttttgtttgtttgtttgttttgagatggagactcgttctgtcgcccaggctggagtgcagtggcaccatctctgctcactgcaagctcagccccccaggttcatgccattctcctgcctcagcctcctgggtagctgggactacaggcgcccgccacaactcctggctaatttttttgtatttttagtagaaacagggtttcaccgtgttcgccaggatggtctcaatctcctgaccttgtgatctgcctgcctcagcctccgaaagtgctgggattacaggcgtgagccaccgcggccggcctaaagtctgtaacctgtctttatggagaactacttttgaggccgtacacttctttcagtaacaatattgtctaagtaatggtatggcgaagttgtttgtaccttttctggagctatattgacattccatttagttaaagcctactttgtttcttggaataactgatgtaagatttgatctgtaggagcggccaaaagaatgtcatccataaaatgaatgatgtaagcagtaggaaacatatttcgggctcctttaatgcctgtcctacaaaatgctgacataacgtaggactgttaagcatgccttggggtaaaactctccattgatagcaagaaacaggttctttttgattaatagaaggcacagagaaggcaaatcgaggcttatccttcttgtgtaatggtatagtgaagaaacaatccttaagatgtattactacaagaagccaatctctaggaatgaccactggagttggcaaaccttgctgtaatggacccattggttcaatttgtgcattaactccaagcatgcagcagtcaccaccttccggacttttttggaataacaaacactggtgaattctgggggcttactgactcctctacatgtcctgtgtcctgttgttcttatactagctgctgaagttgtgtcagcttctcctgagataggggccattgatccacacatacgggtttgtcactggccattctaatggtaaggcagagggtggaggagaaatatcaatgaccctcatcagaaatcctgacgacctagccctcttctgttttttccagttattgatgttgggttagcttttcctcgtaggaatttccctaaacctttcccactctgatatcccatgtccttcaacattttaaattctgggttatcaaagttttcatttgtaagtctcatattccatgctgtaagtaagtctcgatcccataaattgattgccatatttgcaacataaggctgaaaagtacatggctgtccatccggaccaagacaaggtaaaatgtcagcactctgttgaacacttttagctgctcctactcccactagggatgtggaggttagtctgagagaccatactgggggtcagtccttactggatattactgacacttcagctcctctatccataagtcctatgggctatgggatgggatagatagacttcccttgtagttgtgctcccaaaccctttatttcctcgtttctcctttcatggagaaggatttaatttgcagggaataagcaacgaccgagcaatatattctcccagttcaaaaatgcaaagattttcgacattaaaactacttgaatttctccttcataaatggaatcaactattccagggactacagtcatgccttgcaagttaagggggcttttgcctaaaattagtcctatgtatcctgttggtaaatatccccaaatgccagtgggaaccttggtaggtttgtctcctccaactaatgtagttctttctctggtggggatatctaatcctgcacttcctggtgttcctgaggtgaggaacaccaggaatcaatgtttttcctgagacccatccctgaagtgggactgtggtctgaactggaaatgccctcattgtttgaggggcccgggtccaggcccccttctagtttcccgacatggggatgctgtttcgatgaaattttgagcagccctgattagcctagtgatttcctttgttacagtgaggacaaagtcctggtgtttttttccgctgggtggggcactgcatcgtaatgtcctttctgtcctgagatctggcggaattcctttttaaaatgtccagttttggctggacacggtggctcatgcctgtaatccaagcacgttgggaggccaaggtgggcggattacaaggtcaggagatcgagaccatcctggctaacatggtgaaaccccatctcttaaacaaatacaaaaaattagctgggtgtagtggcaggtgcctgtagtcccagctacttgggaggctgaggcaggagaatggcgtgaacctgggaggaggagcttgcagtgagccgaggttgcaccactgcactccagcctggacgacagagcgagactccatctcaaaaaaaaaaaaaagtacagtttttccacagttataacattttcccattttagggtttgacccttggttccttttagatttgtcaactgctaaattagccattgcttgcactaatattgtagagcgatgaagttcagttcccacatcttgacaagctctgagaaaatttcccaagttttttgtacacctcacaggtgccgatgcacgtttacaatctgcatttgcattctcaaaagctagagttaaggttagcatcactgcagctgcggtgtgataaatctgatgcttcattgccttctatagtcatgcaagaaattgtgcataaggttcttgcgacccttgcatgatatgtaaaaaggattgcactgggactccctcttctggaattgtggcccagtcacatttagcagcctgtgcacactgctggcatttgggagtgccatttgatgttccaggtctgaataagggccattacctaagagcatgtcctctgtaatgtctctgtgtccagccacacaattccgtctagccttgtctgcacacatttcttgccaatttaaattccatgtcaggtatgcactaggagacaaacaagtgtgagccaaattctttacattgaagggtagaaggcacacagcaccaaatacagatactagcaatcctaaagtgaacaggctctgtacaccattatttaccacactccttttaattccttcaacaacttaaactctagtggagtgtgttcatgaataagctgctatggattatttggatcaggccttacagaaataggaaaagtgcaaggtcctcagggctctccagctatggcagcagagtgtaaaattctctgtattggggtctctatttctgctaccgaaggaggcagtacagatgtttctgctattggaggaggtggtataggccaatttttatcctccttctcctgttttttattttcaattggagctgtgggtgggacaacagattttttcagatttttagactcagaacatcactcctgctgtccagcagaataagaaggagataatggcagaaggacagtatggactaaactccaagtggagaaaacggaaggatcaactttgagacctttttactgagcctgttttaatccttctgctctgtcccaattttccatatcaagagtgcctgtctgtgggaaccatgggttatgcataataacctcctgcagcattgtagttaatgtctgagatctaacctgagcaccagattatttcaacaaaactttaagcaactgcacataatgtttttcttcaatagacaaattctgcctcacgttaccctgattcagaaaacttcccgttcccaatacttctttagagcactgaccttatattgctcccagtacctctttagggcactgaccttatatcagctgccagcagactcatctcggggtccccactcgtcttgtcaaattcagttcctctgctccaccagatcttctttgttcacattctcatgtccctgtgtttagaaaccactatggtgtcgccctgtcgctgtttgaacatcactatgccatggaccctgttagactgaacataggaggatgaacgtggaaataaagacaaaagagtatatttggaagaaggggtcaggggcaccttgctctttgtgaataaaggccctgagccttgagcttccttcgtatttactgagaagagatagcaagaagggggtcattgtcggtctgctgcttgctccagagcagccttgcaagactgcattccttgaacaatagattctagatgtcccagtagataacctgaaggagctcagcgccagggagtgattgccctcagcaaaccttctggtggccagcacagaggagagtttgcccctgctctgtattcatgataaacagtttgctgtttgatcatattgcctcagtggaaattctgagttggtcatgattctccagcctccggctctctacactgaatggattcaacaagaaagtggttgaatttatgcaactgtctagttatttataatgaaacaagcaaaaattaaccataaagaagtgaattgggtgatgattgtataaaagatgtgagtctaggccaggcatggtggctctcgcctgtaatcccagcaatttgggaggctgaggcgggcagatcatgaggtcagaaaatcgagaccatcctggctaacacggtgaaaaccagtctctattaaaaaaatacaaaaaaattagccaggcgcagtgtcaggcacctgtagtcccagctactcgggaggctgaggcaggagaatggcatgaacccggaggcagagctggcagtgagccgagattgtgccactgcactccagcctgggtgacagagtgagactccatctcaaaaaaacaaaacaaaacaaaacaaaacaaaaagatgtgagtctagacttttcagaaagagcacagtgtgaaccagtgctctcaacctcagcactattgacattttggaccaggtaattctttgttggtgatggaggctgttgtgtacattgcaggttctctagaagtgtccctgacttctactcattaaatatcagaagaaatccctgttgtgacaaccaaaaattcctccaaacattgccacatgttccccaagggtgatgggagggaagggaggggtggtgaactatccctgggtaagaaccatgggtgtgaaccatctgaaaaaatctgtgttgaacaagccactattagttatggagcagctgagaattactttgaaaaacatctgttgaaaatcttggtcctacagaaaatgaaaatgttgtagaattctggtcccaatacagtgctatgtttccagaaaatgaacttgtggagaaccaagatttactgatttccttgcctttataatcagtcatcaaatcatatcatttatcttccatagcatcttctttcttaatttctgtgccactggtccactaattatctgtagtaatgaatcacaaccagagccattttattcccatttaatgcccgaactaactcatttctctcagtctcccactcccaataatactagcaggcatcaaatttccagccttggcctgaggtagaactctcggttttgtagtcaattcccctcagaaagggagaaatcaagaaaatgacattctcatacagacagtttgcaaaaatgagcaggtcccagactttgagtacgacctttgcaaagctctctttgccctttagaaacgatgccctggatcaaaaacgtctgtctttttattcttaaattatctaagcactttctttacagacagaaagttaaaaaataaacatgtgtgaagtcgctgtcactgtggtttgcatgactagcactgtaatccatgctcatgtgtcccagttagggtcaaaaggtttggcaaataaaaccagaggatgcccacttaaatttggatttccaataaattatggtgtgtatctgaaattcagatttaactaggaacctgtattttatttggcagcctcaggccaacttgctagtcaaacctcagaacaaggagtgatttaatacttccttgtgttcttcaacacatgcccaggataggcatatagaacttttaaaatgataaatgcaaaatgaatgaaagtttctcctatacattggaactagcagcccttgcatctctgctcccacttcaagaaacaacctgatacatatgaatatcaggaattctgtcaataattcagacacaatctggtcactactcactaataatgggcagactctcaatctctagaatcagagaatctgaatagaaacataatctcttctacttgggtcaatttttactaaccaaagcctttttgtaatctatcaaatgcatttaataatagcatcatcttcacaggattatttttaagtgtaaaattaaataatgacttcttagcactgaccacataataaacactcaaaaatattttcattttaattttttatgatccctttaactgcagctcacattatttttcttattccttgattctaaagcaattagtatcttcatcatgattttgcaattgttttctgttcttctattagtttcataaagaattgtcattctgaaaacatagggcagaaacactagcttatgtctaataatgcagtatacctaaacaaacctcacacaaaaggcatctgctgacataggagaaagggactttctacatgctcagatttaaactgcaatctgatttctagcactacatttgggatactgggttttacttatatcttctcaattttagattccagagatgtatatgtttttaaacaccacagataaaataggatcattattgaaattgtatactgaaaatcaaaggcctggtacacagtcactgcaaaatgttatatggcatgtactgatggagaccagattcattttattcatcactccattctcatgacttagagcagtagctggcatattctaagtcactaataaatatgggttgtgtgaaatattggctgtgtgatgttttgcatgaacattcaccactgcacacagggaccctctcgtatttccttgctaatgatgactgagcatctctggttcacagatcctcctgcttctcttcagcctctttagccttttcctttagattcagctggcttcctgaacccagagcgcagtccttccctgaagctctctactcagaacagtcaaccttaacctcatcctcacttctatttgctcttcaaatggtccaatccattttccatcctggatactccattgactgcaaataccaactccagcaaacccagcacttgcttctctctcacattctcacttcacccacttaatgatactcattggcttctccccgcttcttgaaaaaaatctgttttccttgacttacaagcattatgttctcttggtttttctcctacatccctggggctccctctctgtcccctttgctggcctgtgccttcttcttttttctacacacaagctattaccctatgtatcctcttccactccctggaatttaacagagtacacgtattgatgccatcaacataaatacttccagccctggactcaccgtgagtctcttaaattccattgaccttctgattgttccacataaacgtcaataaatcatttccaaccacccacttcaaataatttcctcccacagttttccctatctcaataaacaacaccaccatccgcttatttgtcaagacaaaatccttagaaataagcttgattgttctatcccctttacagtaatccattaacaagctgagcaaattacatgccgagtctatccacttcatctttttcactgtctttgtcactaatgcacaccaggaagccatgagcctgttttccctgaggattccctgctgtgctcctaaatagtcttcctgaccacttgtgaaccccagcgattcaatccccacaaagtaactagaattagttttaaaaattgaatataaatggactctccttgtaaccatgcagtagcttcccatatctgtttaaataaaattaaaatttcttactaagaacatcagggcctaatatgatgaggctcctgacttcctctctgcatcctacctcatcttctgcctctccattttcttgcttcctataggtcagcccctctagccttctttctgtccctgcacataatttcccacaccaggatttcccccacattttgtctccctggaacttttgtcccttagatcctcatgagtgtctacttattttgttgtctcagctgaatgtcactttctcagatagagctgcctaagcatatgaaccaaagttgggtggatccaattctctctttccacaaacctgatgtcttttcttccgtgcacgatgactgtctgaaattttcttctttgttaaatgattattgggttattgtctatctcctctatgattgcgtaagttccatgagtagggaccagtccactgtatctcactcaaatagaatgatttgaacctagaagggagcccagtacacagtagctgctgataaaaataagtgtggtttatattaataaaccagggttctgggaactgatcactgtttggatcctggaaagcaagaaggggctcaagctccagcactctttcattttgatgtcatactagaccccttctcttccctgtgagaaatacaggcacacgactactttctcctccttctagttggatgaattcacagataaggaaacagtaattttttttctcttttttttttatttttgggatggagtctagctctgtcgccaggctggagtgcagtggcgtgatctgggctcactgcaacctccgcttcccggattcaagtgattctcctgcctcagcctcctgagtagctgggattacaggcatgtgctaccatgcccagctaatttttttatttttagtaaagacgggtttcaccatgttggccaggatggtcttgatttcctggcctcatgatctgcccatttcagcatcccaaagtgctgggattacaggcatgagccactgagcctggccaaggaaacagtaattttaagaaaaaagaatttttttttaaattaagattcatctctttccggctgggcatgttggctctcatctgtaatcctagcatgttgggaggcaggaggatcgcttgagcccaggagtataagaccagcctgggcaatatagcaaaatgcagtctctaccaaaattacaataattagctgggtgtggtttcctgcctgtagtcccagctactctggaggctgaggagggaggatcacttgagctttggcggcagaggttgcagtgagcctctatcataccactacactacagcctgggtgacagagccaggccctgtctcaaaaaaagaagaaattatctcttgtgatgaacctcatagtgctctaggtctgtgcaagctttaaggatttcgggaaataatgacaacatagctggggaaaaatagagagaaactggaggaagaggtaagtggacatggctaattaagaaaagctgacggcatgatgggtgaacctatgaaatttaggacaagacccgagtaggacaatgagttcccaggacttgctcattgactttcagccctatgagatgtgaacaatgtccacattgtctcggtaactccactcagagtatatagtttgaaccttagcaaatttctgatatttcactatttttgacttacaaaaatataatttcatataatttatcctacattcattgaatctcttcttgtggagtctagttagagcatataggagatgtaggagaagctagtatagaaaggttaaaagagattcataataaacactaacctgggccaggttttcagaggatgccttaagttctttaggcaccaaagaacaccccatagatgttctttgtctgtagggtgataccaagtactaaagatcttggcttcagctccacggatttttccccataagaaagaaagagcactaagtataacttttgtcagagaacctacataagctacagggatacaggctttataaagactggacttcagaaagaaacgaaagtagataatggggaggccactgggtacatcttcacttatgaggaagaggggccaacaccacaggtcctgtggaggacataacacaggatcatctaggagagaccctttgaattcccttgactctcacaaaattttcagaaaaaaacctccttttgtctgacttaagtcaacataataaagggaagtgctgtatggggaatttattttagcatccttatttctaaatcctctaaagaccctgaggacatgtgatgcaaagttttattggtagagatttgagaagaaatgacctgtatggaggcccttaaacaagtctcatggagagggcaagtagccaagctccttttgtggaggaagtaatttgggatccatgtgataaagatgggcaatccctgtggaaaacgttacaaattcttaagggacatggactgggcacagtgacaaatttaggtccctactttaccccccttatggtagctcagcaaccgcagtgtgcacttaggtcgggtgtccccagccaaagccagtggggagctcagcaccatcagtgtcactgtcagcgctgccatgcaggagcctccagggagcctcaaacacaccatgctggagaacaggacaggaccaggtgccagggtagcaggcaagtctcacattcacggagaactatgacctccctctactcacatccccaacacagggagtaaggtactaatttctttgctcctgggttgcgtaatctcgtgttggagaaccaatcagcatctgagttcaatagcatcatcagttgctggtcagagatgcagtatgaaggtcctcttctgaaacaatttccttctttaaatgattgttttaatttagtacttggaaggttggaaccagttgcatggaaaacactttaactgggtccttattgttagccagctctgtgctggtcagtgatgtgttcacaagtttgagccttgtaagagcattcatttcccacttgacaagacaactgtttgcagaagtgagtgtgtgagtgtgtttaggagtaaaggagatgaagggaacatggttgtaaatccggagacctgtaatctagtccttattgcaccatatcttaatgtcatagatttgggaaaattacttcatgtctcacagttgatacgaaggcactgcgatctttcaggtctttcaatactggaaaatgctgtgattctgtggacgcctcaagtagcaacagcccctgtgtatctgatgatatgacagaatgacagctgttaactggagagggtattctgtacctatttccaggtagggatgtctttaataagttaaaggaaatggaaagtttgttaataatttaatctcagtaaaaggttgttttcaagtgtgtctcctgatgctgcccccaagtttagtggcacctccagaacacacacaggaaggggcttgcagggaccacctatgtgcaatggagggtctgaaggtgcctttgtatagcacttaccctaacaatgtgataaggtcaactgggcaatcgaagtattcaggggtctgagagattgatcaaggactcaaagtcagctgttgacagaacaacactgctgtaaaataattaatattttatgtgaagagtgttcaatccctcatcctggttccaattaggatttcctcatttgattgaggttatggccctttactattatgcttcttttgatttatcataaggaaagatataagaagactgtgctaactaatatgttacagaatgttcaggaaagagaaccctagggaaaaactatgaattacatcagctgatgtaatcatgtaattttaaacatataattctacatttagataattattatgctttatattaatataaatgtgacatctaagattcagaatggacttcaaagtacaactatacatataaagctctgcattaattcacactgtaccacagttgagataggcactccttccttatgtgccttagtgtttccaggagcaggattctcaccatgctgcaataaaaatgagcatttgactttgtactcagaattgtactaaaagctttatatgcttcatatttttatttaattctcacatcagctcagtaaaataaacaccgttttcatgcttacaggtggagagactaaaacgatggaaataaaacaaattttgccaagatacactagtaaacagtacactatagattgagccaaattatatacctctcaagctcagccattagatcatactccttcagaaagaaggggaaaagcaaaagcaaaagaaaaaagaaacaaatttgtgaaaaaaagaaactaattgtgatagtagtaatccaggaaatccagctaaggttcatgttagtatttcaggataaaagggtggtgatgctggcggtggcgagctgtccagagtggccggctgctgcgggaagttgcaagcggtggcggcaggagccactgagggagtagtggccgtggtgggacccttgtgccccatatcccctgtgcctcgcgtcactgaggcagctgactgcactgaccccactcttgagcagccagcaggaccgcccccaggcccagagccttcaccactcctgcgttgctgctctcgccctgcagttgtggggagggcatggagctggggccacccttcagtgacccggggtgggacgtgggagtggcctcactttgaggacccggccagcggcaaggccgctgtcccgccctgccaagggcgcccagttcctgcgcctcaggaagaggctctgcttgaggccgtccagggttttgtccccgcgggtggccacccagcctgatgctcctgacagccaggcccgggctgtgatctgttccccaaggtgcctcccccgccccatccaggcgagaaggagccccgggcaccctgagtgctagcagaataacttgcagagacatcacccttgccccacatgctggcctgcgcccagcgaggggagctgcccaccccaggctgccagaaggtgtgacgggggatacctgcaggctccacggaatgggttggaaaccccaccctcccggccctccccgcaggcagtaggatccaggcctctctacactccactccctcaagactgagaaggccctcctgtccatgcaggcttgggggtgtctgttcccactttctggcccctcccttggcctcacccgggtcccaggtgcccactctgatctcagagtggagttggggcagagccccagtgctgtcacagactggctgggtgtgtgcacgctcagggaagtgttgacacaccagccttttgccacctcagtcacagggaagccaagggaagatgggcatgtaatatttgaagtaagtttcttatagggagcatgttgaagagtcattgcttttcactctggcatttgtctttttacacactttacatgtaatgcagttattaatatgtgagctcttatgactgccatctgctttttgttttcttttttgtttcctttgggtttttcttctctggtttctttcctgttttccaatgtgttccttaagcaatttttagaattccatttttaaatcaatctttttttggtgtatctcattgtatagtttttgtgatttatctgtctgttaacataacttatcatagtctactggtgctgacattttaccagtttgactaaagtgtggaaactttacctcctttatatccctttccacttctgcatgtgtaatatgtatgttttattttctctacttgcatcaaaaccacatctgtcaatgttgtaatttttgcctcaaccatcaagttaatttacaaaactgaagaagtctgttgtatctaaccatatttttactcatttgctgtttacttttttcccaattgtccaagatttcttccattatcatttctattccagttaaagcacttcctttagcccttgttttaacataagtctcctagcatgaaattctcttgattttccttcctttaagtatgtcatggccaggcgcagtggctcacgcctgtaatcccagcactttggaaggccaaggcaggcggatcccatgagctcaggaatccgagacaagcctgggcaacatggcaaaaccctgtctctgccaaaaatacaaaaaattagccaggcgtggtggtgtgtgtctgtaattccagctactcaggaggctgaggtgtgaggatcacatgagcctgggaggcaaaggctgcagtgagccatggtcgcgccactgcactctagcctgagtttttttttttagatggatcaaaactccatctaaaaaacaaaaaacaaacaaaaaaagaaaagtaaaagaaaaaaaaaagtcatgatagaacattttataataatgtttttactggatatacattctaggttaacattcctttcagccattaaaatatcttgtgccacttctgtctggtctgcctgatttctaatgagcaatccactgtcatttaatttattttcttctgtgcatgagatgtcctttctctcttgttgctttcgagattttttttggcataaatttctttggatttattttcatttgggtttgcacagattcttgaatttttacatttaagcctttgtccaaatttggaaagtagtcagtcttccttcaagcactctttgggcatcacccatttgtcatttccctctaagactccagtaacacaaatttcataccttttgttataatcttacagatttatcagtatgaaatcatactaaatattatgaaaaactttacaaaataaatatgcatgtaataaataattcaaaatgtacaatgtactgtgcatgtaatgaataaattattcaaaatgtacaatgtactgaagctgacaaatatcataaaataggaagatttccacatctcatagagaaagtaagtccattctataaagctttcccaagacaaaaccccaggttcatctagcttcaataactacttaaaaatatttaaggaacaaacaacattaactttatacaaacttcaaacatatttggaaaaaggaaaagcacttgcaattacgtttgatgagatctgtgtaaactttacttcaagacttgaacggatctctacaacgaataggaattaagagaccaataactcttatgagccaagttcttaaggaaatattagccaagtgaattcagtgatatatggctactacatcatgaccaagtggaggttattccagaaatgtaaggttgtttgagcatttgagaatcaattagtgtgattcatgacattaactgaaggaaggagaatacacatgcaaccaactggatagagtcatgaaatacgatttgacagaattcagcacttggccttaattttcccccactttcgctgtgctcctgctctcaccatgtgatacccaggctcccctttccttcccccatgattgttagtttcctgaggccctcaccagaagcaattgccagcaccacacctcctgtacagcctgcagaaccctgagccagtgaaacctcttttctttatgaattacccagctccaggtatttctttctggcaatgtaagaatggactaacataattatgctctatcatgaacaaatagaaaacaaaaccaagaaaataattttatcaacttcctcacctctttgcttttttcttctacttttttcaacttaaatttgcttctttttattattaaaagtttacacctttgatttttacatatttatccttttataatacaggcatttaaaactaaatatttttctctaaggactgccttggttgcatctcgaaaatttttaaaattcattttaatattattttatttaaaattattttctaatttccttctgatttcctctttgacaagccataaattatttagaaatgtattattttagttccaaaaatttaggcagttttctcaatcttactaatttgtaatttgataagattgtgttcagagaatatactctgtatgattttattcttgtaaaagtactgagtctagttctatagtcatagtatttgttctatttcatgaattatctttgtgcaatgcaaataaataaatattttgtagttatcagatgttgtcaatttatgtcaattataaatgccaactaagtcaagatggttgaaagtattgttcctatcttgatttccttcctgatctttgcatgaagctagagagatgtttgttgtcttctgtctacgtccctagttcccacacaaccagcatgaagtcagaaaaagttctggaaagagaatcagctgacagggtaaagtagatatgtattattcaggggccctctatagattgtaatgcatcacacaagcccacggggctatttacaactcagctggtttgtccttgctctctcacaatctccctttctcagccaggcttaatcttccacccatgttaagattcagtagatggaccaaagaatgagagtggacacttgtccctgctcacctaagtgggatttgttcatctctggaatttggaatttttatactttttgatccacggctggttaaaattttaaaaataagattattttccagtttatccatttagtttagtctatatatctttttgctcttatagtaacagtgacaattcttataattttccacctcctcactgcattgtggtttaatattttttccaatctatgttgatagtcctacataatttacttaaagccctgaatatttttcctttgtatggctataccacagtttacctttcttatatctaaatgtagagaatgtttcttttctcccctgttacattttttttatgtcatcatggatatatgaggaagaatttactgagactgtaacaacctagagtggaaatactgtattatccaaactactcacagggttacaccaatatatgctcaccgtgccccatacagcaccagatgtcatcctgcagtgtgctgtcacttcgcatgctgcatagtttttaggatgtacaaaatttttataatcaagacaaattaatcagtttttctttttgaatctggaaatgtttttgttattccaaaccgtggctcaacaaactaccaattttatgtctccttgggctcatgtaggattgttctttaagacggatgttaaaatgagatttttgttgttttcatcagcatataataactgtattttgagttttaatagacactactacactgccataactcaaaatcctaataatatgagagagtctattcccttagaatcttgattttaaaacaaactattgtacttgtcaattgtggagtgggagaaatagtttattacactgctgtttgaatttggatttttctgttcattggtgcgtttgagcaaatatttatatttatcggctattagaatattctcttctatagtgagtctatatcctttgcccaattatctatggcatttccatgaatttatttattgattagttaacaatttttctaagaaagttagcccattgtctgccttacatgatcaaatttttcctgagcgtcatatacttcttttaattttgttattttcttcatgcaaataaatcagtaatcttcttcaaatattttttcatttgtatcttttggattttatcttgcttacaaagtcttattttttaaaaaagaattattttaacacgcttactaaagcataatttacatactacaaaattcactcattgtgtcacagctacggtttggaatactacaaaattcactcactgtatatgtaaaattgaatgatttgagtaaattaatagatttgtgcaattatcacaacaatccatttttagaacatttctgtcatgtcccaaatttctctatttatagttaagtcccactgagaccccaaaccctaggcacccagtgatctgcttttgtgtctataaatttaccttttctagatatttcaagtaaatgaaatcatatgacatgtaatctttcgtgtccaatttctttcacttagctaacattattgaagttcacaagttttgtagtatgtatcatcattttgtgttttcatttctttttgtcttttttcatgtgtgtaaatttataaggtacaagtgtagttttggtacctgcatagattgcatagtggtgaagtcggtgtttccacagtatccatcactcaaatcacatgcattgtatccattaagtaatgtctcatcatccggagtgcaagggtggaaacttgctttgggaaaactaccgtgatgttcatggtatctccgctgccagatgagtctagttttgcccccttttattgttgaatgacattgccttgcctggatgtagttgaattttgtttatctatttactagttgaaggatatttggattgttttcagttttggcctactatggctaaggctgttctgaaccctaacatatatctttgtgaggacatacgtttttatgtctcttaggtagattccaaggaatgagattgctgggtcataaggcaaacatatgttaaactatttaagaaattgccaaattatcaggtatttgtaaactcatatactcccaccagcaacgcataagggtttagaaagtctatttgtcttcaaacataattataatgatgatgacagtattagaaataacatctgtcttggtaattttatattttctctttatgtttcaagttttatttatccaggatctatttagtgaaagaaatgagtttggaatacaacttacaaaaactgaaactaaatctcaactctttctgtttctaattgtagactctgttttattaacatatttaattaaaaaaatcagtaacaaatgcatttctaaaagtaaatgtatagtgtgttttagtgccttacagagctattcattccttattctactttttttcaataatttccctggaaaatacatttacctcataaaataacatgtcagaatacttaattgagttctaaaaacaatcctatttgcttgcttttttgttctattgtaattgagttaatggctgacatttaataactctctctatatgtgtgtgtgtatatatatgtgtatatatgtgtgtgtatacatatatatacacacatatatatttgcatatgtatgtgtgtgtatatatatgtatacacacacacatatatacacacacagatatatatatatatacacatatatatatatatatatatgcacacacacatatatatatatatataaagacccaaaaccctgaattgagggtgcctgtcaggaatctataggccttcgtgtggaagttaactcaaatacttacgacctgatagtaccacaatctatcatttccctaccctgaaatcaatttctgctactccagccaccatttctttatttttaaaaatatttgattttgctccttttcttcccatgtgcatcaggccgactctgcaaaggttgcatcctggcttgtctgagcccgtgtgatcccacagtcgttccaatgcatgagaaagtgggtactgggaacaatctggaaacagtttagttgctccttctaaaggcacacaggagaaagaagtatccttttcctgcctttgggagttgttgtgaatgaataacaaacctaaagctgctgcaggggtcaccctaccatctcaggaaagctgagatactgtgtgtgatagagagatgagctatgaagttccaggattgctggtgatgccactggcctgctgagttgagcaaccctgaagacgcccagtcttggatctatcagctatgtgagataatgggttaaagaaaaataaagcccactagatgtaatttcctgttattagcagcagaaggcatcttcattgaaatattcattccacacattttggttctaccttgtaattccacaccacgagtctcatataaaatgagaaaatcatttcctcaacttaggaaatgaggtctctttgttgcatctctgtgatcaaacagaacagacataattatcagcttaatatatttctataggatttatactcttacaggatttatatgtacttgtactgctacttatgtacaagtaacatataactaaaaataaaatatgcataaaaacttttgattgaaaataaaataacagtcgtctctgtcagtggagaaattatgctcaaatgattattactttgaaatagacctctgaattatgtacttttatatttgacatttcatactgactctcaggtagaacataatggagactccattctccgtcttctaaatgtgtctttctctgaaatctgtacaggtcctttgataacactatattattgaagtctctggagtgaaacactatacactaatttacagttataaatacaaaatattgtagatggggtgaagacttctgattgacttgctggctggtttctcatctggtttgccaagtttgtttcagttgttatagtctgttctcagtttttatgcactgcctttttaaatgttagcattacttttttaattgacaagtaaaaattgtatagcatatttatgtggaagcatgaagttttgttatatgcctatagtgtggaatgactaaatcatggtatttaacatatacattacctcacatactcatgacacacacgtgaaaatcattattctgttaggaaataatcttccctttttcttttcttttcttttcattttttgtctttggagccaaatggaccagatgatatttaactccatctttgagaaacatttaataatgtaatgtgtttgtggtacagggtgagtacagatgcacaggaggccatagggtttaggcaaaggggagcacaaaagttgaagatgaggcgctgccatcaatgctgggacttcaggccaagggcaggaactgaggaagccacaagggaggacattttctgcagttgctgaaccagtagcaactaggtcctgagaaagccctctctcgtggaagaataacagccaggcgggaaagcttttcatcctgcaaagctggggcagaagattcttccttaaattgtcatctgcacttcagctcaggaatcctgcaaaagacagaggagagtgttgttttcaacctggctctactaacgtttctttccccctctttgaaggactcagatgagaacactgcaggaagaagaaaaacaagttcctgagtctcccagagccaatagtcctgcagagcacaggccttttctaagtggagaggaggagttttggtgtaaattgcctgatcagaaatttggatccaaagtctttcctattatttctgtctcatgccttatcacctctaccatcattctagtgtgtcctgagtttgttccttccggtaggttcagggtctggctgacttcaagagtgaagccacagacccttgcagtgagtgttatagctcttaaaggtggcacggacccaaagagtgagcacaagatttattgtgaagatcaaaagaacaaaacttccacagcatagaaaaggacctaagcaggttgcaggtgctggctagggtgaccagcttttattcccttatttgtccccgcccgtatcctgctgattggtccattttaaagagtgctgattggtccattttacagagtgtggattggtccattttacagagtgctgattggtccatcttacaaacatctagcgagccacagagtgtcaatttttacagagcactcattggtgtgtttttacagagcactcattggtgcatttagaaacctcttgtaagacagaaaagttctccaagtccccacccaacccagaagtccagctggcttcacctctcactggagaaactgaatctgtgtctaaaagaggattaaaaggtattacctgttggctgaagtccagagtgtcctgggaaaaagaggaaaagatatacacttaaaagatattgaagcaaatctgtcctccaacacaatatcacagtcccagatctcccaccggagagttctaacaccaaaacccacaccaaccagggcagagaggagcagaaacagaccatgtgacccatgaagcatgaagtgtctgtcacaggatccagtgtaattccattaactttagtggctcttccttaatttgctccaagatctcaaaccaaaggacccctacttgttaaccttcctcttgtctctgcaggccacaagctattatgctttcacatagtaaccatgcactgatgatttctggattagcaggacattagagccgtttggggaaagaaaggctttattcagagccactcatatactgagaactaacctcagcaaagctctatttcctcctgcagaaaagcctatggaaaggcccagctaccaaaggctcctcacctttctgattcctgaagtagatgaacagcccggccccaaggaagagcaggcccagcacaaagcccccgactccactcagcatcttgctctgtgcagattcagaccgtgctcctgagagaggaagccaggtttagtgatgcttattccaaattgaacctctttaattgagactctaagattcagagctttgaaaatggggaagaaggctgccccacaagaactaaaataactagccattttgggagaaaaaaaggatttcaaatcacactgaacagttacaaggttccgacatcaaactcattcaaatattacagccttgatgtaaggcaagcgttcaacatctgatccacagaaagcctgagactcagtgaggctaagtagtttgtctagagtgacagagctaataaaaggcagagctgagattggactcccctcatgtcaggtaggcccctatgcttcccctcttcccagatcaaaacaagtaactcagagcagcagcaccagaaactcagtctcagacccagaagcagggcctggagcttggggagatcgggtgaccctgacctgtgacatcatggggaggttcaaaaaaaaaaaaagcatgactgattccacagggagtacaggtgtttctacacactgttacagggctatccccagtgacctgtgctgatggagatgagaacatggagcaaatgaaaataggacgtgggagaggagaaacctgacactcagggattagcacagtccccttcttggtgggtgagaaatgtatgaaatcagaaagctgctcactccattccactgtgagagcgctcgttacgcttgggtgctccacttggcaagtgtaaacctctccactccgaggaactgtttctagcatcaccagggtctggaaggtccagtctccattctggatcaggcccgtggacaccaccccagccttctcttcctggccgttccggaaccacctgacttcaatgctgcctggatagaaaccactcacagagcagaccaggaggttgtggtgctgcaggggctgggtctttgcaggatacacagtcacctgaggatggactaggagaaaaaaaggtagagggaatgagtcaggaagacagagtaattctgctggtttggctgtttgtctgcttctctgcaaacccaggctctgaccttgaccaggcctccagcacagctggccatgtggccttacagtgtcatcagcctggaatttaatcttgatagtgaggacccattagatttgagagatgtgaaaaattgcgtttgcttcttcataacttgaaattggcatgcattgtcaaagtgtttacaaatttttgaaagtacagagtgtagtaattaaaactgatacctgagccaggttgcatggttcaaatccaaggtctgccttttactggttgatcctggaagagttgattcttctgtgtctcaactttgtcacccccaatgaaggataattatactaatttacctcttggggttatatgaggattaatttatgtaaaatacataatgactgaagatagccttcaatttatgagatcagaaagcttctcactccattccaccgtaagggggctcatcacacttgggtgctccacttggcacctatttatcatccttgtacaccgtgacagaaaaatatgatttaaagcaatgtacatagacaaagggacagagttgggtacatgagaaaaccgagtatgaatttttaggaatactactgccatgcactcacaccttagaacaccacagaaatggttctgcccctgggaaggtgggacagacagaaatgattctccaaatttttacgttcctagaaaagcatgagtcctaaagcagacagaaggatttaggagcgtcattttagttttgaaagttcttatattttcattcagctgctcaatgtatcccccgtgcaacacaagcagaattattatcaggccaattgtaaaatgatttttctttccagaatcacatttggattaaggcagggtctggaactcattacttgtggtgcttatgcccaggaaaatccccgacattagcatactctcaataaatacaatgtttttagaagtaaggagaaacctagagacaaaaataccacaaaatggcagatttaagatggattgtaaatcattaataaaatttttgcaatacattttattaaataaaaatgttcaaattcttaacatggaaaagaattttcaaaatcaacatacaaaccacaaactggagcaaatgctgaatcaaatatcaataaagtgttaataatcttacagtacaaagaacccacaaagtcactgagaaaaatactaagccctagagatattaggcagtagatcattgtccattacctaccaaataaaatagggaattcttagagcagttattaaaattgaccaataaatcggtcaaaataattcaaaagaactcttttgaatgaaaaacagacctctccacattttttcaaatgaaaaaatataaattaaaaattaaccagaaacatacattttcaacttttggtgaatgtcataataaaggtcaacaaaggggaaagtgatccctaagttgtgtcacaactattatatataaaagaataatatgtaactactagaaaactattagcattataataatacagtaactgtgttaaaactttaattcaaaagttagtttcactgtcatttctactatgtaaaaatatacacactagaaaaacaaaaaactagcaagaaatttatacctaaagaagtttcagaggtgccttagaggtctactcaattcccctagaacttaatctaatgcttttacaaacagcacgcacttttatttcagagattacatgaagggtgtgtgccagggacagtctggaaccggcctcctcacattatcccaaaccttccttacccctcagctctcctcccctaaaccttcaccccacccacacacaccttacactttccttccctgcatctctaaggacccaggacaatcaaggtctcctctctctccagccgcccgcacccacctcccttgtcacctctccacagaagtctccaaggataagaagcagccccctcctgcttcccctcccacaacaggcacacagacacagaccaatccacactctacacacacacctgtgccttcataactgcttgctcgggattgagaggattctaaatgctcacagatggcgcgctccctctctctgtctcttcctctctctctctctctctcacacacacacacacacacacacacacactctctctcagatttccagctcacagggacccaggccccgccccccgacatgctcacctcgccgctgcactgtgaagctctcaccaaccccgtagttgtgtctgcagtaattgtccacccggccccgcttctgctccaggaggtccttctggctgttccaggactcggcgacaggccgccccagctccgtcaccgcccggtactcccccacgtcgctgtcgaagcgcaggaactcctcctggttatggaagtatctgtccaggtaccgcacccgctccgtcccattgaagaaatgacactcagacttacgcagctccaagaaacgtgctgcgggtacacgaaggatccggtcacacgggcggcctcctgagaagacactgacagcgacgccgccatccggggctccctgggtggggtgcgggcactgggaaccttaaccggccccacccgcaacgcccaccacctgcagcccaggagctcatcctccgttttcctcaggcgaacgggggcctaggggactatgcgggaaaaccccttctcatccccaggcttttgggaccccctccctgcctccagcttgttctggagacctccaagcaggagctggaggaggatccgccccgcaccgcagcccgccccgcctcctcctaggagcctccaccccaaagacactctgctccttctctcatcccacatgtttaccggttccttaaacagcacccaccgcgttcatcctgtgaacactttcttagtgatgaccttgtgccaggcctgcgctgcctctaggaatccaaacaagggaaaacagacctctccactccgctgggggagcttaaagagcagtgaaagcgatggccaaaaaccagacacacaagaggttagacaggaatgagaaatcccggaagtgggaagttctagagcagagaataataggatgatctcaattacattagggtgccagagaaggaccctctgaagagtgacagttcagatgtgacttgacaggttaagcaggtgtgagccagggggcagagtggagcccgtgtctgtttggacaaaacgggaggcacatttcaggtttaggaaatcccatgtacaaaagcttgaattgatgaacttcttcaaaaaactaggagaaagttcactaaagcagagaggctgaggggaaggagggtaaaaggttagcctggagaaatcacaagaagccaggtattgaaagcctcgtgggtggcgttaggattttggatttatagtaagacaatggtaaagtatcgaagagtttaaaggacaataaaaccatgatccctgtaaatgtccacaaactttcctttgcatttctaaattcacaaagctcagaaattcagtttaaaaaacttgtttccacaactcatttggcaaatcgcatctgataagggtaagtggtcaaaggtgtctcagagctcttattggcgacatgtgcttctgtagtttccatacatataaacatacatacatatatgtgtgaaaatagacacatatgtaaaacacagtatatatttttgatgtttttgtctttatgtttgaagtgtgaaaacgacaaaaataacttaaaaataatccttgggtaaaagtgaaatgagtacatagaagcattttacattgtgaataatatcaaatgtagaatcactacagaaatctgaggcatgttactgagaaataatttcagcagcatcactatttgtgacttacaagagcaagttgttggaagttaatagagatggtgatgaccaacaactcatgaaaatgttgaaaaatattgcataaggcaaaaactaaatatgaaaatattaagcttgcattgactaagtggattcaacaagaaagtggttgaatttatgcaactgtctaatttttttataatggaacaagcaaaaataaactataaaaaacaactgtgtggtgagtgtataacagatgtgagtgtagaattttcaaaaagagcacagcgtgaaccagtgctctcagcctcagcactattgacattttggaccagataattctttgttgatggcggaggctgttctgaacattgtaggttctctagcagtgttcctggcttctactcattaaatatcagaagaaacccctgttgtgacaaccaaaaattgttccaaacattgtcactgttccccaaggatgatgggagggaagggaggggtggtgaactatccctgggtaagaactacaggtgtgaaccatctgaaaaaatctgtgttgaacaagctactattagttatggagcagctgagaattgtattgaaaaatatttcttgaaaatcttggtcctaggtaaaaagaatgttttgtagaattctggtcccaatacagtgctatcttttcagaaaatgaacttgatgagaaccaagatttaatgatttccttgccttaccaagcagtcactaatcatatcatttatcattcacatcatcttttttcttaatttctccgccactggtccactaattatctatagtaatgaatcacaaccacagctattttattcccattaaatgccccaactaactcatttctctcagtctcccactcccaacaatgctagcaggcatcacatttccagccttggccagaggcagaactcttggttttgtagtcaagtcccctcagaaagggagaaaccaagaaaatgacattctgatacagacagtttcaaaacatgagcaggtccccagactgtgagcaagacctgcagaaatctccctttgccctttagaaacgatggcagagaggtgtccaccctggatcaaacaatgtctatctttttatccctaaattatctaagcactttcttacagagagaaagttaaaatgtaaacatgtgtaaagttgctgtcactgtggcttgcatgggtagcactgtaatccatgtccatgtgtcccacttagggttgacagatttggcaaataaaaccagagggtacccaattaaatttggatttccaataaattatggtcgtgtatctgaaatttagatttaactaggaacatgtgttttatttggtaactcttgcccaatttgctagtcaaacctcagaagaaggagtgatttaatacttccttgtgtttgtcaacgcatgaccattatagacatactgaacttttaaaatgataaatgcaaaatcattgaaagtttctcctatacattggaattagcagcccttgcatctctgtccccactcaaagaaacaacctggtatatatgaatatcagaaattctgtcaataattcagacacaatatagtcactactcactaatgatggaaaaactctcaaaccctacaatcagaaaatctgaataaaaaggtgacctcttctacttgggtcaatttttaccaaccgtaagcctttttgtaatatatcaaatgcatttaataatagcataatcctcacaggattactgttaagtgtaaaattaaatgatgactcttcttagcactgatcacataataaacactcaaatacattcccattttaacttttatgatccctataactgtagctcacattattttttgtattccttaattctaaagcaattagtatcttcatgattttgcaattgtcttctgttcttctatgagtttcataaagaattgtcattctgaaaacatagggcagaaacactggtttatgtctaataatgtagtatacctaaacctcacataaaaggcatctgctgacatagaagaaagggactttctatatgctcagatttaaactgcaatctgatttccagcactaaatttctaatactgggttttacttataacctctcaattttagattccagagatgtatatgtttttaaataccacagatacagcaggatcattattgaaattgcatacagaaattcacaggcctggtacacagtcactgcaaactgttacatggcatatactgatggcgagcggattcattttatttatcaccactctcatgacctagagtaataactggtatattctatgtcactaataaatattggctctgtgaaatactggctgtgttaaatattggctgtgtgaccttttgcatgagtagtcaccactgcacacaggggctctccagtatttccttgctaatgactgagcatctcttgttcacaggtcttcctccgtctctttagcttctttagccttttcctttagattcagcgggctccctgaacccagagcacagtccttcccgaagttctactcaaaacagtcaaccttaacctcgtcctcacttctactcactcttcaaatagtccaatccagtttcctccctggatactccattgactacaaatatcaactccaccaaacccagcacttgcttctctgtcacgttctcacttccccctctgcttagtggtactcaccacaattggcctctcccttctccctgaaaaaaatatattttccttgacttacacgcattatgttctcttggtttttctccaacatccctgggctctgtctcagcccactttgctggcctgtgccctcttcttttttctccacacaatccatctccctatgtatcctcttccactccctagaatttaacacactacacgtattgatgccgccaacataaatatctgacgccctagcctcacctcaccatgagtctcttaaatgccactgaccttctgattgctctacataaatgtcaataaatcatctctaatttaaacaaaacttttatttccaaccacccacttcaaatcatttcctcccacagtttttcctatctcaataaacaaaactaccacccacttatttgtcaaaacaaaatcctcaggaataaacttgattgttccaccccctttacagtaattcattaacaagctaagcaaaaatacatgccaagcctgtccactttatctttttcaccgtctttatcactaatgcactccatgaagccacaagcctgttttccctggagaattccctgctgtgctcctaaatagtcctcctaaccacttgtgaaccccaacaatccaatccccacaaagtagctagaattaattgtaataattgaatataagctgggcgcagtggctcatgcctgtaatcccagcactttgggaggccgaggcgggtggatcacaaggtcaggagatcgagaccatcttggctaacacggtgaaaccccatccctactaaaaatacaaaaagtagccgactgtggtggcatgcacctgtggtcccagctactcaggaggctgaggaaggataatttcttgaacccaggaggcggaggttgcagtgagccgagattgtgccactgcaatctagcctgggcaacagagtgagactccatcacacacacacacaaaagttgaatataaattgactctccttgtaaccatacagcagcttctcatatctatttaaataaaattcagtccgggggtggtggctcacgcctgtaatcccagcactttgggaggccaaggcagacagattatctgaggtcaggagttcaagaccagcctggtcaacatggtgataccccatgtatactaaaaatacaaaaaaattagccaggtatggtggtgggtgcctgtaatcccagttacttgggaagctgaggcaggagaatcacttgaacccaggaggtggaggttgcagtgagtggagattgtgccatggcactccagcctgggcaacaagaatgaaactccatctcaaaataaataaataaataaaatttaaaaataaataaaaataaaataaaattcaaattttttaccgtggacatcagagcctataatgatgaggctcctgacttcctctctgtgtcctacctcatcttctgcctctccatttccttgctttctatacgtcagcccttctagccttctttctctccctccacataatttcccacaccagtgctttccctcgattcggtctccctgaaactttcgtccgttagatcttcatgactgtctacttattttgttgtctcagctgaatatcactttctcaggtagagctccctaaacatacaaactaaagtagatgaatccatttctctctttcaacacacatctgatgtcttttcttcagtgcactatgactctctaacattatcttctttgttaaatgcttattgggttagtgtctgtctcctccactcttgtaacttccttgagagttgggaccctctctatcttaatcaaatagaatgatttgaacctagaatggaacccagtacacagtagctgctgagaaaaataagtgtggtttacacaaataaaccagggtatgggaactgatcactgtggggatcctggaaagcaagaaggggctcaagttccagcactctttcattttgatgtcacactagaccccttctcctcctggtgagaaatacaggcaaacttctttctccttcttctagttggaagaagaattcatggataaaggaacagtgatttaagaaaaaggaaatctttttattaagagtcatctcttttgcctgggcacactggctcacatctataatcctagcatgttgggaggctaaggcaggaggattgcttgagttcagcagtttaagaccagcctgggcaatatggcaaaatctcctctctaccaaaattgcaaaaattagctgggcgtggttgcctgcctgtattcccagctactctggagcctgaggagggaggattgcttgagtgtgggaggcagaggttgcagtgagcctcgatcgcaccactgagctacagcctgggtgacagaggcaggccctatctcaaagagaaaaatattatctctttcagtggatctcatagtgctaaggatctgtgcaagctttagagatttctggaaatgatgacaacatagttggggaaaaatagagagaaatgggaggaagaggtaagcagacatggctaattaaggaaagctgagggcatgatgggtgaacctatgaaactgaggacaagaccgcagtaagacaatgagtttccaggacttgcccattgactttcagccctatgagatgtgaacaatgtccacattgtctcggtaaccccacacagtatatagtttgaacattattaaatttctgatatttgattatttttgacttacaaaaatagaatttcatataatttatactacattagttaaatctcttctgtcatgtctagttagagcatgtaggagatgtaggagaaacaagtatagaaaggttaaaaagattcataataaacactaacctgggccagtttttcagaggatgccttaagttctttaggcaccaaagaatacctcataagtgctctgtatctgtaaggtgattccaagtactaatgatctcagcttcagttccagggatttttccccataagaaagaaagagcactaagtataacttctgtcagacaacctacatacactacagggatacaggctttataaacattggagttcagaaagaaaagaaaggagatactagggaggccactgggtccatcctcacatatgaggaagaggggccaacaccacaggtcctgtggaggacataacccaggatcgtctaggagagaccctttgaattcccttgactcccacaaaattttcagtaaaaacctccttttgtctgacataagtcaacataataaagggaattgctgtatggggaatttattttagcatccttatttccaaatcctctaaagaccctgagtacatgtgatgcaaaggttttattggtggagatttgagaagaaatggcctgtacaaaggccccttacacaagtctcatggagagggcaagtagccaagttccttttgtggaggaaataatttgcgatcccttgataaagatgagcaatctctgaagaaaacctcacaatttcttaagggacatggcctgggcacaatgttaacacaactccctatattcccccaccccatagtagctcagcaccctcaatgtgctcttacgtcgggtgtccccagcgaaagccagtcgggagctcagcaccatcagtgtcactgtcaacgctgccaagctggagcctccagggagcttcagacacaccatgctggagaagaggacaggaccaggggccagaggagcaggcaagtctcactcagggagaactatgacccccctccacccacattccaaattatagggaggaagttactgatttccttgctcctggattgggtaatctcgtgtcggagaaccaatcagcatctgagttcaacagcatcatcagttgctgctcagagatgctgtatgaaggtcctcttctgaaataatttcattctttaaaggattgttttaatttagtacttgaaaggtttgaaccagttgcatgtaaaacactttaattggggagctattgtgagccagctctgtgctggtcagtgatgtgttcacaagtttgagccttgtaagagcattcatttcccacttgacaagacaactgtttgcagaagtgagtgtgtgagtgtgtttaagagtaaaggagacggagggaacatggttgtaaatccggagtcctttaatcttgtctttattgtaccatatcttaatgtcacagatttgggaaaattacttcatgtctcacagttgaaatgaaggcactgcgatctttcaggtctttcaatactggaaaattctgtgattctctagatgcctcaaggagcggcagccccaggtatctgataatatgacagaatgacagctattgactagagagtgtaatatgtacctatttccaggtagtgatgtctttaataagttaaaggaaattgaaagtctgttaataatttaatctgagtaaaaatatctttttcaagcgtgtctcctgatgctgcccccaggtttagcggcacctccagaacacacacaggaatgggctaacaggggccacctatgtgcaatggagggtctgaaggtgcctttgtacggcacttaccctaacaatgtgataaggtcaagtgtgcaatccaggtattcgtgggtctgagagatcgatcaaagactctcaaagtcagccgttcacagaacaactcttttttttcttcttcttttttgagacagagccttgctctgttgccctggctggagtgcagtggcatgatcttggctcactgcaacctccgcctcctcggttcaaacaattctcctgccacagcctcccgagtaactctgactacaggcacgtgcctccacgcttggctaattttttgtatttttagtggagatggggtttcaccgtgttagccaggatggtctcgatctcctgacttcgtgttctacaccagcagtgtaaccccaaactgctggggttactggcgtgagccatcatgcctggtcacaattctgttttaaaataatgaatattttatatgaagagtgttcagtccctcattcctggttcccattatgatttcctcatttgattgaggctatagcactttactattatgtttctcttgttttatcataagggaggatataagacgactttgctaactaatacatttttgaatgttcaggaaagagaacactagggaaaactatgaattacatcagttgatgtaaccatataatattaaacatattatatacatttagataattattatgctttttattaatataaatgtaacatctaagattcagaatggacttcaaagtacaactatacttatagcgttctgcattaattcacatgctaccacataggcactcattccttataggccttagtgtttccaggggcaggattctcatcatgctgccgtaaaaatgagcattttactttatactcagaattgcactaagtgctttttatacttcatatttttatttcattctcacatcaactcactaaaataaatacccttttcatgcttacaggtagagagaataaaacaatggagatgaaacaacttttgcaaagatacaaagctagtaaatggtacactatagattgaaccaaattatatatccctcaggctcagccactatatcataatccttcacatcctatttctgagaataatgtcctatgtattaaaattatttatattcctataatttatggatgcacatagcaatatggctacttatgttaatgaatggcagcagtatacgatttgaggaagatactgtgtagcaattctagttccttcaaaagaatcacctcattatcatccttaccctcctctggaaatgacaacatttacatttatcttatgtgatgacacccatagctcctgagaagtctccttcttattaaaggtaacagtgacctcaaaattcccaaatataaactattgctcagaattattattgcagatttctcatcataaagtagtaaatttgatcatctcaaaacagaagaaaaaaagtgcctcacttactttggaaaaacatacttctattaatataaaaagttcaaaatttcatgggaaaaagtcactactgtccctggatttgagaataaactatgtctctataccacaataataattcaatactatgggaatttgtgaaattgcaaccagaatatcacatttaatttggtcaacagaaaataataatttacttagaagctaatttaatcccagctactcgggaggtgggtggattgcttgaacctggaaggtccacgctgcagtgatccaagatcatgccactgcattccagcctgggtggcagatggcagaccctgtaaagaaaaaaaaaaaaaaaggaaaagaaagaaagaaaaaaaaaggaaaagaaagaaagaaaaaaaagaaaagaaaagaaggaacaaactgtgaaaaaagaaactaattgagatgatggtaatctaggaaatctggctaaggttcagcttagtattttaggataaaagggtggtgatgctggcagtggtgagctgtccagagtggccgactgcagtgggaagttgcaagcggtggtggcaggaacgactgcgggagcagtggccatggtggaacccctgtgcctcatgtcccctgtgcctcacgtccctgaggcagctgactgtgatgccccaacccttgagcagctggcgggaccgcccccaggccaggagcctcccactcctgctttgctgctctcaccctgcagctgtggggagggcatggaactggggccaggcttgttgggcctggtttgggaagtgggagtggcctcgctttggggacccagccagcggcatggtcactgtcccacccaccctgctgaggaagcccagttcctgcgcctcaggaggaggttctgcctgaggtggcccagagcggtgtccctggggtggccaccaagcttgattttcccgacggccaggcttgggtgtgatctgctccaccaccccatccaggcaaggggaaccccgggcacctctgagtgctaggggaagaacttgcagacacatcatccttgccccagatgctggcatgggaacaggtgaggggagctgcccaccccaggctgtaagaaggtgtgacaggggctacctgcagactccaaggattgagtaggaatcctgccctccatgcagcaagatccaggcctctctgcactccacgctgtcaaggacgtgaagcacctcctgtccctgcaggcttgcaggtgtctgctcccactgcctggcctctcacctggcctctccaggctcccgggtgcctgctctgatctcagagtggagttggggccaagccccagtgctgttacagcctagctgggcgtgtgcatgctcagggcaaagttgacacaccagcctcctgccacctcagccacggggaagctgagggaagatgggctgagggcaactggtgctggcctacaggccccttgccatgagcagcctaggtgccatggatggcgctgggaggcagacagtctcctgggcagaagggggcaagtccccagtgaagcccctccttctggccagggagggtctgaaggctgtgggctgggctgccagtcctgctgacacgagtgggaacttgtgcattttctgggcctgccccatggccaaccatggtgcccactttctcccctctgaggcctgtaaaagccctgggctcaggcagagttgaacagaggatggagagagcagagagagaggccagggacatgagggatgagttgctgaggagaggggttaccctccccagggtctcctctcagctgcagagtgaagctgccctcaccagggtctcctctctgctgagaactgaggagaggacaggacaatcagctgcagagaggagccaccctctctgttgatagctgaacagatgtcggggcaacctggcagtggagaggagctgcccactgtggctctctgagctgttctattgcttaataaagctcctctttgtcctgctaaccctttacttgtctgggtacctcattcttcctggacgcaggacaggaacctgggatctgcctaatgatgaggctaaaaaagctgtaacacaaacaggttgtagatgagcaatagagaatgtagtcaaatgcagacaaacatggaatgaaaaagcaaaaataaatccatatcattccatgtaacaagaccattttttaaaagtagttttaagtggacagaaaaattgcagagaaagttcatggagggctgggcgcggtggctcacgcctgtaatcccagcactttgggaggccgaggcgggcggatcacgaggtcaggagatcgagaccatcccggctaaaacggtgaaaccccgtctctactaaaaatacaaaaaattagccgggcgtagtggcgggcgcctgtagtcccagctacttgggaggctgaggcaggagaatggcgtgaacccgggaggcggagcttgcagtgagccgagatcccgccactgcactccagcctgggcgacagagcgagactccgtctcaaaaaaaaaaaaaaaaaaaaaaagaaagttcatggagcccttcttccctaaagcagccttctgcttaatttctcctattcttaacatcctgcatcggtgtggtatacttgttaccactgatgaagcaatactgatacttgttgttaactgagatccatagtgaaattagggatcattcttattatacagttctatgggttctgataaatatattatgtcatatatccaccatttagtggaactgacccaagagtcccataggcagttttttttttttttaaataaacatagaaatggacacttctggtcttaaagcttgaaacttacatttgttttatttgagttcctttccaaaaaaatattctcccaggcctctcaaaaagtatcaaagaactggaactcaccagatcgtctcatctagtcaatgagactccaggttccccattcattatgattgctcccttacccctccctagttcctgttttctcatacataggtaaatttttccctgctagataaactcccaattttagtcagtcacagagatggatttgacactggtctcccatctcctcagctgcaccacctgattaaagattaaagccttcttctttggcaacactcattgtcatctcagtgattggctttctgtgtggtgagcagcaagacccagactgaagcccttgtgtgcaagacttagactgaacctctggtgtttcagtgacaaaattatcctatgaagtagtttcgctcacctaaaattgtcccaggctccacctactcatgcactcctcttcctcctgaatccctggaaaccactatttactgtcactgtatttatgccttttccagaatgttatatagttgtaatcatatggtgtatagttttttcagactggcttcttcacataacaatatgcatataggttttctccatgtcttttcctagcttgatagcttattcctctttaatgttgaataacaacccatggtatggatctaccacaatttatccactcacttactggaggacatcttggttgctttgaatttttggcaattataaataaagctgctataaacattggtgtacacttttttgtgtggacagaagttttccacttatttgggcaaatatttaggattgcaattgctgaatcttgtggtagagtatgtttggctttggaagaaacagccaaagtgtcttccagacaagccaggggaacagggtctggaggcagggaacctaaggccgtttcatgttgacatccgaatggaactaaactgaaaggaaaactcaaacttcctatgcctaagtagcagaaggatcaaagactactccctttgtaacccgccccccattttctgcgtggtaaatgtgaaattcaaagtacctctgattggttgttttttgcaaccagtcagatatttgcataggagtgtagctttgtaacttcatttcggtctctgattggttgcggaattgttttcctcaaaatttctacagcctagcgataaaaatcctagaaaagcaaaataagcacaaaccaaggtggcataaccttgtaagacttaatgaataaataacgagtttctttaccaatggtttagagaaagcagactcttgagaatgttgcaaatagaataagtgtttgctaacatatctataattttaatataaaataaataggtgaacaatagagaacacaattgtggggaaaagaaagagagatcagattgttactgtgtctgtgtagaaagaagtagacataagagactccatattgttccgtactaagaaaaattcttctgccttgagatgctgttaatctgtaaccctacccccaaccctgtgctccctaagacatgtgctgtgtcaactcagggttaaatggattaagggctgtgcagggtgtgccttgttaaacaaatgcttgaaggcagcatgcttgttgagagtcatcaccactccctaatctcaagtacccagagacacaaaacactgcagaaggccgcagggacctctgcctaggaaagccagatattgtccaaggtttctccccatgtgatagtctgaaatatggcctcgtgggaagggaaagacctgaccgtcccccagcctgacacccgtaaagggtctgtgctgaggaggattagtgaaagaggaaggaactcctctttgcagttgagataagaggaaggcatctgtctcctgctcgtccctgggcaatggaatgtctcagtgtaaagcccgattgtatattccgtctgctgagatgggggaaaaccgccatagggctggaggtgggacatgctggcagcaatactgctctttaaggcattgagatgtttatgtatatgcacatcaaaagcacaacacttttttctttaccttgtttatgatgcagagacatttgttcatgtgtttacctgctgatcttctctccactattatcctattgtcctgccatatccccctctccgggaaacgcccgataatgatcaataaatactaagggaactcagaggcccgtgccggcgtgggtcctccgtatgctgaacgccggtcccctgggcccatttttctttctctatactttgtctctgtgtctctttcttttccaagtctctcgttctacctgatgaggaacgcccacaggtgtggaggggcaacccatcccttcatacactcaaactcagacaagtatggaatgaaaagcaaaagtaagtccatatcctcccatgtaacaagaccatttttaaagcagtttcaagtgtacaaaaaactttcaagaaagtttagggagttcccacatacctccttccctaaaacagccctctgttcagtttcttctattattaacatcctgcattagtgtggcacactagtattaatgaaccaatactgatacttattgttaactgaggttcatagttatattagagttcactctattacacagttctatgggttctgataaatacataatgtcatgtgtttaccattaaagtgaaaccaatgcaatagtcccatagataattatttggataaacatagaaattattgtatggtaagtgtgtgtttagctttgtaagaaacagcgagtgtcttccaaagtggctatactgttttgcattcccaacagcaatgaatcagagtccccattgttctatatccttgccaacatttggttttgtgagagttttggattttggccaggaaaaaaaaagctttttaaaaatttttacttgaaaatcattatagattcacaggaaattggcaaagacagtacaaaggacgtatgcataccctttcacggagcttttccaaatgtttatgttaagcagctctagcacagtagcaaaaccaggaaactgacttcgatatgatatgtgttcatagttctatgcctgtgtcttatcatatttgcagatttatgtatccaccacgcaatccagtggagagctattccatcccacagagatctcccctcatgttgctttttagagtcacacactaatccctacacatcatcaccctgacaactactagtctcttctccaccaatctctataatagcgtcactttgaaaatgttacataaatagaatcacacagtatgtgacttttgtgactggcattttccccacagcataatgtccttgagatccatccaagttgttgcatgtatcaacaattttttttttttattgctaaggaatactccatcagatgaatgcactgcagtttaactatttgcctgttgagggacatttggctgtttctagttttggggttattacaaataaagctgttgtgaacatttgtgtaagatttttgtgtgaatatgtgtttttatttctctgatataaatgtctcagaatgttattcctgactcatatggcaaatatatgtgtagttcttcaagacactgccaaacaactttctagaagtgagaggtgaagccagctgggcttctgagttgggtagggacttggagaacttttgtgtctagctaaaggattgtaaacacaccaatcagcactctgtaaaaacgcaccaatcagcactctgtaaaatggaccaatcagctctctgtaaaatggaccaatcagcaggatgtgggtggggccaaataagggaataaaagctggccactcgagccagcaccagcatctggcttgggtcgccttctacgctgtggaagctttgttcttttgctcttcatgataaatcttgctgctgctcgctgtttgggtctgcactacctttatgagctgtaacatgcaccacaagggtctacagcttcattcctgaagtcagcgagaccatgaacccatcagaaggaagaaactccagacacatctgaacattggaaggaagaaactccggacacaccatctttaagagctgtaacactcactgcgaaggtctgtggcttcattcttgaaatcagcaagaccaagaacccacgagaaggaataaattctggacacatttggcaacccagatgggacacattttggcgaccacaaagggacacattttggcaccccacatgggacagtcacctatcgccaagctgtgagtaccttcagacccctttcacttgctattctgccctatttttccttagaatttgggggctaaataccaggcacctgttggccagttaaaagtgactagtgtggccactggactaaagacacgggtatcaggctttctgggaaagggctctctaacaacccttgactatttggagttgggagcattggtttgcatggaaccagcttctgcttttcctgtacttctgggctgagccaaaggtcaacagagaggaaagccattcagctcaggggtcccaacaacaagttggtcgacgctgcagccatgagcagaactctcaaagttacttgcctgagtgagactcgcctgtctatcctatctatcctgacccttgcccaagggtcctaatgcctgtcggacaaacttcctcttgcctctcttctctgaggtgagtcctgcttctaaaaaccactccctgtttctggaatttctagtttctcctataagaattatttctagtacaaactccaggactctattcccttctttaggcactcaggctcaccaatcagaaagacataatttttgcccaaaacctcattgggtggggagaccaactatccttttaggattcttcctcagactaacaggcttaacaaaagctattcctgaagctaggatatggggagcttcagaaatgatatcctttgtattcgagtgaggacaaaaggcatcactcttccaaccctggagatctcttctctccctcagggtgtggccctccatttcatttttggggcataacatctttataggacagaggtaaagtctcagtgttaacaggagaatgcttaggactctaacaagttttcgatcagtgcatcagtaagggccactaaatcctatttttcttggtcctctttgtgatctaggaggacaggcaagggtgaagtttttcgagaatgcgtctgtaagggccactaaatctgaccttcctcagtcctccttgtggtctaggaggaaaactagtgtttctgctgctgcgttggtgagtgcaactattccaatcagcagggtccagggaccgctgcaggatcttgggcaagaggtatttctgctcctgcattggtgagtgcaactattccgatcagtggttccagggaccattgcaggttcttgggcaagagggagaagcaaacaaaccaaaaccatggatggttttgtctttcagatgagaaacactcaggcaccaacatactcacccttgaaatgcatcctaagccattgggaccaatttgacccactaaccctgaaaaagaggtggctcatttttttctgcactacagcttggccccaatattcactctctgatggggagaaatggccacctgagggaagtataaatcacaatactatcctacagcttgaccttttctgtaagagggaaggcaaatggagtgaaataccttatggtatggggttatgtccccttcaagctgtaaggggaggggaatttggcccagcccaggtacatgtccccttctcactctctgatttaaagcagatcaaggcaaggcagacctgggaagttttcagatgatcctgataggtacatagatgtcctacagggtctagggcaaacgttcgatctcacttggagagatgtcatgctattgttaggtcaaaccccggcctttaatgaaaagaatgaggctttagctacagcccaagagtttggagatacctggtatcttagttaagtaaatgatagaatgacagctgaagaaagggacaaattccctaccagttggcaagccatccccagtatggatccccactgggaccttgactcagatcatggggactgaagtcataaacatctgctgacctgtgttctagaaggactaaggagaattaggaaaaagtccatgaattattcaatgatgtctaccataactcaggaaaagaaagagaatccttctcctttccttgagcagctatgggagggcttaagaaaatatactcccctgtcacccaactcaattcactagagggtcaattgatcctaaaacataagtttattacccagtcagccacagatatcaggagagagctccaaaaagcgagccctgggccctgaataaaatctagaggcattattaaacctggcaacctcggtgttctataatagggaccaagaggaacaggcccaaaaggaaaagtgagatcagagaaaagccacagccttagtcatggccctcagacaaatagaacttggtggttcagagagaacaaaaaatggagcaggctaatcacccagtagggcttgttatcagtgtggtttacaaggacactttaaagaagattgtccaatgagaaacaagcggcccccttgcccatgtccactatgctgaggcaatcactagaaggtgcactgccccagaggacaaaggttctctgggccagaagcccccaaccagatgatccaacaataggactgaggatgcctggggcaagtgccagctcatgtcatcaccctcactgagccccgggtatgtttaaccattgaaggccatgaaattggcttcctcctggacactggcacagctttctcagtgttaatctctggtcctggacagctgtctaccatccgaggaatcctgggatggcctataataaggtatttctcccacctccttggttgtaattgggagactttgctcttttcacatgcctttcttgttatgcctgaaagtcccataccattttagggagggacatattagccaaagctggagccattatctacatgaatatggggaacaagttacgcatttgtagcctcctgcttgaggagggaatcaaccctgaagtctgggcactggaagaacaattcagaagggcaaaaaatgcccgcctagtccaaatcaggctaaaagcccccaacactaatgaatgccttctcatcccctctttcaatcactctctcaaatggttcctagtagatacaaaactttttttctccaatgagaaaatagaacacagggagccactcagtttgctcccagcacccctttccagccactcaccggagctacattggcaagtactctaggagtatgggaaaatgaaaacaacaaactcacacacatttccacatacacaaccagttctgtctatccagccaaggtatattcttcttatgtggaatgtcaacctatatctgcctccccaatatctggacaggcatctacaccttagtctttctaagacccaacattaacattgccccaggaaatcagaccctatcagtacccctcaaagctcaagttcatcagcacagagccatacaactagtacccctacttatagggttaggaatggctactgctagaggaaccagagtagccagtttatctacttcattatcctactaccacacactctcaaaggatttctcagacagtttgcaagaaataacgaaatctatccttactctacaatactcccaaatagactctttggcagcagtgactcttcaaaaccaccgaggcctagacctcttcactgctgagaaaggagaactctgcgctttcttaggggaagaatattgtttttacactaaccagtcagggatagtacaagatgccacccagtgtttacaggaaaagtcttgtgaaatcagacaatgcctttgaaactcttataccaacctctggagttgggcaacatggcttctcccctttctaggtcctgtgacagccatcttactattactcgccttcaggccctgtatttttaacctccttgtcaaatttgtttcctctaggatcgaggccatcaagctacagatggtcttacaaagggaccccaaatgagctcaactaacaacttctaccaagaacccctggactgagccactgaccctttcactggcctaaagagttcccttctggaggacactacaactgcagggccccttcttcacccctatccagcaggaagtagctagagaggtcatcgcccaatacccaacagccgttggggtgtcctgtttagagtggggattgagagttgaagaccgctgggcttctgggtcaggtggggacttggagaacttttctgtttagctagaggattataaatacatcaatcagcactctgtgtctagctaaaggactgtaaatgcaccaatcagcactgtgtaaaaacacaccaatcagcactccgtgtctagctaaaggattgtaaacacaccaatcagcgctctgtaaaaaggatccatcagcacactgtaaaattgaccaatcaatactctgtaaaatggaccaatcagcaggatgtgggcagggccaaataaggaaataaacgctggccccccaaaccagcagtggcagccgctcagatccccttccaagctgtagaagctttgttcttttgctcttcacaataaatcttgctgctgctcactctttgggtccggactacctttatgaactgtaatactcactgcgagagtctgtggcttcattcctgaagtcagcgagaccacaaacccatcgggaggaactaacaactccggacgtgccactttaagagttgtaacgctcactgcgaaggtctgcgacttcactcctgaagtcagcgagaccacaaatccaccggaaggaagaaactctggacacatctgaacatctgaaggaaaaaactccggacacaccatctttaagagctgtaacattcaccgcgaaggtccgtggcttcattctggaagtcagcaagaccaagaacccaccggaaggaataaattccagacacagaaggatagtcccattttacattctcaccatcagtgtatgagaaattcagtttttctgcattctcagcagcatttaccattgtcatattttttagagattttagctgtattaagagttgtgtggtactattagatcaagttcttaatttgcatttccctgatggctagtgatttgcatgtcattcattgtgcttatttgccatgtacatgtatcctctttgataaaatgtctcttcatatcttttgcccattttgtaattaaattttttttatttttgagatggagtcttgctctattgcccaggctggagtgcagtggcacgatcttggctcactgcaaactctgcctcctgggttcacgccattctcctgtctcagcctcctgagtagctgggactacaggcactcaccaaaatgcccggctaattttttttttgtattgttagtagagacgggatttcaccgtgttagccaggatggtctcgatctcctgacctcgtgatccgcccacctcggcctcccaaagtgctgggattacaggcgtgagccactgtgcctggccacaattaaatgttatagtctgcactctgctatatattttatagaagagcttttatagttgattatatattttcgacaatgtattcttggtaatatatgtgttttaaatattttctccgtatctctaacttacttttcatttcttaacaggatactttacagaacaaaagttttaaactctgaagaagccttatttattgttttttttgtttgtttgtttttgtctttttgttttttacacgtagtgcttttgatgtcatgtctgagaactcagaattcagacagcaggccctaggttctgatgattttctcgtgttttcttctaaacgttttacatgtagacatgatttcattggggtaaatgttttcatacggtgtgagaatttgttatttctttcttgcttctgttttgttttttgtttggttttgtttttgtctatgaatttccactttctcctggaccattgtttgaaaagactgtagcctatattacctccattgaattattttgcacctttgtcaaaatgagttcgcatatgtgtatttctggattctctatgctgctccaccaatctatgtctatccctgcactaatgtcgatcagtattgattactatagctataaaaattctgaaatttggtaatagttatttcatctctttccctgtgaaatttttttttacctatgctagttcccttggttctccatatgcattttataataactttgtctacaactattacaaatcttgctggaatttagggagaaattgtgttaaacctcgatatcaaattgaggagaattgacatctttactatatttagttttctagtttatgaacacagtaaatctcttcatttcttcagatttttttatttatcagcatttcagcatatggattgtgtacatgttctgttggtatacttatgaggttttttgaatgaaaataattcatgttgtatttttagtatttgttttgatttctttattactgtatattcaaataaaattgattttttttgttgatcttgaattctgtgaccttgcgaatttccttagtagctgaagcagaagaggaaaagcactcagactttcactattaagtataatttagccgcaacgtttttgtagaagttatttatccagttgaggaggtcatcctcagttcctactattttgaggggtttttttaaatcataaattaatgttgaattatgtcaaaggccttttctatgtcaattgatataaccatgcgatgtttcttctttagcttcttaataagaaggatgacactgattgatttcaaacataaaccagacttgcgtccctaaaataaacgctacttggcatactttacatatatttttagtttggcagattttttacttgctaacattttgttagggagttttgcatgtatagtcatgcaggtatattgctttttaattttcttttgctgtactgtttttgtgtgctttttattttaggaaatgctggcctcataaagtaagttgggatgtcttcccctctcttctgttttctggaggaaattttgcagagttgtgttaattctactgaaatgtttggtagatttctcctgtaaaactattctaaactagagatttctcctataagttcagttctttttataattacagagcttttcaatttatctatttcatattgagttaattgtaatagtgtgtacttctgtacttttaaaggattcttttccatttcacctaagtgtttttggtgtattcctttggtgtactattgatgtcgaagaatctgtagtgatataatatgtttcaaccccaatattggtgttttttctcctttttccttttattttgtcctagaaatttgtcagttctattaatattttctaagaacaaactttttttccactaattttgtctctgcctcttttttttttttttttttgagacggagttttgctcttgttgcccaggatggagtgcaatggcgccatctgggctcactgcaacccccgcctcccaggttcaagtgattctcctccctcagcctcacgagtagctgggattacaggactgcgccaccatgctcagctaattttgtatttttagcagagacagggtttctccatgttggtcaggcttaaactcccgacctcaggtgatccgcccgcttcagccttgcaaagtgctgggattacaggcgtgagccaccgagttctgcctttatatcagttttttttttctccttcttcttcttgctttaggttatttttgacaattttccagatttttgaggtgggaactgagattattggtttctgaggttttctctttttcagtgtatacattttgtactatgcatagtagttcaaattactcctttagctatgtgccaaacattttgatatgttgtattttcattatcacttagttgaacatactttttattttcttaagacatctttttttttttgagatggagtctcgcactgtctcccaggctggagtgcagtggcgtgatctcagctcactgcaagctccgcctcccgagtagctgggactacaggcgcccgccaccacgcccggctaattttttgtaattttagtagagatggggtttcaccgtgttagccaggatggtctcgatctcctgacctcgtgatccacctgcctcagcctcccaaagtgctgggattacaggcgtgagccgccatgcggcgtctccagctggagtgcagtggcgccttgtcggctcactgcaagctctgcctcccgggttcaagtgattctcctgcctcagcctcccgaatagctggtactacaggcgcccgccaccacacctggctaattttttgtatttttagtagagacggggtttcagcatgttggccaggatggcctcgatctcttgacttcgtgatccacccacctctgcctcccaaagttctgggattacaggcatgagccacctcgccaggccctttttttttttagatggagtctcgctctgtggtccatgctggagtgcagtggcgcaatctcccctgactgcaacttcagccttcccgtgttccagccattctcgtgcctcagcctcctgagtagctgggattataggcaagtgccactacgcccagctaattttttttgtatttttggtagagctgggggtttcaccatgttggtctggctgctctcgaacaactgacctcgtgatccacccgcctcagcctcccaaagtgctgggattacaggcgtgagccaccacacctggccaagacattttttgatccaagggtaatttaaatgtatgttactaagtttccatgtgtttggagttatactgattttcttcatgttactgatttctggttcagctccgttgcttccagggagcacagtctgtatgatttcaattctttacatttgttgaggttccttttatggtccagggtatgagagatgttggtaaatattccatggacagttaaaaaatgtgtattcttctgtctggtgtggtggtctgccaatgtccattagatcttattggtggatagttttgttgggtttcattatcttgctgagtttttatccagttgttttattaacttttcagagttggtttgtggagtcccaaagtttaactgtgtatttgtctatttctccttccagttctgaccattttttgctctacttataagtaacttagttgtatggtgtacatacttttagagttgctatgtcttctttctgaattaacatttttatgattatgtagtgtttctgtttgtctctcagaatattctttgctctgtgcattttatgttatctgatattatagccatttctgctttctttgacaaaagtaagtacgattttttttttccattcttctatttcaggcttccactcttgtaatatttgtggtaagtttctcataggtagcatatcagcgggtcattatgtttcactctgacatttgtctttttagacaatttacatgtcatgcaattattaatatgtgaggtctcatgactgccatttggtttttgtttcttctggtttttgcttctctgttttctttccctgtttttcgatgtgtcccttaagcaatatttagaattccattttttaatcaatcactttttggtgtatcacattgtagagtttttgtgttttatctatctattaacgtaacttacagtctacttgtgctgagattttttcaatttgactacagtgtaaaaactttacctttttatccctttcactcctgcatttataatatatattttttattttctctacttgcatcaaaacccagatctgacaatgtcgtaatttttgcctcaaccatcaaactaatttataaaactgaagaagagaagtctgttgtattgacccatatctttactcattctagtttctttttttcctgattgtccaagatttcttcccttaccatttctattccagttcaagcacttcctttacccttgttttaggataagtctgctagcatcaaattctcttgattttccttcctctaagaatgtcatggccgggcgcagtggctcacacctgtaatcccagcactttggaaggccgaggcaggtgcatcccctaagctcaggagtttgagaccagcttgggcatcatggcaaaaccctgtctctgccaaaaatacaaaaagttagccaggcttggtggtgtgtgtctgtaattccagctactcaggaggcagaggtgtgaggatcatataagcctgagaggcagaggctgcagtgagccatggatgtgccacttccctccagcctgggtgacagagcaagactccatctaaaaaacaaaaaaaaaaagaaaagaaaaaaagaatgtcatgatagaaccttcattttataataatatttttctggatgcacattctaggttaacattactttcagccattaaaatatcttgtggcacttctctctggtctgcatgatttctaatgaggaatacactgtcatttaatttatttcctcctgtacatgagatgtcatttctctcttgttgctttcaagattttttgacataaatttctttggatttatcttcctttagatttgcacagattcttgaatttttactttaaagtctttatccaaatttggaaaatagtcaatcttccttcaaagactctttgggcatcacccatttgtcatctttctctaagactctagagacacaaatttcatatctttttttatagtcttacagatttatcagcatgaaataatactgaatattatgaataattttacaaaaacaaatttgcatgcaatgaataaattactcaaaatgtgcaatgtactgaagctaacaaataacataaaatatgaagagttccacatctcatagagaaagccaattctataaagctttcccaagacaaaaccccaggttcatttagcttcagtaaatattttaaaatatttaaggaacaaacaacactaactttatgcaaacttcaaacatttgaaaaagtggaaaacacttgcagttaggtttgatgagatctgtgtaaaatttacttcaagatctgaaaagaactctacaacaaataggaatttatggaccaataattcttatgagccaagttcttaagaaaataatagccaactgaattcattgatataaaagatggctactacattatgaccaagtggagtttattccagaaatgcaaggttgtttgagcatttgagaatccattagtgtgattcactacattaactgaaggagggagaatacacatgcaaccacctggatagagtcttgaaatatgatttgacagaattcagcacttggccttaattttttaaaaatctatttgcaaacttgtattaaaaagttatttcttcagtctgagaaatgatagtaaccttattgcacatattagtctcagccgtgaaatatttaaaactgtctccttcatatctggagtactagaggagttaggcaatgaaaacggcaagaaaaataaataaaagagatgataattgcatccaggtgaaatggtcattatttactctcaacataatcagctacttggaaaataaaattagtaaacaaactcatagttttaataagtgaatttaaataatgttgctgaatacgaagtcagtatacattaaagcaattatgttattgatatagtttggatgtttgtcccgtccaaatctcgtgttgaaacatagcctccagtgttggaggcgaggcctggtgagaggtattttggtggggggcagatccttcattgatggcttggtgccatcttagctgtaatgcatgagttctcactcagttcacaggagatctggttgtttaaaagagtgcgactcttccccactttctctgtgctcctgctctcaccatgtgatacccaggctcccctttccttcccccatgattgttagcttcctgagggccctcaccagaagcaattgccagcaccacacctcctgtacagcacgcaaaaccctgagccagttaaacctcttttctttatgaattacccagcctcaggtatttctttttagcaatgtaagaatggactaacacaataatgttctaccataaacaaatagaaaacaaaaccaagaaaataattttatcaatttcctcacctctttgtttttttgttgtggttgttttttgtttttgagacagagtcttgctctgtctcccaggctggggtgcaatggtgtgacctcggctccccacagccaccgtctcctgctcacaagcgattctcctgcctcagcctcttgagtagctgggattacaggcatgcaccaccacgtccggctaatttttgtatttttagtagaggcagggtttcactattttggccaggctggtcttgaactcttgaccacgtgatctgcccacctcagcctctcaaagtgctgggactacaggcttgagccaccatgcacagccctgtttttgtttgtttgtttgtttgttttttagacggagtctcactctgtcgcccaggctggagtgcagtggcgcgatcttggctcactgcaacctccacctcccggcttcacgccattctctgcctcagcctcccaagtagctgggattacaggcacctgccaccatgccctgctaatgtttttgtatttttagtagagacgaggtttcaccatcttggccaggctggtcttcaagtcctgacctcgtgatccacccgccttggcctcccaaagttctgggattacaggtgtgaaccatcacacctagcaacaatgtcttatttttttaaaaaagaattattttaacaggtttactgaagcataatttacatactgcaaaatttactcattgtctatataaaatttaatgattttagtaaattaatggatttgtgcaattatcacaatgatccagttttataacatttctatcgtgtccaaaatttatctgtttatagttaattcccgccgataccccaagtcctaggcacccaatgatctgctgtttgtgtctataatttaccttctctagatattttaagtaaatgaaatcatacaacatgtaatcttttgtgtctagtttccttcacttagttaacattattgaagtttaccagttttgtagtatgtatcatcaattttgtttcgtttcttttcattcctttttattcatgttgtcttctttcatttgtgtgaatttataaggtacaagtgtagttttgttacctgcatagattgcttagtggtgaagtcagtgtttctgcagtatccatcaccccaatcacgtgcattgtccccattaagtaatgtctcatcatctggagtgcaaggattgaaacttgccttgggaaaactaccctcatgttcatggtatctcccctgccatataagtctatttttgtccccttttattgttgaatgatattgccttgcatggatgtagtaccattttgtttatccatttactagttgaaggatatttggattgttttcagtatgggcctactatggctaacgctgttctgaacactcaaacacatatctttgtgaggacatatgtttttatgtctcttaggtagattccaaggagtgaaattgctgggtcatatggtaaatgtatgttaaacttgctaggaaattgccaatttccaggtatttgtaaaattatacactcccaccagtactacataagggtttaaaaggtctgtttgtcttcaaacataattataatgttgatgatactattagaaataacatctgtcagccgaacacggtggctcacgcctatagtcccagcattttgggaggccaaggcaggcagatcatgaggtcaggagttcgagaccagcctgcccaacacagtgaaaccctgtctctgctaaaaacgtaaaaattagccaggcacggtggcatgcacctgtagtcgcagctactcagtagggtgaggcaggagaatcgcttgaaccaaggagtcgaaggttgtgcggagcagggaacacaccactgcacttcagcctggacaacagagcgagaccccatctcaaaaaagaaaaataaataaataaataacatctgtcttgttaattttatattttctctttatgtttcaatttttatttatccaggatctatttagtgaaaaaaatgagtttggagtacaccttaccaaaaactgaaactaaatctcaactctttctaattctagactctgttttactagtatttaatgaaaaaaaaatcagtaacaaatgcctttttaaaaataaatgtatagtgtgttttaaaacagcaccttacagagctagtcattcctttttctgcttttttttcaaaaatttccctagaaaatatatttacctcataaaataacatgtcagcatacttgagttctaaaaacaatcctttttacttgcttttttgttttattgtaattgagttaatggctgacatttaatactcaatgtgagtatattatatatgtttatatgtttttaaaatatatatatatttaaatatatgtataataaatatatatgtatttaaaaagacccagaaaccctgaattgaggatgcctatcgggaatctctaggccttcacgtggaatttaactatgaatactaacaacctaataataccacaatctttcattgccctacccagaaatcaatctctcctactccatccaccatttctttatttttaaaaatatatgattttgctctttttcttcccatgtgcatcaggcccactctacaaaggttgaatcctggcttatctgagcccatgtgatcccacggtcattccattgtttgagaaagtgggtactgggaacactctagaaactgtttagtagattcttataaagacacacaggaaaaagtcatatccttttcctgcctttgggagttgtgaaagaataagaaaactaaagctgctgcaggggtcctcctaccatctcaggaaagctgacgtgctgtgtgtgatagagagatgagctatgaagttccagaatcgctgatgatgacactggcctgctgagttgagcaaccctgatgatgcccagacttggatgtatcggcaatatgagataatgggttaaagaaaagaaaagcccactagatgggatttcctgctatttgcagcagaaggcatcttcattcagatattcatcccacacattttagtactaccttagaattccacaccacaagtctcatataaaatgagacaaatcatttcctcaacttaaggaacaaagcatatttgtggcaactctgggatcaaacagaataaacataattatcagcttagtatattcctataggatttatattcttataggatatatacatacatgtattgctatgtatgtacaataacatgtaactaaaaacaaaatatgcataaaataaaccttgaatttgattgaaaataaaataacagttgtctctgacggataaattatgttcagatgattattactttgaagtaaacttttgaattgattatgtactttcagatttgacatatttgatgctgactctcagatagaacacaatggagaaccctccatcttctaaatttgcctttctctgaaatctgtacaggtcctttgataatactatataactgaagtctctggaatgaaaaactatatactaatttaaaggtatagattcacaatatcgtagacggggttaagaaaaagttctgattgacttgctggctggtttctcatctcatgtttgacaagtttgtttcagttgttatagtctgttctcagtttttatgcattgcctttttgaacattaggtttacttttttaattggaaagtaaaaattgtatattatatttatgttgtagagcatgaagttttgatatatgcctatagtgtggaatgtctaaatcaagctatttaacatgtgcatttacctcatatacttattatatatacatgaaaaccattattctattgggaaataatcttccctttctcttgttttttgtccttgcagccaaatggaccagataatttttaactctgtttgagaaacatttaataatgcaatgtgtttgtggcacaaggggagtacagatgcaggggaggcaggaaagtttaggtaaagagaagcacaaaagttgaagatgaggcgctgccatcaaagctgtggggcttcaggccaagaacaggagctgcggaagccacaagggaggacattttctgcagagttgctgaaccagtaacaacctagtcctgacaaagctcttgtggaagaataacagccaagtgggaaagcttttcatcctgcaaagctggggcagaaggttcttccttgaatgtggtcatctgcacttcagctcgagtcctgcggagacagaggaaattgttttcagacctggctttactaaaacttcttttccccgctttcaacgactcagatgagagcactgcaggaagaagaaaaacaagttcctaagtctccctgagccaatgatcctgcaaagcacaggccttttctaagtggagaggaggagttttggtgtaaattgcctgatcagaaatctggatccaaagtctttcctattatttctgtctcacgccttatcacctctgccatcattctagggaaaccgaatctctttctgaaagaagattaaaaggtattaccttttgggtgaagtccagagtgtcctgggaaaaagaggaaaatatatatacttaaaaggtatggaagcaaatctgtcttccaatgcaatgtcccagccccagatctcccacctgagatttctctaacaccacaacccccaccaaccacggcagagaagagcagaaacagaccatgtgacccatgaagcatgaggtgtctgtcacaggatccagtgtaattgcattagccttagtggctcttccttaatttgcttcaggatctcgaagcaaaggacccctacttgttaacctttctcttatctctgcaggccacaagctattatgctttgacatagtaaccatgcactgatgatttctggattatcaggacattggaggtcatttggggaaagaaaggctttatccagggccactgatatactgagaactaatcctagcaaagccatatttcctcctccagaaaagcctatggagatactcagctcccaaaagctcctcacctttctgattcttgaagtagatgaacagccccgtcccaaggaagagcaggcccagcacgaagcccccgactccactcagcatcttgctctgtgcagattcagaccgtgctcctgagagaggaagccaggtttagtgacgtttattccaaattgaacctctttacttgagaccctaagattcagagctttcaaaatggggaagaaggctaccctgtaagaactaaaataactagctgtttctgggggaaaaaacgtttttcaaatcacactgaacagttacaaggtccaggcatcaacctcattcaaatattacagccttgatgtaaggcacaacttcaaaatctgatcaacagaaagcctgagtctcagtgaggttaagtagtttgtctagagtgacagagctaataaaagacagagctgagattggactcccctcatgtcaggaaggtcgctgcagttctcctcttctcagatcacaacaaacaactcagatcaaaagcaccagaaacacagtctcagacccagaggcccagagcccagggagaccgcgtgaccctgacctgtgctatcatgtggaggttcaaaagagggacagcctctcctgcgtggcaggtatgactgcttctccaggaggtacaggtttctagaaacctgtttctagaaatcgtttctagaaacctgtttctagaaatcgtttctagaaacctgtttctagaaatcgtttctagaaacctgtttctagaaatcgtttctagaaacctgtttctagaaatcgtttctagaaacgattacagggctacccccagtgacctgtgctgatggagatgagaacatggagcaaatgcaaataggatgtgggagaggagaaacctgacactcagggattggcacagtccccttcttggtgggtgagaaatttaggaagtcagaaaactgctcactccattgcactgtgagagggctcgtcatgcttggatgctcctccactccgaggaactgtttccagcatcaccagggtctggaaagtccagtctccattctggatcaggcctatggagaccaccgcagccttctcttcctgaccattccggaaccacctgacttcaatgctgcctggatagaaaccactcacacagcagaccaggaggttgctgtgaggcaggggctgggtctttgcaggatacatagtccccttaggttggactaggagaaaaacaggtagagagaatgaatcaggaagttagagtctcgttgttcagctgtttgtttgcttctctgtaaacccaggctctggccttgaccaggcctccaacacagctggccatatgccctcacagtgtcatcagcctggaatttaatcgtgatagtgtggacccactagatttgcgagatgttgtaaaaattttatttgtttcttcatagcttgaaattgtcatgcattatttaagtgtttacaaatctttgaaagtacagagtgtattaattaaaactgatacctgagccaggttgcctggttcaaatccaaggtctgccttttagtggttgatcctggaagagttttttgattcttttgtgtctcaactttctcacgtataatgtaggttaaattatactaatttacctcttggggttatatgaggattaatttacgtaaaatatataaaacaatgactgaagatagccttcaacttatgaggtcagaaagcttctcactccattccattgtgagagggctcatcacacttgggtgctccacttggcacctatttatcatcctcttacaccttgagagaagaatatgtcttaaagcaatgtggatagataaaggcacagagttgggtacatgaggaaaccgagtatgaatttttaggaatagtacctccatgcactcacaccttagaacaccagagaaatggttctgcccctgggaaggcgggacagacagaaatgattctccgaatctttatattcgtagaaaagcctgagtcctaaagcagagatttaggaattaaggaacgtcattttagttttgaaagttcttacattcacatttagctgatcaatgcatctcctgtgcaaaacaagcagaaatgattctccaaatatatatatatatatatatatatatatatattttttttttttttttttttttttgagatggagtctcactctgttgaccaggctgaaatgcagtggtgccatcttggctcactgcaacccccgcctcctggattcaagtgattctcctgcctcagcctcctgagtaggtgggactacaggcggtaaatccaccagatctttccaatgtcctttttctggggatttccataacactttcggaaaacctcttctctttttctctaagagtggccaatgtctttccactggagtcttaacatccgtaccaggagtcaaaaaatttaaagtaaataaggctaaatataactttgattgcagtggtaacttgtctcctactcctccgttttgtcttttcaacatgtgttgtaatgtttgatgtgcctgctctataatgccttgtcctctaggattataaggaattcctgttttatgggttatgacccaaagctacaggaaattttgaaaagcatgactagcataagcaggtccattgtcagtttttaattgtttaggtatccccatatgagcaaatgatgacagaaatgttgccgcacatgaccagctgtctcagctgtttggcatgtagcatgcagcatatgagaataagtgtctataggcacatgaacatagctaagcttaccaaaggctgctatgtgtgtaaatccatttgccaaatttcatttagagccaaacctcgtggattacatccttctacaggtgtggctccagggacatgctggcaagttggacacgactgtattatagacctagcttggctgtgaggcaagctaaacgtacaagtaagggcagaagtgttttgatgcagtaatacatgagaggtttgagcttgctgaaacacagaaccaatcaatttatttgctctatcattacctagagatagggctccaggaagttgtgtgtgagagcaaataagagaaaaatgaaaaggagctgcacaagaccgaatagtttgttgaagtcttaggaaaaaattaagcagttctggttctagggtacttttaattgtagcagtttctatgcaactggctacatttacaacataagctgaatcacagacaatgttgatagcatctgaagctgtgagctgtaaaacctgtatgactgcaatcaactctgagtattgagctgaaaccccagaggtcattattgtttgagtatgcttgggtccataaacagctgtaccacctttggaagagccatcagtaaaataggtttgtccacctggaataggcttgtgatgagtaatcacaggaagaatgaaagaatagactttataaaactgcacaattttgtctgaaggatggtgaaagcaaaggtttctgtggctgtagctgggaggcatgccgttgctgaagcatctgttccacaggctgtaactcagcttctgcctctttggtcaattgctgcggggaatctaatgaagaatctccttgtagggtttgagaaggttgtgtcagttgataagtggcaatatctagcattgggtgcagccaattaatatcccctaacaactgttgaaaatcatttaaagtctgtaacctgtctttaaggagaactactttttgaggccgtacacgtctttcagtaacaatattatctaagtaacgatatggcgaagttgtttgtaccttttctggagctatttttagattccatttagttaaagcctgctttgtttctcagaataactgatgtaagatttgatctgtaggagcagccaaaagaatgtcatccataaaatgaatgatgtaagcagtaggaaacatatttcgaggctcctttaatgcctgtcctacaaaatgctgacataacgtaggactgttaagcatgtcttggggtaaaactctccattgatagcaagaaagaggttctctttgattaatagaaggcacagagaaggcaaattgaggcttatccttctcatgtaatggtatagtgaagaaacaatccttaagatctattactgcaagaggccaatctctaggaatgaccactggagttggcacaccttgctgtaatggacccattggtttaatttgtgcattaatagctctcaaatcatgcagcagtcgccatcttccagacttttttggaataacaaacactggtgaattctgggggctaactgactcctctatatgtcctgtgtccacttgttcttatactagctgctgaagttgtgtcagcttctcctgagataggggccattgatccacccatacgggtttgccattggccattctaatggtgaggcagagggtggaggagaaatatcaatgaccgccatcagaaatcctgatgtcatagcccttttctatctgtttttccagttattgatattgggttaggttttcctcgtaggaatttccctaaacctttcccactctgatatcccatgtctttcaatgttttaaatcctgggttatcaaagttttcatttgtaagtctcatattcaatgctgtaagtaagtctcgatcccataaattgattggtatatttgcaacataaggctaaaaagtacatgactgtccatccggaccaagacaagataaaatctcagcactctgttgaacacttttagccactcctactcccactagggatgtggaggttagtttgagagaccatactggaggccagtccttactggatattactgccacatcagctcctgtatccataagcccataaaatttctttcttttaatttgtactacacaggtggatctattagaggctatgggctgggatagatagatttcccatgtagttgtgcttccaaaccctttatttcctcatttctccttttgtggagaaggatgtaatttgcggggaataagcaacaactgagcaatatattctcccagttcaaaaacccaaagacattttgacattaaaactacttgaatttctccttcataatcagagtcaactactccagggactacagtcatgccttgcaagttaagggggcttttacctaaaattagtcctatgtatcctgttggtaaaggcccccaaatgccagtgggaactttggtaggtttgtctcctccaactaatgtagttctttctctggtggggagatctaatcctgcacttcctggtgttcctgaggtgaggaataccaggaatcaatctttctcctgggacccatccctgaagtgggcctgtggtctgaactggaaatgccctcgttgtttgaggggcacgcgtacaggcccccttctagtttcccgacaggtgggtgctgttttcatgaaattttgaatggctgattaccccagtgacttccttggttacagcgaggacaaagtcctggtgttttttctgctaggtggggcactgcattgtaagttcctttctgtcctgagatctggcggcattcctttttaaaatgtccagtttttccacaattataacattttcccattttagggtttgacccttggctccttttacatttgtcaactgctaaattagccattgcctgcgctaatattgtagagcaatgaagctcagttcccacaacctgacaggctctgagaaaatttcccaagttttttatacacctcacaggtgccaatgcacgtttacaatctgcgtttacattctcaaaagctagagttaaggttagcatttctgcagcatcggtatgaggaatctgatgcttcattgcatcttgtcatcatgcaagaaattgtgcacaaggttcctgcaacacttgcatgatatgtaaaaaggattgcactgggactccctcttctggaattgtggccctgtcgcatttagcagcctatgcacactgctggcatttgggagtgccatttgatgttccaggtctgaatagggccattacctaacagcatgtcctctgtaatgtctctgtgtccagctacacgattctgtctagcattgtctgcacacatttcttgccaatttaaattcaatgtcaggtatgcacaaggagacaaacaagcatgagctgaatgctttccatcaaagggtagaaggcgcacagcaccaaatacaggttctagcagtcctaaagtgaatgggctctgtataccattgtttaccacactcattttaattccttcaacaacttaaactctagtggagtgtgttcatgagtgagctgctatggattatttggatcaggccttacagaaataggaaaagtgcaaggtcctatgggctctttagccatggcagcagagtgtaaaatgctctgtattggggtctctatttctgctaccgaaggaggcggtacagatgtttctgctattggaggaggcagtataggccaatttttttcctccctctcctgttttttattttaaattggagctgtgagtggtacaacagattctttcagatttttagactcagaacatcactcctactgtccagcagaataagaaggagataatggcagaaggacagtacggactaaactccaagtggagaaaagagaaggatcaactttgagacctttttgatgagcccattttaatccttctgctctgtcccaattttccatatcaagagtgcctgtctgtgggaactatgggttatgcgtaataacctcctgcagcatttttgttaatgtctgagatctaacctgagcaccagattgtttcaacaaaactttaagcaactgcacataatgtttttcttcaatacacaaattctgccccatgttaccctgattcagaaaactttctgttcccaatacttctttagaacactgaccttatattgctcccagtacctctttagggcactgaccttatatctgctgccagcagactcatcccggggtccccatacgtcttgtcaatttcagttcctctgctccagcagaccttctttgttcacatcctcgtgtccctgtgttgtgaaaccactatggcgttgccctgtcgctgtttgaatgtcactatgccatggaccctgttggactgaacaaaggaggacgaacggggggaataaagacaagagagttcatttggaagaaggggtcgggggcaccttgctcttagtgaacaagggccctgaactttgagctttctttgttgaaagaagctcaacaaagtgaaaagagatagtgagaagggggtggttgttggtctgctgcttgctccagagcagccttgcaagactgcattcctcgaacaataggctctagatgtcccagtagataaactcaaggagcccagtgccagggagtgattgccctcagcaaaacttctggcggccagcaaagaagagagtttgcccctattctgtattcctgataaacagtttgctgtttgatcatatagcatcagtggaatgctgagttggtcacgattctccggcctccggttctctacaccaaatggattcaacaagaaagtggttgaatttatgcaactctgtagttttttctaatgaaacaagcaaaaattaaccataaagaaatgattgggtggtgagtgtataaaagatatgagtcaggccgggtgcggtggctcatacctgtaatcccagcactttgggaggctgaggtgggcggatcacgaggtcagaagatcgagaccatcctggctaacatggtgcaaccctgtctctactaaaaatacaaaaaattaggcaggcgtggtggcgggcacctgtagtcccagctactcgggaggctgaggcaggagaatggcatgaacccgggaggtggagcttgcagtgagccaagatcccgccactgcattctagcctgggtgacagagtgagactccgtcacagaaaaaaaaaaacagatgtgagtctagacttttcagaaagagcacagtgtgaaccagtgctctcagcctgcactattgacattttggaccagataataatttgttggtgatggaggctgttgtgtacattgcaggttctctaaaagtatccctggcatctgctcattaaacatcagaagaaatccctgttgtgacaaccaaaaattcctccaaacattgccacacattccccaagggtgatgggagggaagggagggttggcgaactatccctgggtaaaaaccatgggtgtgaaccatctgaaaaaaatctgtgttgaacaagccactattagttatggagcagctgagaattattttgaaaaatatctgttgaaaatcttggtcctacataaaatgaaaatattgtagaattctggtctcaatacatgctatgtttccagaaaatgaacttgtggagaaccaagatttactgatttccttgccttaccaatcagtcaccaaatcatatcatttatctttcatagcatcttctttcttaatttctgtgccactggtacactaattatctgtggtaatgcatcacaaccacagctattttattcccattaaatgccccaacaaactcatttctctcagtctcccactcccaacagtactagcaggcatcaaatttccagccttggccagaggtagaactctcggttttgtagttaagtcccctcagaaagggagaaaccaaaaaaatgacattctcatacggacagtttacaaaaaatgagcaggtccccagactttgagtatgaccttcataaagcttcctttgccctttagaaaagatgccctggatcaaaaatgtctgtctttttattcttaaattatctaagcactttctttacagagagaaagttaaaaaataaaaatgtgtgaagtcactgtcactgtgacttgcatggctcgccctgtaatccatgctcatgtgtcccagttagggttgaaaggtttgacaaataaaaccagaggatgcccacttaaatttggatttccaataaattatggtgtgtatctgaaattcagatttaactagggacttgtattttatttggtaaccccaggccaacttgctagtcaaacttcagaacaaggagtgatttaatacttccttgtgttcttcaacatatgcccaggagagacatatagaacttttaaaatgataaatgcaaaatgaatgaaagttttgcctatacattggaactagcagcccttgcatctctgctcccacttcaagaaacaacctggtacatttgaatatcagaaattccgtcaataattcagacacagtctggtcactactcactaatgatggccagactttcaatctctagaatcagaaaatctgaatggaaacatgatctattctacttgggtcaatttttaccaaccataagcctttttgtaatctatcaaatgcatttaataatagcgtaatcctcacaggatttttgtttgtttgtttgtttttgagacggagtctcgctctgtcgcccaggctggagtgcagtggcgtgatctcggctcactgcaaactccgcctcctgggttcaccccattctcctgcctcagcctcccaagtagctgggactacaggcacccacgaccaagcccggctaatttttctgtatttttagaagagacggggtttcaccatgttagccaggatggtctcaatctcctgacctcgtgatccaccctcctcggcctcccaaagtgctgggattacaggcttgagccaccgcgcccggccaggattatttttaagtataaaattaaataatgatttttcgtagcactgaccacataataaacagtcaaatatatttccattttaatttttatgatccctttaactgcagctcacattatttttcctattccttgattctaaagcaatttgtatcttcatcatgattttgcaattgtcttctgttcttttattagtttcataaaaaattgtcattctgaaaacatagggcagaaacactagcttatgtctaataatgcagtatacctaaacctcacacaaaagggatctgctgacataggagaaagggactttctacatgctcagatttaaactgcaatctgatttctagcactacatttgggatactgggttttatttacatcttctcaattttagactcctgagatgtatatgtttttaaacactacagatacaataggatcattgttgaaactgaatactgaaattcatagacctggtacacagttactgcagaatgttatatggcatgtactgatggagactagatttatttcattcatcactccattctcatgacttagagtaataactggtatattctaagtcactaataaatacgggttgtgtgaaatattggctgtgtgatgttttgcatgagcagtcaccactgcacacagggaccctctcgtatttccttgccattaatgactgagcatctctggttcacaggtcctcctgcttctcttcggcctctttagccttttcctttagattcagctgtctccctaaatccagagtgcagtccttccctgaagctctctactcaaaacagtcaaccttaacctcatcctcacttctacttgctcttcaaatggtccattccattttccatcctggatgctccattgactgcagatatcaactccagcaaacccagcacttgcttctctctcacattctcacttcacccacttaatgatactcattggcttctccccgcttcttgaaaaaaatctgttttccttgacttacaagcattatgttctcttggtttttctcctacatccctggggctccctctcagtcccctttgctggcctgtgccttcttcttttttctacacacaagctattaccctatgtatcctcttccactccctggaatttaacagagtacacgtattgatgccatcaacataaatacttccagccctggactcaccgtgagtctcttaaattccattgaccttctgattgttccacataaacgtcaataaatcatttccaaccacccacttcaaataatttcctcccacagttttccctatctcaataaacaacaccaccatccacttatttgtcaagacaaaatccttaggaataagcttgattgttctatcccctttacagtaatccattaacaacctgagcaaaatacatgccgagtctgtccacttcatgtttttcactgtctttatcactaatgcacaccaggaagccatgagctgttttccctgaggattccctgctgtgctcctaaaaagtcttcctttttacttgtgaaccccagcaatccaatccccacaaagtagctagaattagttttaaaaattgaatataaattgactctccttgtaaccatccaatagcttcccatatctgtttaaataaaattaaaatttcttactgtgaacatcagggcctaatatgatgaggctcctgacctcctctctgcatcctacctcatcatctgcctctccatttccttgcttcctttacgtcagtccctctagccttctttctctccctgcatataaattcccacaccagggttttcccccaatttgtgtctctctggaacatttgacccttacatcttcacatggctgtttacttattttgttgtctcagctgaatgtcactttctcaggtagagctgcctaagcatatgaaccaaaattgggtgaatccaattctctctttccacaaacctgatgtcttttcttcagtgcatgatgactctctgaaattttcttctttgttaaatgattattgggttattgtctatctcctctatgattgtgtaacttccatgagtagggaccaacccactctatcttactcaaatagaatgatttgaacctagaagggaggccagtacacagtagctgctgataaaaataactgtggtttacatgaataaaccagcattctcggaactcatcactgtgtggatcctgaaaagcaagaaggggctcaagctccagcactttttcattttgatgtcacactagaccccttctcttccctgtgagaaatacaggcaaacttcttctttctcctcctcctagttggaagaattcacagataaggaaacagtaatttttttctttttttttatatttgggacagagtctagctctgttgccaggctggagtgcagtggtgtgatctgggctcactgcaacctctgcctcccaggttcaagcgactctcctgcctcagcctcccgagtagctgggattacaggcaagtgccaccacgctcagctaattttttttatttttagtaaagacgggtttcaccatgttggccaggatgatctcgatctcctggcttcgtgttccgcccacctccgcctcccaaagtgctgggattacaggcatgagtcactgcaaccggccaaggaaacagtaattttaagaaaaaagaattttttgttgttgttgttaagattcatgtattttcagcagggcacggtggttcacatctgtaatcctggcatgttgggaggtaggaggatcacctgagcccaggagtttaagaccagccttggcaatatggcaaaacacagtctctgccaaaattacaataattagctgggtgtggttgcctgcctgtagtcccagctactctggaggctgaggagggaggatcacttgagctttggtggcagaggttgcagtgagcctctatcacactactgcactacagcctgggtgacagagccaggctctgtctcaaaaaaagaagaaattatctcttgtgataaacctcatagttctctgggtctgtgcaagctttaaggatttcaggaaataatgacaacatagctggggaaaaacagagagaaactggaggaagaggtaagcagaaatggctaaataagaaaagccgagagcatgatgggtgaacctatgaaatttaggacaagacccgagtaagagaatgagttcccaggacttgctcattgactttcagccctgtgagatgtgaacaatgtccacattgtctcggtaactccactcagagtatatcgtttgaatcttagcaaatttctgatatttgactatttttgacttaacaaaaatagaatttcatataatttttcctacattgactgaatctcttcttgtggagtctagttagagcatgtaggcgaaggtaatatacaaaggttaaaagagattcataataaacactaacctgggccgggttttcagaggatgccttaagttctttaggcaccaaagaacaccccataggtattatttgcctgtagggtgacgccaagtactaaagatctcagcttcagttccagggatttttccccataagaaagaaagagcagtaagtataacttttgtcagagaacctacatacgctacagggatacaggctttataaagattgtgcttcagaaagaaaagaaaggagataatggggaggccactgaatacatcctcacatatgaggaagaggggccaataccagaggttctgtggaggacataacactggatcatctaggagagaccctttgaattcccttgactcccacaaaattttcagtaaaaacctccttttgtctgacataagtcaacataataaagggaagtgctgtatggggaatttattttagcatccttatttctaaatcttctaaagaccctgaggacatgtgatgcaaaggttttattggtggagatttgagaagaaatggcctgtacacaggccccttatatggagagggcaagtagtgaagctccttttgtggaggaaataatttgggatccatatgataaagatgggcaatccctgttgaaaacgtcacatattcttaagggacatggcctgggcatagtgacaaatttagctccctactttacccactttatagtagctcagcacccacagtgtgcacttaggtcgggtgcccacagccaaagccagtggggagctcagcaccatcagtgtcactgtcagaggtgccatgcaagagcctccagccaggcagcctgaggcacaccatgctggagaacagcacaggaccaggtgccagggtagcaggcaagtctcacattcatggagaactatgacccccaccactcacatcccaaacatagggaggaagttactaatttctttgctcctggattgggtaatcccgcgttggagaaccaatcagcatctgagttcagtatcatcatcagttgctgctcagagatgcagtatgaaggtcctcttctgaaataatttccttctttaaaagattgttttaatttagtacttggaaggttcgacccagttgcatgggaaacactttaattgggtccttattgtgagccacctctgagctggtcagtgatgtgttcacaactttgagtcttgtaagaacattcatttcccacttgacaacagaagtatttgcagcagtgactgtgtttaggagtaaatgagatggagggaacatggttgaaaatcaggacacctttaatctggtccttattgcaccatatcttaatgtcgtagatttgggaaaattacttcatgtctcacagttgatatgaaggcaccatgatctttcaggtctttcaatactggaaaatgctgtgattctgtggacgcctcaagtagcaacagcccctgggtatctgatgatatgacagaatgacagctgttgactggagagtgtaatctgtacctatttccaggtagggatgtccttaataagttaaaggaaatggaaagtttgttaataatttaatctgagtaaaaggttttatataaagtgtgtctcctgatgctgcccccaagtttagtggcacctccagagcacacacaggaaggggcttgcagggaccacctatgtgcaatggagggtctgaaggtgcctttgtatagcacttgccctaacaatgtgataaggtcaactgtccaatcgaagtattcaggggtctgggagatcggtcaaggactcaaagtcagctgttgacagaacaactctgtttcaaaataattaatattttacgtgaaaagtgttcaatccctcattcccggttcccattaggatttcctcatttgattgaggttatggccctttactattatgcttcttttgatttatcataagggaagatataagaagactgtgctaagtaatatgttacagaatgttcaggaaagagaaccctagggaaaaactatgaattacatcagctgatgtaatcatgtaattttagacatataattctacatttagataattattatgctttatattaatataaatgtgacatctaagattcagaatggacttcacagtataactgtacatgtaaaactctgcattaattcacactgtaccacagttctgatgggcactccttccttatgtgccttagtgtttccagaagcaggattctcaccatgctgcaataaaaataagcattttactttgtactcagaattgtattaaaagctttctatacttcatatttttatttaattctcacatcagctcagtaaaataaacacccttttcatgcttacaggtggagagactacaacgatggagataacacaacttttgcaaagatacactagtaaatggtacactgtagatagaaccaaattatatacccctcaagctcagccactagatcatactccttcagaaagaaggagaaaagaaaaagaaacacacaaaaaagaaacaaattatgaaaaaaagaaactaattgtgatgatagtaatctaggaaaaccagctgaggttcacattagtattttaagataaatggtgatgctggcagtggtgagctgtccagagtggccggctgctgcgggaagttgcaagcggtggcggcagcatccactgccggagcagtggccgtggtgggactcttgtaccccatgtcccctgtgcctcgcgtcactgaggcatctgactgcactgccccgacccttgagcagctggcgggaccgcccccaggcccagagccttcaccactcctgcgttgctgctctcaccctgcagttgtggggagggcatggagctggggccacccttcagtggcctggggtgggatgtgggagtggcctcactttgaggaccaggccagcggcaaggccactgtcccaccctgccgagggcgcccagtttctgcgcctcaggaagaggctctacctgaggcctcccagggttttatctccgcgggtggcgaccaagcctgatgctcctgacagccaggccccggctgggatctgttccccaaggtgcctcccccgccatatcccggcgagagagagcccggggcaccctgagtgctacgggaataatttgcagagacatcacccttgccccatatgccagcctgggcccagcggggggagccgcgcacctcaggctgccagaaggtgtgacaggggctacctgcaggctccacggaatgggttggaagccccgccctcccggccctcccggccctccctgcaggcagcaggagccaggcctctctacgctctcaaggctgagaaggcccccctgtccatgcaggcttgggggtgtctgctcccactttctggcctctcccttggcctcacccgggtcccgggtgcccactctgatctcagagtggagttggggcaaagccccagtgctgtcacagactggctgggtgtgtgcacgctcagggaagtgttgacacaccagccttttgccacctcagtcacagggaagccaagggaagatgggcaggtaatatttgcagtaagtttcttataggaagcatgtcgatgggtcattgtttttcactctgacatttgtctttttacacactttacatgtaatgcaattattaatatgtgagctcttatgactgccatctgctttttgttttcttttttgtttcctttggttttttcttctctggtttcttttcctatgttccaatgtgttccttaagcaatttttagaattccatttttaaatcaatcattttttggtttatctcattgtatagtttttgtgatttatctatctattaacataacttatcatagtctactggtgctgacattttaccaatttgactaaagtgtagaaactttgcctcctttatatccctttccacttccgcatgtataatatatatttttaattttctctacttgcatcaaaaccacatctgtcaatgttgcagtttttgcctcaaccatcaaattaatttacaaaactgaagaagtctgttgtatctaaccatatttttactcacttattgtttacttttttcccaattatccaggattccttccattatcatttctattccagttcaaacacttcctttagcccttgttttaacataagtctgctagcatgaaattctcttgattttccttcctctaagtgtgtcatggccaggcatggtggctcacacctgtaatcccagcactttggaaggccaaggcaggcagatctcatgagctcagggattcgagactaccctgggcaacatggcaaaaccctgtctctgccagaaatacaaaaaattagccaggcgtggtggtgcgtgtctgtaattccagctattcaggaggctgatgtgtgaggattacaggagcctgggaagcagaggctgcagtgagccatggtcgcaccactgccctccagcctgggtgacacagcaagactccatctaaaaaacaaacaaaaaaagaaaaaaaagaaaaagaaaaaaaaagaatgtcatgatggaacattttataataatgtttttactggatatacattctaggttaacattcttttcagccattaaaatatcttgtgccacttttgtctggtctgcatgatttctattgaacaatccactgtcatttaatttattttctcctgtgcatgagatgtcatttctctcttgttgctttcgagattttttttggcataaatttctttggatttattttcgtttgggtttgcacagattcttgaatttttacatttaagtctttgtccgaatttggaaaatagtcagtctttcttcaaacactctttgtgcatcacccatttgtcatctccctctaagactccagttacacaaatttcatagcttttgttatagtcttacagatttatcagcatgaaataatactaaatattatgaacaactttacaaaaataaatgtgcatgtaataaataaattattcaaaatgtacaatgtactgaagctgacaaataacataaaacaggaagagttccacatgtcatagagaaagtaagtccattctataatgctttcccaagacaaaaccccaggttcatctagcttcagtaactatttaaaaatatttaaggaacaaacaacactaactttatacaaacttcaaacatatttgaaaaaaggaaaagcacttgcagttacgtttgatgagatctgtgtaaactttacttcaagacctgaagggaactctacaacgaataggaattaagagaccaataactcttatgagccaagttcttaagaaaatgttagccaagtgaattcagtgatataaaagatggctactatatcacgaccaagtggagtttattcctgaaatgcaaggttatgtaagcatttgagaatcaattagtgtgattcactacgttaactgaaggaaggagaatacacatgcaaccaccttgatagtcatgaaatatgatttgacagaattcagcacttggccttaatttttaaaaaatctgttttcaaacttgttttaaaaaaatatttctcaatctgagaaatgatagctacccaattgcacacattagtctcagcagtgaaatgtttaaaactgtctccttcatatctggagtactagacgagttagagaatgataacagcaagaaaaatatatcaaagagataattgcatccaggtaagatggtcattatttactcttgacataatcaggtacttaggaaataaaaacaatagacaagctcatagatttaataagtaaatttaagtaatgttgctgattacaaagtcagtatacattaaaccaattattttattgatatagtttggatgtttgtcccctccagatctcatgttaaaatgtaacctccatcgttggaggtgaggcctggtgagaggtattttggtcggggggtggggcagatccttcatcaatgacttggtgccatcctagctgtaatgagtgagttctcactcagttcacatgagatctggttgtttaaagaagtgcgactcttccccactttctctgtgcttctgctctcaccatgtgatacctgggcccccctttccttcccccataattgttagcttcctgaggccctcaccagaagcaattgccagcaccacacctcctgtacagcctgcagaaccctgagtcagttaaacttcttttcttcatgaattacccaacctcaggtgtttatttctggcaatgtaagaagggactaacacaattatgctctatagtaaacaaataggaaacaaaaccaagaaaataatgttatcgatttcctcacccctttgcttttttcttctacttttttcaacttaaatttgtttctttttattattaagttaaaagtttacacctttgatttttacatatttatctttttataatacaggcatttaaaactaaatatttttctctaaggactgccttggttgcatctcgaaaattttaaaaattcattgtagtattattttatttaaaattattttctaatttccttctgatatcctctttgacaagccacagattatttagaaatgtattattttacttccaaaaatttaggcagttttctcaatcttactaatttgtaatttgataagattgtgttcagagaatatactctgggtgattttattcttatgaaagtaattaagactagttttatagtcatagtatgtgttccatttcatggataatctttgtgcaatgtaaaaaaataaatattctgtagttatgagatgttgtcaatttatatgtcaattataaatgccaaataagtcaagatggttgaaagcattgttcctatcttgatttccttcctgatctttgtttgcacaaagctacagagatgttcgttgtcttgtatctacctccttagttcccacagcaacagtatgaagtcagaaaaagttctggaaggagaatcagctgacagggcaaagtagatatgtattattcaggggccctctatagattgtaatgcatcacacaagcccacagcgttatttacaactcagctggtttgtctttactccctcacaatctccctttctcagccaggctcaatcttccacccatgttaagattcagtagatagaccaaagaataagagtggacacttgaccctgctcgcatatgtggaatttgttcatctctggaatttggaatttttatactttttgatccacagctggttaaaattttaaaaataagattattttccagtttatccatttagtttagtctatatgtctttttgctcttatggtaacagtgacaattctcataattttccatctcctaactggcattatggtttatgatttttttccaatccatgttgatagtcctacataatttacttaaagccctgaatattattgctttctgtggttataccacagtttaccttttttctatctaaatgtagagagtgtttcttttctcccctgttacattttttatatgtcatcatggacatatgaggaaaaatttaccgagactgtaacaatccagagtggaaatactgtattatcccaactactcacagggttacaccaatatatgctcacagtgccccacacagcaccaaatgtcatcctgcagtggcagtgtgctgtcacttcacatgctgcatagtttttaggatgtacaaaatttttataatcaagacaaattaatcagtttttctttttgaatctggaaatgtttttgttattccaaactgtggctcaacaaacgaccaattttatgtctccttgggctcatgtacgattgttctttaagatggatgtttagaatgggatttttgttgctttcatcaagcgtgtgacaattgtattttgagttttaatagatactactacactgccataactcaaaatcctaataatatgagagagtctattcccttagaatcttctaaatccttgagtttaaaacaaactattgtacttgttaattttggagtaggagaactagtttattacattgctgttcgaatttggatttttctgttcattggtgagtttgagcaaatatttatatttatcgactattaggaaattctcttctatagtgagtctatatcctttgcccaattgtctatggcatttccatgaatttatttattgatagttaacaatttttcataagaaagttagcccattgtctgccttacgtgatcaaaatttttcctgagcgtcatatacttcttttaattttgttattttcttcatgcaatgaaatcagtaattttcttcaaatattttttcatttgtgtcttctggattttgtcttgcttacgaagtcttattttttaaaaaagaattattttaacagatttactgaaacataattttcatactacaaaattcactcactgtatatgtaaaatttaatgatttgagtaaattaatagatttgagcaattatcacaacaatccagttttagaacatttctgtcatgtcccaaatttctctatttatatttaagtcccactgagaccccaaaccctaggcacccaatgatctgccttttgtgtacataaatttaccttttctagatatttcaagtaaatgaaatcacacaacatgtaatcttttgtatccaatttccttcacttagttaacattattgaagttcacaagttttgtggtatgtatcatcattttgtttgttttcatttctttttgtcttttttcatttgtgtaaatgcataaggtaaagtgtagttttggtacatgcataaattgcatagtggtgacgtcagtgtttctacagtatccattacccaaatcacatgcattgtacccattaagtaatctcatcatctagagtgcaagggttgaaacttgccttgggaaaactatcctcatgttcatggtgtctcccctgccagataagtctagttttgtccccttttattgttgaatgatattgccttgcctggatgtagttgaattttgtttatctgtttactagttgatggaaatttggattgttttcagtttgggcctactacggctaaggctgttctgaacacttgaacacatatcttcgtgaggacatatgtttttctgtctcttaggtagattccaaggagtgaaattggtgggtcatagggcaaacatatgttaaactttttaagaaattgccaaattatcaggtatttgtagaatcatacactcccaccagcaacacataagaaattagaaagtctatttgtcttcaaacataattataatgatgatgatagtattagaaataacatctgtcttgtgaattttatattttctctttatgtttcaagttttatttatccaggatttatttagtgaaagaaatgagtttggaatacaacttacaaaaactgaaactaaatctcaactctgtttctaattctagactctgtcttactagcatatttaatttaaaaaaaagcagttacaaatgcatttttaaaagtaaatgtatagtatgttttagagctttatagagctagtcattccttattctacttttttttcaatttccctggaaaatacatttacctcataaaataacatgtcagcataaattgagttctaaaaacaattctgtttgcttttttgtttgattgtaattgagttaatggctgacatttaatactctctatatgtgtgtgtgtatatacacctatatatacatatatacgtgtgtgtgtgtgtgtgtgtgtgtatgtatataaagacccaaagccctgaattgagggtgcctatcaggaatctataggccttcgtgtggaagttaactcaaatacttacaacctgatagtaccacaatctatcatttccctatgatgaaatcaatctctgctactccatccaccatttctttgtttttaaaaatatatgattttgctccttttcttcccatgtgcatcaggcccactctacaaaggttgaatcctggcttgtctgagcctgtgtgatcccacggtcattccaatgtataagaaagtgggtactgggaacactctggaaacagtttagttgctccttataaaggcacacaggagaaaggagtatccttttcctgcctttgggagttgttgtgaatgaataacaaacctaaagctgctgcatgggtcaccctaccatctcaggaaagctgacgtgctgtgtgtgatagagagatgagctacgaagttccaggatcactggtgatgacactggcctgctgagttgagcatccctggagatgcccagccttggatctatcggctatgtgagataatgggttaaagaaaaataaagccactagatgtaatttcctgttattagcagcagaacacatcttcactgaaatactcattccacacattttggttctaccttgtaattccacaccacgagtctcatataaaatgagaaaatcatttcctcaacttaggaaatgaggcctctttgttgcaactctgtgatcaaacagaacagacataattatcaacttaatatatttctataggatttatactcatagggtttatatgtatgtattgtgctgctacttatgtacaagtaacatataactaaaaataagatatgcataaaaacaagttttaatttgattgaaaataaaataacagtcgtctctgacagtggagaaactatgctcaaatgattactttgaaatagacctctaaattatgtacttttggatttgacatttcatactgactctcagatagcacataatagagaatcctccgtcttctaaatttgtctttctctgaaatctgtacaagtcctttgataacactatattattgaagtctctggagtgaaacactatacactaatttacagttataaatacaaaatattgtagacggggtgaaaaaaagttctgattgacttgctagctggtttctcatctcatggttgccaagtttgtttcagttgttatagtctgttctcagtttttatgcattgcctttttaaacattaggattacttttttgattgacaagtaaaaattgtatagtgtatttatattgtacagaatgaagttttgatatatgcctatagtgtggaatgtctaaatcaagttattttacatatgcattacctcacatactcatgacatatacatgaaaatcattattctattgggaaataatcttccttccctttttcttttcttttcattttttgtctttggagccaaatggaccagatgatatttaactccatctttgagaaacatttaataatgtaatgtgtttgtggtacagggtgagtacagatgcacaggaggccatagggtttaggcaaaggggagcacaaaagttgaagatgaggcactgccatcaaagctgtggggcttcaggccaagaacaggagctgaggaagccacaagggaggacattttctgcagttgctgaaccagtagcaaccaggtcctgagaaagccctctcttgtggaagaataacagccaggagggaaagcttttcatcctgcaaagctggggcagaaagttcttctttgaatgtgtcatctgcacttcagctcaggaatcctgcaaaagacagaggagagtgttgttttcaacctgactctactaacagtttcttttcctctctttcagggactcagatgagagcactgcaggaagaagaaaaacaagttcctgagtctcccagagccaatagtcccacagagcacaggccttttctaagtggagaggaggagttttggtgtaaattgcctgatcagaaatttggatccaaagtctttcctattatttctgtctcatgccttatcacctctaccatcaattctagtgtgtccagagtttgttccttccggtgggttcgtggtttcgctgacttcaagaatgaagccgcgaatcttcacagtgagtgttacagctcttaaaggtggcacagacccgaagagtgagcaacagcaagatttattgtgaagagcaaaagaacaaagcttccacagcatggaaggcgacctgagcgggttgctgctgctggctggggtggccagcttgtattcccttatttgtccccgcccatgtcctgctgattggtccattttaaagagcattgattggtccattttacagagtgtggattgctccattttacagagtgctgattagtccattttacaaacatctatctagccacagagtgccaattggtgtgtttttacagagcactgattggtgcatttagaaacctctcctaagacaggaaagttctgcaagtccctacccgacccagaagtccagctggcttcacctctcactagggaaaccgtatctgtttctaaaagaggattaaaaggtattacctcttggctgaagtccagagtgtcctgggaaaaagaggaaaatatatacacttaaaatttatggaagcaaatctgtcttccaacacaatgtcccagccccagatctcccaccggagagttctctgtcactacaacccacaccagccagggcagagaggagcagaaacagaccatgtgacccatgaagggtaaagtgtctgtcacaggatccagtgtaattccattagtcttagtggctcttccttaatctgctccaagatctcaaaccaaaggacccctacttgttaaccttcctcttgtctctgcaggccacaagctattatgctttcacatagtaaccatgcactgatgatttctggattagcaggacattagagccgtttggggaaagaaaggctttattcagggccactcatatactgagaactaacctcagcaaagccatagttcctcctccagaaaagcctatggagagagccagctaccaaaggctcctcacctttctgattcctgaagtagatgaacagcccggccccaaggaagagcaggcccagcacaaagcccccgactccactcagcatcttgctctgtgcagattcagaccgtgctcctgagagaggaagccaggtttagtgtttattccaaattgaacctctttaattgagactctaagattcagagctttgaaaatggggaagaagtctgacccacaagaactaaaataactagccatttctggagaaaaaaaggatttcaaatcacactgaacagttacaaggttcagacatcaaactcattcaaatattacagccttgatgtaaggcaagagttcaacatctgatccacagaaagcctgagactcaatgaggctaagtagtttgtctagagtgacagagctaataaaaggcagagctgagattggactcccctcatgtcaggaaggcccctacacttctcctcttcccagatcacaacaaataactcagatcaacagcaccagaaactcagtctcagacccagaggcagtgcctggagcccggggagggtgggtgaccctgacctgtgacatcatggggaggttcaaaagagggacagcctctcctgcctggcaggcgagactgcttctccaggaggtacaggtgtttctagaaacacctacagggctacccccagtgacctgtgctgatggagatgagaacatggagcaaatgaaaataggatgtcggagaggagaaacctgacactcagggatgagcacagtccccttcttggtgggtgagaaatttatgaagtcagaaagctgctcactccattccactgtgagagggcttgtcacgcttgggtgctccacttggcaggtgtaaacctctccactccgaggaactgtttccagcatcaccagggtctggaaggtccagtctccattgtggatcaggcctgtggacaccaccccagtcttctcttcctggccattccggaaccacctgacttcaatgctgcctggatagaaaccactcacagaacagaccaggaggttatggtgctgcaggggctgggtctttgaaggatacacagtcaccttaggatggactaggagaaaaaaggtagagggaatgagtcatgaagacagagtaagtctccttgtttggctgtttgtctgcttctctgcaaacccaggctctgaccttgaccaggcctccagcacagctggccatgtggccttacagtgtcatcagcctggaacttaatcttgatagtgaggacctattagatttgagagatattgtgaaaaattgtgtttgtttcttcatagcttgaaattgtcatgcattgtcaaagtgtttacaaatctttgaaagtacagagtgtagtaattaaaactgatatctgagccaggttgcctggttcaaatccaaggtctgccttaagagtttgattcttctgtgtctcaactttgtcacctataatgaaggataattatactaatttacctcttgggattatatgaggattaatgcatgtaaaatatataaaacaatgcctgaagataaccttcaatttatgaggtcataaagcttcacactccattccactgtgagggggctcatcacacttgggtgctccacttggcacctatttatcatccttgtacaccttgacagaaatatatgatttaaaacaatgttgatagataacgggacagagttgggtacatgacgaaaccgaatatgaatttttaggaatactaccgccatgcactcacaccttagaacaccacagaaatggttctgcccctgggaaggtgggacagacagaaatgattctccaaatttttactttcccagaaaagcatgagtcataaagcagagagaaggattaaggaacgtcattttagttttgaaagttcttatatttacatttagctgatcaatgcatctcccatgcaacacaagcttaattattattaggcctatcattgtaaaatgatttttctttccagaatcacatttggattaaggcagtgtctgggactcgtcacttggggtgcttatgcccaggaaaatccctaacactagcagactctcaataaatgcaattttttttagaagtaaggagaaacctggagacaacaataccacaaaatggcagatttaagatggattgtaaatcattaataaaaattttgcaacatattttattatataaaaatgttcaaattcttaacatggaaaagaattttcaaaatcaacatacaaaccacaaactggagcaaatgctgaatcaaatatcaataaagtgttaataatctcacagtacaaagaacccacaaagtcactgagaaaaatactaagccctcgagatattaggcagtagatcattgtccattccctaccaaatacaatagggaattcttacagcagttattaaaactggccaataaataggtcaaaataattcaaaagaattataaatgaaaaaaatataaattaaaaattaaccagaaacatacattttcaaattttggtgaatgtcataataaaggtcaacaaaggggaaagtgaggtaagttgtgtcacaactattatatataaaagaataatatgtaactactagaaaactattagcattataataaaatagtaactgtgttaaaactttaattcaaaaagttagtttcacagtcatttctactatgtaaaaatatacacaataaaaaacaaaaaactagcaagaaatttagacctaaagaagcttcagagatgcctcagaggtctcctcaattcccctagaaattaatctaatgcttttacaaacaaacagcacacacttttatttcagagattacatgaagggtgtgtgccagggacagtctggaactggcctcctcacattatcccaaaccttccttacccctcagctctcctcccctaaaccttcaccccaaccacacaccccttacatttcccttccctgcatctctaaggacccgagacaatcaaggtcacctctctctccagccgcccgcacccacctcccttgtcacctccccacagagtcctccaagaataagaagcagccccctcctgcctcccctcccacaacagcctcacagacacagacaaatccacactctacacacacacctgtgccctcagaactccttgctcaggatagagaggattctaaatgctcacagatggcgctctctctctctgtctctctgtctctctctctcacacacacacacacacacacacacacacacacactcagattcccagctcacagggactcaggccccgccccgcgccgcgctcacctcgccgctgcactgtgaagctctccacaaccccgtagttgtgtctgcagtagttgtccacccggccccgcttctgctccaggaggtccttctggctgttccagtactcggcatcaggccgccccagctccgtcaccgcccggaactcccccacgtcgctgtcgaagcgcacgttctcctcctggttatggaagtatctgtccaggtaccgcacccgctccgtcccattgaagaaatgacactcagacgtagagtactccaagaaacgtgctgtggggacacgaacgatccagtcacacaggcggcctcctgagaagacactgacagtgacgccgccatccggggctccctgggtggggtgcgggcactgggaaccttaaccggcccccgccgcaacgcccaccaccagcagcccaggggctcctcctctgtcttcctgaggcgaaagggggcctgggggaccaggcgggaaaaccacgtctgatccccaggcttttgggacccccctccctacctccagcctgttctggagacctccaagcaggagctggaggaggatccgcccagcaccgcagcccgcgccgcctcctcctgggagcctccaccccaaagacactctgctccttctctcatcccacatgtttaccggttccttaaacagcacccaccgcgttcatcctctgaacccttccttagtgctgaccttgtgcctggtctgcgctgcctctaggaatccaaacgagggaaaacagacctctccactccgctgggggagcttaaagagcagtgaaagtgatggcccaacaccaaacacacaagagcttagacaggaatgagaaatgtcggaagtgtggagttctagaacagagaataataggatgatctcaattacattagggtgccagagaaggaccctcttaatagtgacggttcagatgtgacttgacaggttaagcaggtgtgagccagggggcagagtggagcccgtgtctgtttggacaaaacgggaggcacatttcaggtttaggaaatcccatgtacaaaagcttgaattgatgaacttcttcaaaaaactaggagaaagttcactaaagcagagaggctgaggggaaggagggtaacagattagcccggagaaatcacaggagccaggtattgaaaagcctcttgggtggtgttaggattttggatttatactaaggacaattggaaagtacagaagagttttaaggagaataaaatcatgatccctgtgaatgtccacaaaccttcctttgcatttctaaatccacaaagctcagaaattcagttaaaaaaacttgtttccacaactcatctgataagggtaagtggtcgaaggtgtctcagagctcttattggtgacatgtgcttctgtactttcaatacatataaatatacatacatatatgtgtgaaaatatgcacatatgtaaaacactatatttttgatgtttttgtctttatgtttgaagtgtgaaaatgacaaaaataacttaaaaataatccttgggtaaaagcgaaatgaataaatagaagcattttacattgtgaataatatcaaatgtagaatcactacagaaatctgaggcatgttagtgagaaataatttcagcagcatcactatttgtgacttacaagggcaagttgttgaaagttaatagagatagtgatgaccgacaactcatgaaaatgttgaaaaatattgcataaggcaaaaaataaatatgaaaatattgagcttgcattgactaaatggattcaacaagaaagtggttgaatttatgcaactgtctaattgtttataatgaaacaagcaaaaataaaagactaaactgtgtggtgagtgtataacagatgtgagtctagaattttcagaaagagcacagtgtgaaccagtgctcttagcctcagcactattgacattttggaccagataattccttgttgatggcagaggctgttctgaacattgtgggttctctagcagtgtccctggcttctactcattgaatatcagaagaaacccctgtttgtgacaaccaaaaattgttccaaacattgtcaccgttccccaacgatgatgagagggaagggaggggtggtgaaccatccctgggtaagtaccacaggtgtgaatcatctgaaaaaatctgtgttgaacaagctactattagttatggagcagctgagaattgcattgaaaaatatttgttgaaaatcttggtcctatgtaaaaagaaggttttgtagaattctgctcccaatacagtgctatctttccagaaaatgaacttgatgagaaccaagatttaatgatttccttgccttaccaagcagtcactaatcatatcatttatcattcacatcatcttttttcttaatttctctgccactggtccactaattatctgtagtaatgagtcacaaccacagctattttattcccgttaaatgccccaactaactcatttctttcagtctcccactcccaacaatactagcaggcatcaaattaccagccttggccagaggcagaactcttggttttgtagtcaagtcccctcggaaaggaggaaaccaagaaaatgacattctcatacagacactttacaaaaatgagcagctccccagactgtgagcaagacctgcagaaatctccctttgccctttagaaatggtggcagagaggtgtgcaccctggatcaagcaatgtctatctttttatccctaaattatctaagcactttcttacagagaaagttaaaaataaacatgtgtgaagttgctgtcaccgtggcttgcatggttagcactgtaatccatgtccatgtgtcacacttagggttgacagatgtggcaaataaaaccagaggatgcccagttaaatttggattttcaataaattatggttttgtatctgaaattcagatttcactaggaacatgtattttatttggtaactctagcccaacttgctagtcaaaccttagaagaaggagtgatttaatacttccttgtgttcttcaacacatgaccattatagacatacagaacttttaaaatgataaatgcaaaatgaatgaaagtttccccaatacatcggaactagcagcccttgcatctctatccccactctaagaaacaacctggtacatatgaatatcagaaattctgtcaataattcagacacaatatagtcactactcactaatgatggacaaactctcaaactctagaatcagaaaacctgaataaaaacatgatctcttctacttgggtcaatttttaccaaccataagcctttttgtaatctatcaaatgcatttaataatagcgtaatcctcacgagattactgttaagtgtaaaattaaatgatgactcttcttagcactgatcacatactcaaatacattcccatttaaacttttatgatccctataactacagctcacattattttttgtattccttaattctaaagcaattactatcttcatcatgattttgcagttgtcttctgttcttctatgagtttcataaagaattgtcattctgaaaacatagggcagaaacactggtttatgtctaataatgcagtccagctaaacctcacacaaaaggcatctgctgacatagaagaaagggactttctatatgctcagatttaaactgcaatctgatttccagcactcaatttgtaatactgggttttacttataacctctcaattttagattccagagatgtatatgtttttaaacaccacagatacagcaggatcattattgaaattgcatactgaaattcacaggcctggtacacagtcactgcaaaatgttacatggcatatactgatggcgaccggattcattttatttatcactccattctcatgacctagagtaataactggtatattctatgtcactaataaatattagctgtgtgaaatactggctgtgttaaatattggctgtgtgaccttctgcatgagtagtcatcactgcacacaggggctttctagtatttcctcgctaataatgactgagcatctctggttcacaggtcctcctgcttctcttcagcctctttagccttttccttttgatccagctggctccctgaacccagagtgcagtccttccctgaagctctctactcaaaacagtcaatcttaacctcatcctcacttctactcgctcttcaaattgtccaatccagtttcctccctggatactccactgactgcaaatatcaactccaccaaacccagcacttgcttctctgtcacgttctcacttccccctccgcttagtggtactcaccacaattggcctctcccttctccttgaaaaaaatctattttccttgacgtacacgcatcatgttctcttgatttttctccaacatccctgggctctttctcagccccctttgctggcctgtgccctgttcttttttctccacacaatccatctccctatgtatcctcttccactccctggaatttaacacactacacgtattgatgccgccaacataaatacttgaagccctagcctcaccatgagtctcttaaatgccattgaccttctgattgctccacataaatgtcaataaatcatctcaaatttaaacaaaacttttatttccaaccacccacttcaaataatttcctcccatagtttttcctatctcaataaacaacactaccacccacttatttgtcaaaacaaaatccttaggaataagcttgattgttctaccccctttacagtaattcattaacaagctaaggaaaaatacatgccaagtctgtccactttatctttttcaccgtctttatcactaatgcactccatgaagccacaagcctgttttcgctggagaattccctgctgtgctcctaaatagtcttcctgaccacttgtgaaccccaacattccaatccccacagagtagctagaattagttttaaaaattgaatataggccgggcgcagtggctcaggcctgtaatccctgcactttgggaggccaaggtgggtggatcacgagatcaggagatcgagaccatcctggctaacatggtgaaatcctgtctctactaaaaaatacaaaaacttagccaggtgtggtggcatgtacctgtggtcccagctactctggaggctgagtcaggagaatcgcctgaacccagaaggcagaggttgcagtgagccgagattgtgccactacaatctagcctgggcaacagagcaagaccccatcaccaaaaaaataaaataaaataaaaataaattgaatataaattgactctccttgtaaccatacagtagcttctcgtatctatttaaataaaattcagtccggccgcggtggctcatgcctgtaatcccagcactttgggaggccaaggcagacagattatctgaggtcaggagttcgagaccagcatggtcaacatggtgatacccgatgtctactaaaaatacaaaaaaataaaaattagccaggtatggtggtgggtgcctgtaatctcagatacttgggaagctgaggcaggagaatcacttgaaccagggaggcgaaggttgcagtgagccgagattgcaccattgcactccagcctgggcaacaagaacgaaactccgtctcaaaaaaaaaaaaaataggccaggcgtggtggctcacacctgtagtctcagcactttgggaggctgaggcaggtggatcacgaggtcaggagatggagaccaccctggttaacatgacaaaatgccctcactactaaaaatactaaaaattagccaggcgtggtggcaggtgcctgtagtcccagctactagggaggctgaggcaggagaatggcatgaacccaggaggtggagcttgcagtgagctgagatcacgccactgcactccagcctgggcaacaaagcgagactccatcttaaaaaaataaataaataaataaataaaataaataaataaataaataaataaataaaataaaattcaaattttttaccgtggacatcagagcctataatgatgaggctcctgactttctctctgtgtcctacctcatcttctgcctctccatttccttactttctatacatcagcccctctagccgtctttctctctctccacataatttcccacaccagggctttccccccatttggtctctctggagctttcgtccattagatcttcatgactgtctacttattttgttgtctcagctgaatgtcactttctcaggtagagctccctaaacatatgaactaaagtaggtgaatccatgtctctcttcttcacaaacctgatgtcttttcttcagtgcactatgactctctaatattttattctttgttaaatgcttattgggttagtgtctgtctcctctattgttgtgtaacttccatgagagtcgggaccctctctgtcttaatcaaatagaatgatctgaacctagaatggagccgagtacacagtagctgctaagaaaaataagtgtggtttacatgaataaaccagggtatgggaagtgataactgtggggatcttggaaagcaagaaggggctcaaactccagcactctttcattctgatgtcacactagaccccttctcctcctggtgagaaatacaggcaaacttctttctcctccttctagttggaagaagaattcacagataaagaaacagtgatttaagaaaaaggacttttttttattgagagtcatctctttttgcctgggcacagtggctcacatctataatcctagcatgttgggaggccaaggcaggtggattgcttgagtccagcagtttaagaccagcctgggcaacatggcaaaatctcatttctaccaaaattacaaaaattagctgggcgtggttgcctgcctgtattcccagctactctggagcctgaggagggaggatcacttgagcgtgggaggcagaggttgcagtgagcctcgatcgcaccactgagctacagcctgggtgacagagccaggccctatctcaaaaagaaaaaaactatctctttcaatggatctcatagtgctaaggatctgtgcaagctttagagatttctggaaatgataacaacatagctggggaaaaataagagagaaactggaggaagaggtaagcagacatggctaattaaggaaagttgagggcatgatgggtgaacctatgaaatttaggacaagaccccagtaagacaatgagttcccaggacttgcccattgactttcagccctatgagatgtgaacaatgtccacattgtctcggtaaccccacacagagtatatagtttgaacattattaaatttttgatatttgattatttttgacttacaaaaatagaattttatataactcatactacgttagttaaatctcttctgtcatgtctagttggagcacttaggagatgtaggagaaacaagtatagaaaggttaaaagagattcataataaacactaacctgggccaggttttcagaggatgccttaagttctttaggcaccaaagaatacctcataaatgctctgtatctgtaaggtgactccaagtactaaagatctcagcttcagttccagggatttttccccacaagaaagaaagagcactaagtataacttctgtcagacaacctacatacactacaggggtacaggctttataaacattggagttcagaaagaaaagaaagtagataatggggaggccactgggtccatcctcacatatgaggaagaggggccaacaccaaaggtcctgtgggtgacataacccaggatcgtttaggagagaccctttaaattcccttgacttccacaaaattttcagaaaaaacctcctttgtctgacataagtcaacataataaaggcaagtgctgtatggggaatttattttagcatccttatttctaaatcctctaaagaccctgaggacatgtgatgcaaaggttttattggtggagatttgagtagaaatgacctgtatggaggccccttacacaagtctcatggagtgggcaagtagccaagctccttttgtggtggggaaattatttgggatccatatgataaagatgggcaatctctgaaaaatacgtcacaatttcttaaggtacatggcctgggcacaatgttaacaaaactccctattttccccaccccatagtagctcagcacccacaatgtgcacttacgtctggtgtccccagccaaagccagtggggagctcagcaccatcagtgtcactgtcagaactgccatgcaggagcctccagggagcctcagacacaccatgctggagaacaggacaggaccaggggccagagcagcaggcaagtctcactcagggagaactatgaacccctccacccacattccaagttatagggagtaagttactgatttccttgctcctggattgggtaatctagtgttggagaacgaatcagcatctgagttcaatagcatcatcagttgctggtcagagatgctgtatgaaggtcctcttctgaaacagaatttccttctttacaggattgtttttagtacttgaaaggtttgaaccagttgcatgtaaaacactttaattggggcggtatttttagccccaattattttagctctgtgctggtcagtgatgtgttcacaagtttgagccttgtaagagcattcatttcccacttgacaagagaactgtttgcaggagtgagtgtgttcaggagtaaaggagatggaggggacatggttgcaaaccaggagaccttaatctggtcctgttgcactatatcttactgttgtagatttgtgaaaattacatcatgtctcacagttgaaatgaaggcaccgtgatctttcaggtctttcaatactggaaaatgtgattctgtggatgcctcagggagcagcagccctgggtatctgatgatatgacagaatgacagctgttgactggagagtgtaatctttacctatttacaggtagagatgtctctaataagttaaaggaaattgaaagttagttaataatttaatcttagtaaaaagagttttttcaagtgtatctcctgatgcttcccccaagtttagtggcacctccagaacacacacaggcaaggggtttgcaggggccacctatatgcaatggagggtctgaatgtgcctttgtatagcacttaccctaacaatgcgataaggtcaactgtgcaatccaagtattcatgggtctgagagatcgatcaaggactcaaagtcagctgttgacagaacaattttgttttaaaataatattttatgtgaagagtgttcaatccctcattcctggttcccattaggatttcctcatttgattgagactatggccctttactattccacttctcttgttttatcgtaagggaatatataagaagactttgctggcaggacgtggtgggtcatgcctataatcccagcactttgggaggctgaggtgggcagatcacttgaggtcaggagttcaagaccagcctggccaagatggtgaaaccccgtctctactaaaaaaaaaaaatagaaaaatcagctggtcttggtggtgcatgcctgtaatcccagcttctcgggaggctgaggcacaagaattgcttgattctgggaggtagaggttgcagtgagttgggagcacgccactgcactccggtctggttgatgcggcgagactcagttttaaaaaaaaaagactttgctaactaatacgttacagaatgttcaggaaacagaaccctagggaaaatctgtgatttacatcagttgatgtaatcatataattttaaacatacaattctacatttagatagctattatgctttgtatttatataaatgtagcatctaagattcagaacggacttcaaagtataactatgcagataaagt

SEQ ID NO: 29043 - DNA, 184242 bp, Homo Sapiens
tacagtgacagccagtgaggaacagggacctcagtcttacaactgccagaaactgcattctgccacctctgtataagcctgaaggaggattcaaaatgaaaacacaggtttaggaagaccggaacagagattccatccacatcatgcccagatttctgattaagaaactataaacaacaaatgagtgttatttggccaggcgtggtagtgcacacctgtatcctaacatttgaggagctgacacaggaggaacacttgcagccaggactttgagaccagctaggataatatagtgagacactcgtctctacatttctttttaattagctgggcatggtggcacttgcctgcagtcctagctactctgaagactgaggtaggagggtcccttgagcccaggaatttgaggctgcagtgagccatgatcatgtgactgcacttcatcctggatgacagagggagactctgtctctaaaaataaatcaatgaatacaataaatgggtgctgtttaaagccaatgtttgtgacaatttgttacccagtcttataaaattcatacacagactcaaaagactcctggaatgaactgatgaattgatacgcacactagttacataaaataaaatcttttttaacttttttagtgttttacattttataattttctgtgatgcaatttaatacactcataattcattcattcagccaagaaaaaataatttagtccctacaatgaaccaggtatgccctcatatgctcaagtgcctgacattctagaagcttcacaagaatgaggtggagccactggagtgttttaggtggagaaatgacacactctgactcatagtagcaggaccactatagagagaacactcatgtagcaggtcatggaacagtgctagagccacagttcaggagtgagagggtggtggggattaaggggagaagagggcctgagggatgagagggacggagggaagggctggaggagcaggaggtgaggaaaaggagcagaggaaagaattccaaagcagcagaactcttaggtttaaacacattgttttatagattttaatacatccatctacagagcttcgctgggtgttctttgcagttggcctttaatatcttatgtgggtctgcctagaaactaattgttttttatgttaatcaggtttaaaaaatactaagtattcctaaaaaatatacactccactcacatgtggatacttcctaaaaacaggcagtgcgtgagcactagtgaggggcattgtgactgcactgaacacttacaactgtgaggtgaataaagtttgtgctggctcctggttgcaacatatagtaacatagtgtggtactttgtcttgaggagatgtcctggactcacacggaaacttagggctacggaatgaaggtaaatttaaaataaaacaagcgggagtcacagatacactgtctgggaaagtgaaacttaagagctttgtgagtcgtgttgtaatgcttttagatgcatttatataccaacaggccaaagtcacattttttaccgattagattcctgatcattcaggggttaccaaggttatgctacccactatagttaataaacaaaaagcaaactggtctctattctatctcatgcactcaggcacaacttttccagatttaagggggaaaaaaaaccctgtctttacacctacaatcccagggcgagctcactctctggcaacaagctccctggggtgatttttcttctagaagagtacaggaggacaggcaaggagtgggaggcagggagtccagttcagggacagggattccgggatgaaaagtgaagggagagggccagggaccttgccgagggtttctccctggtttctcagacagctcctgggccaagactcagggagacactgagacagaacgcttggcacaagagtagcggggtcagggcgaagtcccagggcctcaagcgtggctctcagggtctcaggccccacaggcggtgtatgggttggggaggccccgcgttggggattctctcctccttctcctaacctgtgtcgggtccttcttcctggatactcaccgggcggccccagttctcactcccattaggtgacaggtttttagagaagccaatcagcgtcgccgcggtcctggttctaaagtcctcgctcacccacccggactcattctccccagacgccaaggatggtggtcatggcgccccgaaccctcttcctgctgctctcgggggccctgaccctgaccgagacctgggcgggtgagtgcggggtcaggagggaaacagcccctgcgcggaggagggaggggccggcccggcgggggcgcaggactcggcagccgcgccgggaggagggtcgggcgggtctcaacccctcctcgcccccaggctcccactccatgaggtatttcagcgccgccgtgtcccggcccggccgcggggagccccgcttcatcgccatgggctacgtggacgacacgcagttcgtgcggttcgacagcgactcggcgtgtccgaggatggagccgcgggcgccgtgggtggagcaggaggggccggagtattgggaagaggagacacggaacaccaaggcccacgcacagactgacagaatgaacctgcagaccctgcgcggctactacaaccagagcgaggccagtgagtaactccggcccagggagcagatcacgacccccacctccatgccccacggacggcccgggtactcccgagtctccgggtctgggatccaccccgaggccgcgggacccgcccagaccctctacctgggagaaccccaaggcgcctttaccaaaatccccgcgggtgggtccgggcgagggcgaggctcggtgggcggggctgaccgagggggtggggccaggttctcacaccctccagtggatgattggctgcgacctggggtccgacggacgcctcctccgcgggtatgaacagtatgcctacgatggcaaggattacctcgccctgaacgaggacctgcgctcctggaccgcagcggacactgcggctcagatctccaagcgcaagtgtgaggcggccaatgtggctgaacaaaggagagcctacctggagggcacgtgcgtggagtggctccacagatacctggagaacgggaaggagatgctgcagcgcgcgggtaccaggggcagtggggcgcctccctgatctcctgtagacctctcagcctggcctagcacaaggagaggaggaaaatgggaccaacactagaatatcgccctccctctggtcctgagggagaggaatcctcctgggtttccagatcctgtaccagagagtgattctgagggtccgtcctgctctctgggacaattaagggatgaagtctctgagggagtggaggggaagacaatccctggaagactgatcaggggttccctttgaccccacagcagccttggcaccaggacttttcccctcaggccttgttctctgcctcacactcaatgtgtgtgggggtctgactccagctcctctgagtcccttggcctccactcaggtcagaaccggaggtccctgctcccccgctcagagactagaactttccaaggaataggagattatcccaggtgcccgtgtccaggctggtgtctgggttctgtgctcccttccccaccccaggtatctggttcattcttaggatggtcacatccaggtgctgctggagtgtcccatgagagatgcaaagtgcttgaattttctgactcttcctttcagacccccccaagacacacgtgacccaccaccctgtctttgactatgaggccaccctgaggtgctgggccctgggcttctaccctgcggagatcatactgacctggcagcgggatggggaggaccagacccaggacgtggagctcgtggagaccaggcctgcaggggatggaaccttccagaagtgggcagctgtggtggtgccttctggagaggagcagagatacacgtgccatgtgcagcatgaggggctgccggagcccctcatgctgagatggagtaaggagggagatggaggcatcatgtctgttagggaaagcaggagcctctctgaagacctttaacagggtcggtggtgagggctgggggtcagagaccctcaccttcacctcctttcccagagcagtcttccctgcccaccatccccatcatgggtatcgttgctggcctggttgtccttgcagctgtagtcactggagctgcggtcgctgctgtgctgtggagaaagaagagctcaggtaaggaaggggtgacaagtggggtctgagttttcttgtcccactgggggtttcaagccccaggtagaagtgtgccctgcctggttactgggaagcaccatccacactcatgggcctacccagcctgggccctgtgtgccagcaccttctcttttgtaaagcacctgtgacaatgaaggacagatttattaccttgatgattgtagtgatggggacctgatcccagtaatcacaggtcaggagaaggtccctggctaaggacagaccttaggagggcagttggtcgaggacccacatctgctttccttgtttttcctgatcccgccctgggtctgcagtcacacatttctggaaacttctcgagggtccaagactaggaggttcctctaggacctcatggccctgccacctttctggcctctcacaggacattttcttcccacagattgaaaaggagggagctactctcaggctgcaagtaagtatgaaggaggctgatccctgagatccttgggatcttgtgtttgggagcccatgggggagctcacccaccccacaattcctcctctggccacatctcctgtggtctctgaccaggtgctgtttttgttctactctaggcagtgacagtgcccagggctctaatgtgtctctcacggcttgtaaatgtgacaccccggggggcctgatgtgtgtgggttgttgaggggaacaggggacatagctgtgctatgaggtttctttgacttcaatgtattgagcatgtgatgggctgtttaaagtgtcacccctcactgtgactgatatgaatttgttcatgaatatttttctgtagtgtgaaacagctgccctgtgtgggactgagtggcaagtccctttgtgacttcaagaaccctgactcctctttgtgcagagaccagcccacccctgtgcccaccatgaccctcttcctcatgctgaactgcattccttccccaatcacctttcctgttccagaaaaggggctgggatgtctccgtctctgtctcaaatttgtggtccactgagctataacttacttctgtattaaaattagaatctgagtataaatttactttttcaaattatttccaagagagattgatgggttaattaaaggagaagattcctgaaatttgagagacaaaataaatggaagacatgagaactttccacagtacacgtgtttcttgtgctgatttgttgcaggagaggagagtagatggggctgcgcccagtgggtgctcaggccaccatgaactttatgtggtcactgctcagctgggtcatctttgctgctccattgtccttggcccttcagtagaaccttgtcccaccaggacctgtgatcacatagacttggatatcacctaggatggtccctacacgtagaagttcctgtgttatcagaagaaaaattttcagacccctacacctcttcccctccttccaggtctctttcaattgtattttccatctttttttttttttttttttttagatggagcctcactcaggctggagtgcagtggtgcaatctcaactcattgcaacctccacctcccgggttcaagcaattctcctgtctcagcctccctagtaactgggagtacaggcacatgccacaatacccagctaattttttgtatttttagtaaagacgggatttcaccatgttagccaggatggtcttgatctcctgaccttgtgatctgcccgcctctgcctcccaaagtgctgggattacaggtgtgagccaccatgcctggcttccccaaccttcttaaaggaagcagattctgaaacttcccgagaggagaggtcccagagtttttcattgtagtttactttctgttggaactcctcttctgctctctctcctactcttcttcctgccctgagttgtagtaatcctattgctggctccaaaccaaactcatggatttgtaaagcagagtctaatttagattcatatgtggttggataattggagccataagccttgggttatctttcctcaagagacaaatatggttgtgtgctgcagtgtgcaggaggattggtgtgggaggagggagggagggaggacacaaaagcagccctggtgagaaaagcactggtgcatttatatccacatgagataatattgttccacagcggctacaaaatgacatttggcctgagtctacattaataaagatattgcctttagaataggggggcgcactacagtaatcatccattcaagtggcatttgttgtctgctaggtatttgactgtttttgcatttagaaaacatcgttaaagtaaaaacagaaaaatttctggccttgtcgtgtatacattctagatgcaagcttgtccaacctgcagctctcgggatgcatgtggcccaggacagctttagaatgtgacgatttttttgcttatctgtagtggcagatatcatgaaaattatccatgcattttttttcttttttctatttttttctgctcatcagctgtcattagtgtattttttgtgtggctcaagacaattcttcttcctatgtgacccagggaagccaaaagattggacacctctgcaggcagatgatatagtataagcagagtaggaacagaaaatgcttgagttagaaggtggcaagtgctgtgtggcaggtgatccagagggtgggctgtgggtacagggaggtggctgttgtgctgggtggtcagcatgggccttgttgcaaatgtgaccttggagtaaagatttgagggatgtgaggagttgtctacacggatgtctcagaaagttcttttcaggcagggaaaccttcagtgcagatgcactagggcaggaaattgtctgtgttcctggaaggaggaagaggccagaagtgttgaacagagagaaactgaaatgaagtcagaggtgtgcccagagcaggttgccctggagggtgtgggaaggatgttgacctttgctctgaatgacatggggagttagaggacagttttggaaagtgggacatggtaggacttatcctttgaaagcttctctctggctgctgtgctgagaacagaattgagaggtgggggactagtgaggcagtgggaaaaacggtgggaaaggagtgcagtattccaggatggagacgtcgcttaccttgactggggtgtgagcaggggaaatagtgggaagtgatgggattctggatgaattcacagcacttgctaatggatttatctgtggtgtgagaaagaagaatcaaggacacccacagtattggactgagtgagcagaagggtggagctgctgtcaatggagatggggagactctggcaggagcatacagaggagagggcattgcaggcatccagtggaggtgacatctacgaggaatgaaggtgaggggcccagatgcctctgcagctacagattcatcatccaatcactatcctacttccaccacccctgtgtctcagagccagagcattgattctcccctgtgctgtctgcacaggtaggtgaaagtcagggaagttatggtctgctgttggttataataagtcacagattattgtgctttctcagataattaaagaaataataagagaatttgtaactagaacacttactgagaagaccacaataatgcaaagttttttattcatctaaagaaggcaacagaagaaaaatagttgagcaagaaagataatattagaaggcagtaaatgaaaatggacagacttaaacccaatgaggtcaacaatgacattaaacgtaatggactcagacactccaattacaagacaaatagtgcagagggataaaaataaataagtaaataaataaataaccgtaggctatttacaaaagccataatttcagtagaaggtacagaaaagttgaaagtaaaaagatagaaaagaaataccagacaaacattcatgaaagaccacatggagatgccatttagaaaaattacagcacatgagtctcctgagacatagagtacatgtagacagctcacagtgtctttttcctttttttcagagacagggtctgttgcccaggttgaaatgcaatggtgatatcagaccttactgtaacctcaaactcctgggctgaagcaattctcctgcctcagccttctgagtagctaggacgagaagcctgtgccgccacacctggctataatgtctcattttctcatttgctgtggtgtgaacaaggaaacaatatcataccatgtatttgacttgcagcaggtacacaacaaatgtcaggtgaatgaagaaataaaaccacttagtaatccaagccatatccacatttacattttacaggtgaggagcaacatcccagacaagtaaagtaaaataaattgatttacatcatccagagcagaatcgagaacacattccctgtgctaaaggaatcagaactctactaggggtcatagcagatatcatgcaagtcacatatgttaattactagaactggagttgatacattttgagatatactaaaccaagggtttggaaggattaactgaatgcagaaataaaggaagaaaatagatttgtttaaaagatggttagaatctttaaagaaacaacatctttttaaagtggccttatgtggaccaaagcagagatgagctcaaatgtcaggtgggaaaatgcttgactaaatgcagctctagacccaagggagacctaaaaatcctgggacattttcggttgtcacgtggggattggtgggagggggtgagtggggtgctgctggcaaacctcccacaatgcacaggacagaccacaagggattctctgtctcaaattcttaatagggctgctgttgagaaacccgcccgagaggtaagtgctgtaatgtcctcaccatttcacagattaagaaactgaggcaccaggaagaaaagtgtcagtaggaccagagctgaaggttgaatccaggccacctggctgcagggtcttggcttccctggttaagtcagggacccaggagcccaccacaaacaatcccagctgcgcggtgccttcatggtctgtggcgccccctggtgttgacactgggcctgtggccaaatgaggcttgagggaaaaggaaaacgggtttaggtagcgggatctccttcaggctctccagatttcaagccatgacttacactcagaaaaaataatgttcaccttaattatctccccaaccctgtttttcccagttccggccagtaccctccctcgactccatcaacatcagtacctgccagatgcccagcacccaccatgtgaggagtgaaaatgccccaggactaaaggacaagatgacgttccaccccagccatcccgcccctcctagagctctagctctgtgcatttagtgcttaggcttttaacctggggtccgcgaacccactttcccatgacactgcgtgcagaagtgatgttacatgcacacatgacttcattacaggacattggatattaatattcatccgatcaactgggggcccaagataccactcttcccccaacagtttgtgatcctctgaattaaagaaagggcagagattgagggaggccctaactccaaatcttctaccacttctagggaagtgctgaaaagaagtgcaaggtactcaacccgctctgggaatacagcaggaaagcagagtgttcatggatttcgaattccatcaaagaaatacaactttggcaaaatatccaagtcacttttctaagccccaggcagcagctcaaaacaaacaacaccaaaaacaaaacaaaatctcggcccaggtgaaatcattgaagacataaaactttgtgagacctgtatttagagcgaaggacaattcaatttagggctgcagcagaaaacccctacatcatattgggtttttcctcatcatgaagttctcctggagggaccttctcccttcagcagtgcatagtgaggccatttctgtgtaaaaagatagaatctccttggattcctgatgtttacatttactactcacttctttgactttgtagatgccaacttcacattcaacatctttcaattattttctttactttgtctaagcagagaatttaaacttgtttctgaagcagaaaaccagggactggttatttgagctatcaccccactctgtggctctcttatgcaataagcataagagattgtgggccaacagaatttgtagcaagataaacataaacccttcatttcagcctatgtttctgtttgtctggtgatgttccagtcttgctccagtcttaacattttaaaaagtataattttacttaaatttcattttataggaagtcatatgtattcatttctgttaggtttctcagtgaaagcctcctcaaaacaactgtgaagtaaagacatgtaaataaattcatggtgctcccatgtattcgtgctcattgcatcttacaaatgtgtcagccccactgcaacagatggtgcatcaacaaatggtgctggaaacctggatatccacatgcaaaagaatgatgctggacaaaatttatgcccttccattacacccttttcaaaaattaagtcagaatgccttaaagaactaatcttaagagttaaacctgtaaaactcttaaaagaaaatactgagggaaagtcttatggtcattagaattggtagtggtttcttggctggtgaccaaaagtacaagcaataaaaggaaaatgacaaataagacttcatcaaaatgtaaaaacttttttgcatcaaaggacgctattaagaggtgaaaagaggctaggcgcagtggctcacgcctgtaatcccagcactttgggaggccaaagtgggtggatcacctgaggtcaggagttcgaaatcagcctggccaacatggcaaaaccctgtctctactaaaaatacaaaaattagccgggcgcagtggtgggcacctgtaatcccagctactcgggaggctgaggcaggagaatcgcttgaacctgggaggcagaggttgcaatgagctgagattgcaccattgcactccagctggggcatcagagagagactccgtctcaaaaaaaaaaaaaaaaaaaaaaaaaaaaaaaaaaaaaagtgaaaataaaagaaactgcatagaataagataaaatatttgccaatcacatatctgataaagaattaatatccagactacatacagaactacaacttaacaatagcaaaacaatctcattcaaaaatgggtaaaagacatgaatagacaattctccagagaagatacacagtaaggacataaaaataaggaattccaataaggacatgaaaatatgctcagcttcactagtccaggtgttggtgaggatgtggagaaaatggaatgcttgtgcactgctgctgagagtgaacaacagtgcagccatcatggaaacaggatgacgctttctcaagaaggtaaacatagaatttccatatgaagcaacaattccacttttgggtgtataccccccaaaaattgaaagcaggtatgcacacagataattgtacagtcatgctcatagcagtgctattcccaatagccaaaaggtggacgcaacccaagtgtccatcagaggatgattggaaaaacaaaatgtggtgcatatacacatggaatattaatcagccttaaaagtgaagaatatttggattggatggaaccttgaaaacacgctaaataaaataagccaaaaaaaaggcaaatatgatatttcacttatatgaggcacctagaataagcaaattcacaaaaacagaaagtagaatacaggttaccaggggctgaaggcaggaacaatgggcagctgtcatttaatgggtacagtctctgttgggatgatgaaaatgttctgaaaatgcatgttggtgtttgtgtaaccaccatcaattgtaaatgtgcttaatgccaatgaattgtacactgaaaaaaattgttagaaggtaaatcgtatagtatgtgtgttttaccacaattttaaaaatatatatcaacaccaaatccaatcacttctcactcctctgccacctccaccccagaaccatcctcactaggatagaaaaccggaagggccttccagctgggctgcctgctgactctcatgcccactgtccatcacccacacaacagagagagcgtgcctttccaatgggaattagggcatatcctatgaacgctccagctccttcccttcttaggcacaaggaaaccccagtttcccaccatttcctatgcactccttatcacagggtcccctctggccactttggcctcatcccattactctcagcctagctcattcttctccactcacaccagtttcttgtctactccaccctgtctctaccacctgcccctgctgtgactcccacatgcatgtgctgcccagtgatccacatggctcactcctcacaccattaaggtccctgcttaaatgtcccatggtcaagtgttcagaaatgtcttgtccagtgacctcttctgaaatctatcccctgccattcccaccaccgccaccaatcttctaacccaagcatatttttcttaatggcaattatcagtgatactatgacaggttttatttgtttattgtctgttgatttattaaggttaccaagaaagaaagaaccaatagcataggtacatagatgatagatagataatagatagatagatgatagatgatagatagatgttagatgatgatagatagatagatagatagatagatagatagatagatagatagacagacagatagataggtgatttattgggctaattggctcacacaattatggaggctgagaagtcccatgatagactgtctggaagctggagaactagaaaagccagtagcgtggctcagtccaaagtcaaagccctgaggacccagaatacagaacaggaggataaaggggctcactggtgcaaaagtcagagtccaaagatcatcgaacctggagttttgatgtccaaggcaggagaagaagggtgtcccagccccagttccagagagagagacagagacagagagagacagagagacagagacagagagaaattttacttctatctacctttctgttctatctgggccactaggtgattggactgtggctgcccacagtgagagagcatcttccccaccagtccacccactcacatcccttccagaaaaactctcacagacactggtttaatacttacaatttgagtagtctataatttatttttttgagattgggcttgctggctggagtgcagtgttgttcatggctcactgcagcctgaatcttccaggcttaagcaaccctcccacctcagacacccaagtagctgggactacaggcatgtgccaccaagcccggctaattcttttgaattttttgtagagacagggtttctctatgttgcctaggctggtcacaaactcaggggctcaagcaatctgccagcctgagcctcccaaagtgctggaagtacaggcatgagccaccatgtccatcctgagtgttctatgaatttttaaaatcacaaccatagaagaatcttcatgtacaaacatgcttgtcaaaatattctttaccaaaagacaagatgaaagcacatggatctaaaagaaccctggtgacttctccttgtttgagatgggatgcagcttctagaagtgtgtaaattttatgcagactttatgacatggaaaactactttcataataatacattcaaaaagcaacttcaaaataacccacaaccactctgggaggccaaggtgggtggatcacttgaggtcaggtgttcaaaaccagcctggccaacaagtgtaaccccatctatattaaaaacacaaaattagccaggcgtggtagtgcacatctgtaatcccagctactcgaggggctgaggcagaagactcacttgcatccgagatgcagaggttgcagtgagccgagatcatgccactgcactccagcccctgggggacagagtgagactccatcttaaaaaaaaccccaaaacttatgaatgcaactttctacaatgaaagcatatataaaaatatatacatagaaaacaaaagaatggaagtcagcatcactgcagaagatagctccagggatgaccattcacactgcagtccaggaagtttcaataatatgatagcagtggttctttggaggggaagcctgggtgatatttctttcttctctgcatttttttttctttaaaattcaaccaggtgttgatgtgtgcattttaaattcttctgtaatcaaatacattttcatatttctaatgtagaaacatgtatttttaacattcaaaataaaacatttgaagtaaaataacaatgaaaagtggctgaacactgtggtgggcacctgtagtcccagctactcaggaggctgagataggagaatggctcgagctcacgaatttgaggctatggtcacacctgtgaatagtcactgctctccagcctggagaacatagtgagacctcatatttaaaataataataataaaaagaagttcagatctccttccaatctcaacctaaaacaaatttctcatttgaagtccatatggcagaaatgcctactgatggctcctccagagagtaaaaaaaatattgttcctctacaatccatgactcatccttctgttacagtgttcacctgggcaatgaagtcaacactgagaatatcatcaatttatggaatactgattatctcttttatagatatataaattataattatgtatatatatattatattataatatatataattaccatcacacctgagagagtgagatggattcttttcttccacagatgaaaatctgagtccctgagaacctagggttttggtatgggttcactgaaaatgttggccttgagaattaggaaacagcttcctgcaggcctgcctggatgtgagccacaccaatggagtctccacaacagcaggaagagcaactgagaaccctggaagcttcacacttgtaatgttccatgtccagcggcattcagttgatggatgggccaagataagaatacagctccttccttcaattgggggtggcagaggggtgaatcagtcagctacacataatgtgtgtggtgtttctacagatatctttaattactctgctgagaactccacctcaaatgtacaaaaactctgtactcactggtaagcaggatcctttttaggaaagcaaaggactttgctgacttaagcaaaacattttctctccaaatgaattatcctgattggataatctcttactcccactgaaattagccccagagttgcatttgagcatttgggtcaaagacagaaagtcattttgagggttgggcctggctgatcttggacaatgttctgaaagagggctttctacttgcagaagaacaaaggtttgctctgggtaggagatgatgtcctgagaagaaaagacagataggcagattctcaagcaaactcaggagtttactatacaaaagattttggaataccttcctcagcctctttttcattgtggtaaaatacacataaacacaaaggataccaccgtaaccatttaaagtgcacaatgcagtgacaattcgtatgttcacaatgttatgtaaccatcatcactctctagttccagagtgtttttatcacctcagggggaactctgcacccattaagcagtcaccctccatttccacctgccagcagaccctgtcgccacaaatccacttctttctctatcgacttgcctcttatgaatatttcacaaaaatgggctcataagttacgtagcctcctgtgactggcttccttcacttgtcttgttttcaagattcagcaatgttttagcatatgccagtgctttattcattttatgaccaaataatattctattgtaggaaaaaactatatgttgtttctccattcattggtcgatggacattttcttttaaatcaaataggaaaaacaagagaggaattacaaatatatatatgtgtgtgtgtgtatatatatatgtcttgtagggttgagacaatctcagtcagctttttttaacctgtgaatgtcgtgatttctccatcatttctgaaggagagttttgcagacatacaattcttggttgatagtccttttactttctcagctttaaatttgtcatcccaacgcctcctgaaccccatggtttctgatgaaaatttgtatgttaatcttattgaggatccattgtacctgaaaagttccttctctgttattgctttcaagatggtctgtttgtcattggtgtagactggttgattataacgtctctcagtgtggacttctaaaattcttgctgcttaaaatgtatcaagtttgttggatgagtaaaattatatttttcatcaaatttaggagatttgaagttattattcctccaaatagccattcttctttttctctctcctttctttgaggattcccaaaatgcatatgcttggtgttgtctcacagttttcttaagttctgttcatttttcttcataatttttttttatttctgcacctcaaactggataatttcaattgtcttacctttaagcttgccgattcttcattctgcatagtgaaagttgcttttgtaaaaaagtaaatagtaaatttactctagtaaaatatagtaaaaaatagtaaaattactctagtaaatttttcatttcagttattgcacttttcagctccaaaatttctatttggtttctttttaaactttctatctttttattgatgttctctatttgagttaagatagttcttctgatttcctttagttttttgcccatagtttcctttagctctgtgaacatatttaagcagtcaattcaaagttgtttgtccagtaagtatgttcaatggcctttctcaggaacagtttctgtcaattcctcttttttcttgagaatgggtcttactgtctagtttaattgcatacctcatttttattttgaatactaacatgtggtgactttgaaaatcatgttttctaaactatttttgtatagactgtattctttattgtgtgtcatcactgaagtctctattctgtaagcttagtggtcaactcatgatttgatagatatttcctgaaacatcttcagccaaaaagaaataagaaaagaaaattcaatctttttatctgggctctctgtgtgttttggggcatgccctcaacactctgctgggcagtttacaatactgctttggccttcatttcctacttgtgcagatattgaaagttagcaagaggtgtgaacacagggcattctcaggtgctttgtgagtctgtgcgacatactggtcatggaggaggctatacagattcccagggatatggaagcttttcaaaacccatattcccatctcactcacccagtttctcctccaggcttttctgtatgtctattacctttctcatgtaatatatttttgccccaagggggcagctgctggttcagtggcacttaaatggttttagcagatgccctctgcctctgtgacctaagagagttctgagtagggaaaataaatgcaaaccatttattttctttttctttcttttttttctttttttagacaaggtcttgctctgaagcccaagctggagtgcagttgcacgatcctggctcactgtagcctcaacctcctgggcttaagcaatcctcccacctcagcctcttgagtagctgagactacaggcacatgccataatgcccagttaatttttgtattttttgtagaaatggagtttcaccatgttgtctaggctggtctcaaactcctgaactcaagaaatgcacccagctgagcttcccaaagtgctgtgattacaggcatgagtcaccatgcccagcccaatgtaagccatttcttatcatccttcacggagtcacccaacaggaaaaggtagacaaccacaacactttgagaacatggtccactcggctcccactggcattggagcccacactaaggaaccaggctgctgtcttcaagatcactactgacttgaacagggaggaatgggccaagggtaagatatggtgccacaaagctctgctcctgagttccagttgatttttctggacttgctaggttgcaataaacctttgatgatttttcagggttccaatgcagttgattctttatcaacccaatcagaatatctggtggtaggtccaggaattcttgctttaacagctctccgagggaattttttttttttttttttgatggagttttgctcttgttgcccagggtggagtgcaatggcatgatcccggctaactgcaacctctgcctcccgggttcaagcgattctccttcctcacctcccgagtagctgggactacaggcgcgagccaccacacccagctaattttgtatatttagtagagactgggattctccatgttgatcagtctggtctcgaactcctgacctcaggtgatccccccacctcggcctcccaaagtgctgggattacaggcatgagccaccatgcccagccaagggatttttttttatagtgatgttttacaagcacattgtctctgtgcagaggtggcccttggagttcctatgccactatgttctctgatgtcactcctcagccacctttgaattgtgcttatgcatcagaattcctgatctgctaagtacttccaggaaactcattcaaatggtaaacatcattaagcacctaccttattctgggtactgtgctctatggagttgagcctcagataaaagactcaaacttccttggacttcatagaagtcaaaggtgggggtgggaagataaataaagaaattatagcacagcatgttatgtattttacatgacttttttctttgaaagctacattattaatattttatgacagtactgagttacatataccaaagattacaaattaaaatttatgctttctttctctcttttgttcttacatatttctctgttcttgtagatattttgaaattgggtattatggagacagtgcaacagtttcatttatatgataatgttttgttttacctttattcatcaaagagagatttgtcagctgcaaatttctagtttgacattggttttctctcagatctttgatgattatgttgcttctggctgctgtggctgacaggggatagtcagttacattttaaccagttgcttcttagaggatctgtgtttctcctgtggcaaattttaagatatctgtttctctttaacatcttctgttccagtgcagtatgagtaaatgtggatctctttttattcacagtgctatgatactgttaggtatgagttctaaatttctcttaaaataattaacatgtcagtatgttcaattctttgccctctacttttaaacttaacttcctcataaagcaaccttttttgatcacctgttccaccctgactcatcctgattacttgctccagcctgactcattctggttacctgctccaccctgactcattccagtcacctgctccaccctgactcattctgattacctgctccaccctgattcatcctgattacttgccccagcctgactcattccagttacctgcaccaccctgactcattctgatcacctgtttcactctctttaaattagccaatctgaattagtttagcctgtgcggtctaaccctagccaataggggaataacacagcagcaggggccacgtgcatcagggataagaaccccttccccttccttgtccaggggtgtgctcaccattgctccatctgtgagggcacacccttgtatagaagtaattgccttgctgagaagaaaaaaagaaaattttatatttgagtgctatttctttgtggcatcaagactttatttacaataatacatttccttaatattttaagataacctctttctggaatgcctctttccatttactcacttctcttcttctaggaatttaattagagaagaattaaattaaacctcattcaaccaccatatacactgtggaatccaaaataatggcctcacacatatgtccaagccctaagacgcagaccatttagatatgttactttacacagcaaaagggactttgctgatatgattaagagcatggacctttagatgtggagattattttgtattatttgagtggccccaatctgattgcatgatttctttaacctggagatgactggagaaatatgggtcagatggagtgctgaatttcatctagaataatttcttaatctagtaaaataacatcatctctgttttttattctttaattaagtggcaaaatgcattaaaaggtttaaagtttaaatatccttgcattcttgggctatataccttggtcaagacagtctgtttataacacattggttaatacagtctactaatatttttcttagaattttcacatctaattaattaaaagtgattttcctataataggtaaatagtagaagggggtaagtctcttattttacaaattattcaaataatacatgaaaagaaatggaagactgagactacaactctttgccatccgtaatgaatgaacagatctagccactgaacagcaatgacaattttcatcaccaaagggaaataaccagtattaaactcttccccttgttgaaaaacatgatatagtaccaccaaaactcacggggaaaaaaatctgaatagatgcaaacctctataccaaactacaaatttctagaaaatgcaggtaatagagatgcatattaaaccatagtttggggtgcaatccacaaaatacaaacaacaggaaactctaccagacaatattaatttcaaagggataacctatagaacaaataagaacaaaaaacttatttttaaaggtaaaactaaactatcatttgggatgatgaaaatataaaatagaacaaagaagtgaggaccacaaaagtcaggatgtgattgatttttatttgaaaaaataaaaatttactattgaactgggtcaattgatggggcttctaggtcagctgacaaacttctctctctttctgatggttaaagagtgtttactgttgattaaaggtcaccattttaagattttttttcttttatgtcacctgtgttttatgacaaaaaggcgaacgcagaataaaatgagttatggggcacggttcctgttctgcacaaagcctcctccccatcctcctctctggacactgagcacccagaacaaccggcagccccaggacccctggcagggctgtctcattactgagtgtgcatccagctccacggttcctgttctgcacaaagcctcctccccatcctcctctctggacactgagcacccagaacaaccggcagccccaggacccctggcagggctgtctcattactgagtgtgcatccagctccacggttcctgttctgcacaaagcctcctccccatcctcctctctggacactgagcacccagaacaaccggcagccccaggacccctggcagggctgtctcattactgagtgtgcatccagctccacggttcctgttctgcacaaagcctcctccccatcctcctctctggacactgagcacccagaacaaccggcagccccaggacccctggcagggctgtctcattactgagtgtgcatccagctccacggttcctgttctgcacaaagcctcctccccatcctcctctctggacactgagcacccagaacaaccggcagccccaggacccctggcaaggctgtctcattactgagtgtgcattcagctccacgtcgctggagacaatgtccacagtttattttttgagtcctggatgaacctgacaggacatagctgaggggaagcctggcccagtctgcaggctttggccatcagtgcagagggaggaggtcctcatctctccactggagcagttacaaccagagcctcctctctgcgtgggagtgaggctcggtccttcccctgaacacggtgacagggatctctccacaggtagagatgacaccattcctcctgtaacatggtccaatctcacgcttgttctgctttacaagaaagttgacccacgctggtgtcccctgaagaaatcacaggcacagaggagggacaggtggatttcagggctgtgcttgatctgggaaaggaagagtgcagaccgccaggtggcgccgctgcactgcttctgcgcccaggaggtgcctgctggggctgagattgaaggtggggagaaggatgtcacagctcatcgcacaggttcccggtaaaaatcctcctgcccagcctagcgggctctcccttaatcaactgtagcgaaaactgtctccttctcacgttcctggaaggtgctttttgacacaagaaagaggatgtgattgctagggtcatcatgtcattgtttattgtgttgccagtaaagtgaaatcaaaatacacaataaataataaaataacccatgataagccaatgtttataatgtactaacaccactgagccagtgtttataatgtactgacacactccaagtgtgggcacagctgcagacatgccttgtctcttgggtcaggacacagggtagagtgaaatggaaagaaatcccagtcactgcagaaaagggcccccatggaagaggcctggcagggaggccagctgtcccagggccgccatatttagggatgactccccctttctgggcagcactggtttttttaattatttttgcattcacagtagttctgaaattgcaggatgctgagacccagcactggtcagttacaccgtctcttcttcaccattaaatactgtgccaaacagcaccttcatacatttccatcctcttccaggagagaatcaaaacaacaatggacacattgatgcatgcaaaaatactttaaatatgtgctatcagaagtagctactaaaacattaattccactgaaatgagggaggctgtaaaaaagaaaaacattgcatacccgtattcacagcaacattactcaccatagccaagacaaggaagcaaacaaagcacccatcaacacatgaatagatgaagaacatgtggtctatgtaggcaatggaatatgattcaaccttaaaaagaaggaaattctgttacatgctgcaacatggatgaacctggagaacaatgctaagtgtaataagccaatcacaaggaaattccaatactgcgcaattcgttatatgcggcgtctaaactcttagaacctgaaagtagaatggcggctgccagtggttaggctggggggattcttgaggagattttcagcgtagagtttcagttttgcaagatgaaaagttctagagatctgttgcataacaatgtgctacagttcatattatagtactctatacttaaaaattgttacgataccaaattttatataatatggattttggcgcaatgaaaaaaataattagctctgataccaacttaggaaaagagcacatgaatttattgaaaatatattagcatgtgcttactatgaaaaagagatgcagaaaactgtgagacaaaaagagagatccttgctaccccagctattatccatgaaccagcagaaccagcatctcatgaaactggacagaaaggctcacaggcccagccttgacaggttgatcagtctgcatttgtcaggaccccaggtggctccactgcatgtaaagcaccgccccagatggtggtggagggagatcctaggaaggtgactctgtcccacaggtagaagcctccagtccagatgggagcagccagaagggcccaagagggacatttccaagaaagtaaaattaatagaaagttcaaagtctctaatttcttaacagagtcacagaaatggaacagatatcaaagttaaattaatgagagttatctagaacataaacaaaaacaaaggcaagtattaacttgaggaagaacaaatactacgaagcaagtgaaaagtagtcaagttgacatatgagaagatgagtcacggaaaaaaacaaggagtggctgaattaaacataattactatataaatatactgggaaaaggaaagaacgggaagagtgaaagagaacaagtgatggatgtggtgacgtcgcgttctcccgggcggggccggaggcggtacagatgagggacacattcatggctaacgggacggctcttctcgttctgcgttccgcttgcggtcggtagtctctcctccccgcccatgggcggtggttggaggcaggggtgcggaatccggccgacctcgctgtcctcgccctctaccttgtggcgtcggtggggttggggagatgagttctccgacgcagcaggcacccctgctcatctcctatggctgttgccttttgggcagcccctcttcgcggcggtggggctgtcccgccggcctgtcacgttgcccttccctgggcttgtgaggattggctccgcttggacctttgcggtgctcccggagccctccaggttgtccctccggtgccggaggccaagcggtggtgtccttcctgttcccagcgccccctcctcctgtcgctgctgcagtgcctgtgtgtgggtcctgaggggttttggggaggtagaatatttttatttatttaaataaattaaaaaataagaaaaaaatacaaaaagaaagagaacaagtaatcttaactattgattccaccatcgtgcagtgcaatagtcaatggctgcaactgaaaaatcaagcaatgttaataaagaaatggtgctttggtgcttagatatgtgaaagtaaagtcaaaagaatcagctgaaacttgaaagtggttgctccctagaaaggcagaaatagagaagagaggactctccctagaaaggcagagaagactctcatttttctcagaaagtcctgcacaaatatttactctttccattatgtgcaattgtaacttcgaataaaataaaaacaaaagcttcagttaacatgcaagtttatgcctaatgacaactttgtttaacaatgataaagggctaaccaaaatataaaaacacttaaacataaaacagcatgtataaatgtgtatgtgacatcaaccctgaatacaaacttgaaagaatatgtctataaacaactctggatagatagcccatgaatgaattccccactccagcatctttactggttgtcctgtgagcctaggcagggaggggaccaggacctgactagggtccctaatactcttgcttccaggcaagtcctgcatgcactcctgctgcaccaagggctcccatccctgccttggtctgtttcataggtgctcccctaactctctgccaccactgccttacctgggtggagctgaggccgccctgaccaagaagagcaccacccatctatgtgccccaaaaccagaaagtcaaaagaaaccttgcaacagggtcaggaactatcccacctccccacctccgaatcagtctgaactgatggcgggagatgctgatgcttgctttactcatcctcattccctgtgcatttatttttcactaattcagtccacatctcctagaagcagactgacccctacccttcataatcaggaaaccccagagcactttttatcccctccagaatataacacttcagctctgcatcatcacatgagggctccaactctgtagggcaggtgtactctcacagcttcaggccctgaacatttgcttcagatgtccccccatccctttccagacctgtctgtgttgctctgaatctgtccttccctgagaactggcggggagatatcagggaggaggggagatttctttgtgctatgtcaacgcatctagacagagctctcattctcccttgaacctcaactctatccgttcccagacacttgaaataaaacacagaccagaaatgtctatttaaaagctaaatatctatagtataaaatatgaagacagagtagaatggggtaatgcaggagagtgtgacagggcgaggggacctcaacgtgccaggaaagttggtccttggctccccggaggagccgtcaccaggacactcactcataaagctcacctgtgataatacaactacatgacattaatgtattaaaatataataaaatcataacaaaataacaaaaataatatggcacagctgcaaacacctcatatatactaacacttttcatccacccaaccacaagaaataaatgttgttacattccctatttcatagatgagaaagctgagccagcaagagaaaaagtgctggtgagacctgggcagggcgttcaatccaggccgcctggctgcagagtgtaggtgccctcagtagagccagtggacctgggagctgagagcagagactgaaatcccagctgtgcactgccctggtgttctgtctgagtcaggtgttgatctgggccttgcaggctcatgtgctctggagaaaagagaaaaaatagtaagtgctcccctgggtgcacagtgctgctttttactccctgacgacttctccctcctcagtcagtcccaaatcagattcaccctttctccgagggaagatgatgtctgcacttttttctccctcccatggcacttttcccagcccctgccagtcccctcccgtgactccatcaacatcagcccctgccctgtgcccaccagccaccatgcaaggaggaaaagagccccaggaccaaaggacaagacctgggaaaaacccagtgccctcccctcctctcaagcctggccagctctgacagcaggaggactccccaaagagaggctctggccctggctccatgtccttccaggactgggctgggtcacacgcacagtccttctcttcctcagtccccagtcccacctcacctgtagagacacctgcacacaaaggcaggccctaaacactgtggttctgccctccacctgcagctcagtgctcctccacttccagccctgagcaggcagctcctaactgggaagcccattaagaatcccatcagcatggcaggcccagcatggaaacatgtagctgctatggggtctgcagctgacctgaccctgggaacccccttgctcaaggagcctaccctgacccccaggcccatgacctgcacttgggccatgcttgctccagcctggtccactcatccctggaagcacagcttctccccagggctgctgcttggggaggctgaaaggccttcctctcctgttcctagcagggattcctagcagggattccacccaagccactgccctcacagcccataggggatcttcttctccctgtggagtagaaagtttcttgagacccctcagcctgaggctgcctctgcccaccctttgcacttggggattgccactgccacagccactgtctcccacatggaccgtcctggagagggagctccacatttgagttcctgtttcatttgatatgggttacaacattagtattggtggaaatccttttaagacccagctgaaactacgaacatctttattggacatcagcatttaaagcaggaattttgagaaattagcacataactttcacacccctttcctggccagtgccccagtaacctacaaggcaaccgttcccgcccacggggaaccagaactgacaatccctcttcaggagacaccacaggtgagagcaggagcgaccacagacctgcactgcccctgctgtgggtgcctcctggacagggccctcttgctgcagggcaggggatgaaccatcccatctgcccaggcctgaggggccaactgacagtgcaattaggttcaaggatgagaaatcaccaccccctgccagatacacagaagtggggaaatggcagaaagactcgggtttcccggacactccaggctctcagtgtctcctgcactgtctctgtctttgcagaaacacaaaacttgctgcttgctcttttcccctcccttcaaacaacctgactgtgcgggaaatcatcctgaccatctctcactccaaactcatcaggcagtgcttattctttcaaaggtattttgtgactgtgcaagcaaatataaatgtatatgtgtatgttctttctccctttgcacacaaattttagcaaactacatatgcttttctgtaccttgctgttttcccttaccattgtatcacggagaccatcccatgaagaaatatcaagaactacactatgtctttcttttttttgttcaaaaatttcttggcaatccactgtataggcatgcattttttaaaatagagattaccctttttgaatgcaatgctttttaaccagctccctactgataggcatttggattatttctttcagagaacaatttgacatcatgtagcatcatatgggaagggtgcagtgaccccactcttacatgcatatcctaggggagctcacatattcttggaaccagaaagcaatgtcccagcatgttcattgcagcagtgtctttaataaagactatgtagaggtcaatgaagtggggaagagataaattgtagcatattcctcccatggaatactatctagcaatgaaaacaaatgaactatttgtgtgaacattgatccatctcatagaccatgttaacggaaaaagcaagcaaatgcataacaaaatcagcaagaaacaatttataaaaagtctaaaagtaaagccaggcaagggggcctatacccataatcctagcatcttgggaggccaaggtgggcagattgcttgaccccaggcgttccagacaagtctgggaaacatgataaatccctttctctacaaaaaatacagaaattagccaggcatggtggcgcaaacctctagtcccagctactcaagaggcctagaagggaggaattgcttaagcctggcaggtagaggctgaagtgagttgtgtttgtgccactgcatttcagtccaggtgacaaagtgaaaccatgttaaaaacaaacaaacaaacaaacaaacaaaaacaagagactttttaaaacttagtaagaatataggggcatacagcaaattcaagacacacattcaccaacagttcttgctttgctcagtacagtattgactgaaacacatgcataacagaactgtggaaaatcagggctatctacacgtgtttctgttattttctatgtatactacatacagccaataatattaaaatgtcacaaattgacaaacctgggtggcagcttcacaaagatttcttataattctctattttttcttctagctagaactaccttataataaaatttgtgaagtgaatccacagaaattgagcaaaataaaaaggagtcgttgagtgtgaggaaagctacagagaagtaaagacaggtggagacatgacaatactgagcatgttagtgaccttcacagtaactgacttcctggaggagtgtgagcttaagccagaatgaagtgatagaccgtgaaagacggatgaaggagtaggagcttctggaggcaaacatggtatgtggttggctggattgggatatgtggagggactctgaacattctgctttaggtccagcactagagaaagaggactcatctttatttagcaccttccacaatctgtagagaaatctgaaacattgcaaaagaagatatatgaatggccagttcagggaaaaatgcaaagtaaaaccacagtgagaaaccactaagcaaccattagaatggctaaaattaaaatgattaataactataaatgctagcaaggaagtggaacaatctgtactctcctccattgcctataagaatataaaacatccattttgaaaatcaatttcatatcatctaataaagttaaacaagctagtcctctacagctaccatttccactcctaggtatatactcaagagaaatgaagattttgtcgataatccctgcataaaaatgttcatagtttctttatttataatagtaaaaaacaagaaataactgccaatgtacaaaaatcatgattcagtcatacaatggaatattatcagcaatgaaaatgaaagaactactgatacgtgcaccaacatggattgatcacataggtattacaacaagcgcaaaaagccagatacaagggaggccatatgggatgagtagatttgtatgaagttttaaaacaggaagaactgtgctatcctgacagccgtcagatcaatggctgctggaggcatggaagctgagttgaagggagaaaaagggatctttatgtacattgatagtggcaagagtaatatgctgtattggtcaaaattcattgataaatttgatgaagatctgattattttggtatatgtacattttataagcttaaaaagcttataataaaaattataaagttgctgataaaaataataattaaaaatattagcaacaaaatccaacagtataccaaaagaataatacaccatgatatatccatatatggcaaacacacagctaacattatactgaatagggacaagcttatagcctctcctccaagatctggaagaaggctaagactcccactttcatcacttttattctacacagcactagaagtcctagcaagagcaatcagccaagaggaggaaataaagggcatccaaattggaaaggagaaagccaacttagccttattcgcaaatggcataatcttttactcagaaaaaactaaatattggccgggtgcggtggctcatgcttgtaatcccagcactttgggaggccaaggcaggcggatcacgaggtcaggagatcgagaccatcctggctaacattgtgaaaccccgtctctactaaaaatacaaaaaaaaaaaaaaaaaaaaaaaattagctggtcgtggtggcgggcgcctgtagtcccagctactcaggaggctgagacaggagaatggcgtgaacccaggaggtggagcttgcagtgagccgagatcgcgccactgcactccagcctggatgacagagcgagactccatctcaaaaaaagaaaaaaaaagaaagaaagaaaaatctaaatattccaccaaataaatggtgagaactaataagcaaattcagtaaaattacaggatacaaaatcaatgtgcaaactttcagagcatttatatatacaagcaccatataatctgaagaagaaatcaagaaagcaaaactatttataaatcataaagaggataaaataactaagaatcaatttaccccaggaagtaaaacaaaaactataaggcactgatgaaggaaattgaagagtacacaaaactggaagagccaggcgcagtggcacatacctgtaatcctggcactttgggatgatgagacaggagaattgtttgagcctgggagttcaagactagcctgggaaacatagtgagaccttgtctctaaggaaaaaaaataaaacacacaaattgggagaattaatattgttaaatattaatttaaaaaatgaaacacataaatttcatgcacataaattgggagaatattgttaaaatgttcatactacccaaagcaatttacagattcaattcaatccctatcaaaataccaatatcattattcacagaaatagaaaaaattatgaaattcatatggaatcataaaatatcccaaatagccaaagcaatcgtgagcaagaagaacaaagctagaggtatcacacttcctgaattcagaatacaatataaagttatagtaaccaaatcagcatggtgctggcataaaaacagacacatagactaatggaatacaaaagagaactcacaataaatccatgcattgatagccaactcatttttggtaaagaatatacaatggagaaagaacaaaagcaacaatggagaataaatggagctgggaaaatgctaccagatgcagaagaataccactagaaccctgtctcccaccatatacagaaatcaactcaaaatggattaaagatttaaatgtaagtcccaaaactataaaactactagaagaatgcttacaggaaacactccagacatgggtctgggcaaagactttatggctaagacctcaaaagcacaggcaacaaaaataaaatagacaagtgggactatattaaactaaatagcttcagcacagcaaatgaaacaatcaacagaatgaagaggcaacctgttgaatagagaaaatatttgctatgtattcatccagcaaggaactaacatctagaatatacaaggaacttaaaaaactcagcagtaaaaacacaaataatccaattaaaaaatggacaaagtgtctgaatagatgtttctcaaaaggagacatacaaatggtcaacaggtatacgaaaaacactcaaccttattaaatatcaggaaaatgcaaatcaaaactataatgaaatatcatcttatcctatttagaatggctactaataggaaataaaaaataatggatagtggtgagcatgtggagaaatgggaactgttgtacactcttgggaaagtaagtacagcaattatggaaatcagtataatgatttctcaaaaaacaaaaaatagaactactattggatccaacaactccactcatgggtatttatataaaggaaaagaaatcaatatatcaaaagactacctgcacccccaggtttattgaagcactattcacagtagcgaagttatgaaatcaatgggtgaattcatcaatgggtgaatgaataaatggtggtatatatatacacaatggaatgcaattcagccataaaaaagaatgaaatcctgtcagttgcagaaacatggatgtaaccaaaggtcattacgttaggtgaaataagccaagcaaggaaagacaaataccacatgttgtcactaatatgtgcgagccaaaaaggttaatcttagggaggtagagagagtagaatgacagttcccagaaactgggaagaatgtaggggtgggaaaatatagagatgcaggttaatggatgcaaatgtccaattatatagagaaaataagttctaatgtttgatagcacagcagactgactaaagttaacaaaaatgtatatttcaaaatagctataagagtggatttggctgggcgtggtggctcatgcctgtgatcccagcactttgggaggccgaggagggtggatcatgaggtcaggagatcgagaccatcctggctaacatggtgaaaccccgtctctactaaaaatacaaaaaaaaaaaaaaaaattagccgggcgtggtggtgggtgcctgtagtcccagctactcgggaggctgaggcaggagaatggtgtgaacccgggaggcgaagcttgcagtgagccgagatcgtgccactgcactccagtctgggtgatggtgtgagactccatctcaaaaaacaaaacaaaacaaaaaagagtgaatttaaaatgttctcaacagaaagaaatgataaatgcttgaggtcatggataccctaaatatcttgactgatacacacattctatgcatgtatcaaaatgtcacatgtatcccataaatatgtacaaatattatgtaccaattttaaaaaatttaaaaaataaacaacacaatatggggcatttaaaaaggtacaaaaattatgagcatgataaaaatttggcaaatattttcctttttattaagatctttttcattccataagtttaaggagaataaagcccataaagcatcagaagaagttgctctcctgaaagagactcttctgctcagttaaaaagacagaaacagaatcactggagtgagtaggactttggagaactgcacagcaccatgtcttagtgtctgggattacacagacttagggaggaggcctcaccttccgggaagaactaaactttggttctctttcttgttttttctattgcaagaccaaaattttagaaaaccaagagaaagatttcagccaaagggttgtactgtctattactctcttttattttttagaacatccattgtcaaagacgatccagactgttacaagaggaattgtgttcctacgccaccaaaatccacatgttgaagccctatgttgagaaggcagaagaagtggccatctacaagcaaaggaaagaggcctcagaagagatcaaccctgcagcaccttgaccttgcacctgtggcctctggaactgtgagacaacacatatttattatttaagtcacccagcctttggtacgttgttatggcagccctagcaaattaaaacagaaatattaccttttctaccttgtcctatgtatgaacatgagatttttttaggagtatgaattacctgagatttcaaaagatagagtgaggcaattgaaaatagatgatatagggtcatttccaagcctctgagtgtcccctggccaccacagaaaaatgaagatgttcccattccctttcagtttcacacaaagcaaaagttgtagacctaaactgacatagaatcgccaactgcattaatttatttgagataatgaggcagctagttttgcccaaatttcacagaaagacgatgaacaagtagtaagctaaagaggcttcttttgcaggggattgcaggtattatatgtttttctcctacttttaagatacattttcctaaaaagttttgtctaggagtaaatgtcatcactttgctttttttcctcccaattgaatcacttgttcctccctgcatttcagtaatgttgctagcatggaggtgtttgtccatgattcacagatgattcaaagagcagagagcttctcctgaggtcacacagcacgtaagcggtggaacaatggcaggcacatgactctctaggcccctagtccagttttctgggttctatgagaattgtagcccttggtttctgttacatgtggttctcttttgagccagagaaggaggacgcacagtgagaagaaagtgccagagccccaagtcctggcttagatttactgggctggggcatggagacagaggctgccactgattctcttaactccagcttctattaccagtcactaagctgaaagcaggaaagtttatcttctgcacttggtccatcagaactaagatggcagaaagccccactatctaccacggaaaagacaagggtccctcttaccttgaaccatgacccagctttctaactacatatgtttttctgcacatgtagctatttttcttctcatcaagctccagtactcacagtgcaaacacaggagatactgagcctgatgctctgatggaagctctgagttgagattttattttatacttaggtgcctctgagtcattagagttttttgcctgactccactctggccccatttcaatcaaggtctatatgctctgggacctctccaggttctcatcagaaatgaaaaaaaaaaaaaaaaaaagccatgtccagctcctgggtcctccctgatagcagtgagaggcagcttctaatgggagagagccttggggtgaccaaggcctcacagacttcattattcctggaccacatggctccagcctcctgatcacaatggatcagtggtcttagattccgctccaatatttgaagttttttgttcttcggcctcggcaaatgctctctggttgagatgaagggaaaagacacagagacgcaaaagctgtgactgcatggaactctgtccaaggtacctcccggtgttctcttacttatgttggccatgtcctcatgaatttagtgaaatgggcatgttgtctctgagtggaagtgaggggacactactgggcagagctccatcaaagggtggctggtgtcctctataccatttatctacacatgttggggtttttctagcatgaaatgtcccagaggcagccaaacccgaagcttggctcctccaaggaatgagtgtgagtatcatagccctggccaatgagcactgaactctagagagaccaagagaccttctaaatattgggacactttagttctgaatcccagaagttggcttcttgcctgggaggcaggtgtcactgcatctgatccaaaaaagcagccccatagctcaagatgctcttctggatttctgcctcttcctggttcctggccaagcaaatcttcactgctttgctagcccatctataaattcaaccagacttttcaaatatgtattttcctcccatttttctagttgtactcaatgggagaagtggtccaaatgacctaatcagcaattgctggaaaccaaagtaacagtatacaattctatgtgttaatatcatataccaagagagaaaatgtatagatatcagtagtagccatttaagcactgtaataatatctatctatatcccatgagtataatatatataaataaatgataacaagaaaataatctttatgtgtaatacatgactatgactctgacagacaaacctgagagcatagtacgacacttatcaccttcactcatgagccagatagtgtgaaatgagaagcagagatttgaaatgtgttgcaaaactctctcaaagaaagtagagtaatatttttcgtgagcaaatcaaagcaatctcctcacaaatcacattggacttataatgtgtgggatgtgtctttattaaaatggaggtaatcctaggtatgtggtcttttttacatgaaccgtactgtcactggctcactagctgtcacttcaccaacaatcattccatttaataaaagggagatccccccatgggccagcatttcccaggtggaggcctcttgcaggcataatcttccaacagagaatttccctgggaacctagaaagaagagaagaggctcaagcaaaaaggatgaaagaaatagcaacaacggcggggcatggtggctcacacctgtaatcccagcactttgggaggccgaagagggtggatcacctgaggtcaggagttcaagaccagactgcctaacatggggaaactccgtttctactaaaaatacaaaaaattagctgggtgtagtagcgggcgcctgtaatcccagctactctggaggctgaggcaggagaatcgcttgaactcaggaggtggaggttgcagtgagccgagatggtgccactgcactccagcatgggcaacgagagcaaaactccatctaaaaaaaaaaaaaaaaaaaacaccaacagcgataatatcatacactgtcatggtgctatgtgttaatccgtgtccttagcactttcaaaatatgaattcatttaattgtcacgatacatctatggggtgtgcctgctaattttccgttttcaggtgatacaataggaaagaaggtcgcctacaagtcgtggtggagctgggcttgcacgcagacaatcctgccccagggccatgctcacatctctgcactatccagaatgtgagggtgggtggagagtccagctcagggagagtgattggagagacagaataataagaagagtgggcagactggatcactctgatggttctggggcttctcttccaggagagaagacaaaaattatgtcaccatcaaggaaagtatccaaaatctctggcttaaacctgggcgtctccagctctgggacaggtggctgggcagggaagacaaactaagccaagggcccagctcggaagagtttcctttcctgagaattctgcaggaatttccctgacctcatggccacctctcatactttgctcttgttttttccccagggccgatgagggcgtcgtatctggtttccagtggggtctaaagacgccatcacagtgactggagattgggcttcataaagtgggagatctccaggatccttcctggaatccaagattcccagagaagccggatcccgcgtcccggaacccaactcctgctgctctatgagccctgaccttggggagacctgggctagtgaggagaggatcaagatgaactgggctggggaggcaggaggtaaagggcggcctggagagctcagcagctcctcccacggctcttctgccccggtctggggtctgcagactcctcaggtcatatctccaagtacgccgccccacgccaccctcccgtggtccctgtccctctgtcccctccccagctccccctacaccgtaagaagctcccaggtaagcggctccagggccgggcggtaggcaggagggagcccgggaggctgggtccccgcggggaggcggagagagcgcgtcagggagacagggagcgggcggggtccctctccagccctcaaggtgccggttcccggggcccaggctcgcactcccgggtacttggaggccaggggagagggaggactgtggcaggtgaggcaaggagctgtctgagccgctcagcagcctccaggagtcagctctctccaggcctgtcttcactccagtgcctggtcctgcccaggcccccactcccactctgctctcaacctggccccagacaggatcccaaacaactcctgttcctaatgtgaaaaatgtttctgccgctttaggcagaacttgctttagagcactggcacagacttccgcaggtcttgtgtctgaatttcttggcactgtgtcttttctcacttattcttctgcaaggaaggaattatatcactggttggatgagacaattggctcagatgggttcattgagcactcacccactgggcaagtgtctgtcggggccagctctgggccagatgtgcccaaggatctatagctagttggtggaaaggcctggagggttcatattcaagtccacctgacttgaaaactcatattgaccttacttaagtactgattccccctttataatccatgccataaacttcattgtcttattttaagaaattgccacagcagcctttagcaaccaccctcttgaacagccggtagtcatcaacattgaggcaagaccctcccccagcaaaaagattaaaattagctgaagcctcagacgaccgttagcattttttagcaatagagtaattttaaattaaggtatgtacatagttctttcatacataatgctattgtacacttactaggctacagtagagtgtgaatataacttttatatgtactggaaaaacaaaaatttgtgtaacttgtttgttaccatggtctgaaaccaaatctgcagtatctctgaggtacgtctgtagtttccctttccctcttttgaacttgtttcttgtccttgtctggtcctgcaagctgtatgagtttgccttctctggtaggtctggggacatggtatcccttataaccttggttcctggcatatgacactggtaccaggctctgttggactagtgaggctccctacacacctcctgaactagagcaaaagctctgtgcacacaccgtgcatgtgtgagcctgtgaggagacggtgccttcctgcaggctgttctgaaggggtgttctgttgtgactggaggaaatagccatgggcccctgggcagaagtggctcagaatggaatggatggccccagttttgatcatctgggaacaggaagattctcagataaaaacccatgttttagaagacaaaactgcccaagagtggacagcagctaaccagtaagctatctgggatatcactgtacactgggagggaagatggcctctgccatggtgtagggtgcctgacccagacaaggaggccttcctaggggtcagtgcttctgaagcacctttaaatgaggacaaatacctcatgttcatgattagccaacttgtgcccactcagtggaaaaagaacccagaattttgcaaaattttcagagagagggattcccctcttgtctcttagtgctagggttatgcatgactcgtgcttgaattacagtgtgtacacagctgaaagtcttaattattagaatataagaggcccaaactactgctgttacagatatgtaaaactacacagtataagtttaaacaacccacaaccaattaacagtgaagataaattaacaacctttgtaaatttaaaacaagattggcaaccctttagaaaaaaaatgagacttttgcaagacaatctaaatgatacactaataacaaacgttcatgaaaatgacatttcaaccatctgaatttctgctttaagttataaactccaaaatgaactaactcccaataatttacagtagggagctctaagccacaaataaaggtgtcaggacagacctgagacctggagtgagcacatcccctccctcagggtcatgagtcaatcctgtaagacccctcctccctcagacactccatccagtcatcaggaggtcaagaaaagttccccacagcactaagacccaaccacctcactgtcctcacctccatggacagagcccaggtgaaagccacccctgctcctcctcccgcatctctcacaggctcagcaccatcgtcggcctggagtgcacctggactgagctcatcatgctctgtccctgtttgtgtcagtcacactgggtcccccacatactctgcacttgcatccccacaaggctctgcacacctctattctgtctccccgacctccccagccacagaaatcttcccagtgcaccccctggatttctcagtccacatcagcaaaacctcctcagcctctctcaggatgttcctgcatctcacagctccagcagcaacctgggtctccctgaggacatgaccccctccgaagtcctcccacatgggggagtttccccagggacttgtacccctgggttcagaggtgaggtggggtccttgctcctcattgtggttctcagaactttctgcctccctcctccctaaaacccctaggctgtcatcagattagagccccatttgcctcactgtaaccattccctgtgggccccaggctgttcttctcaatcctgagtcttgtagctcctggttcactgtcaccctctccagcattgctgtctccttgactcttggtgacttcaacatacgcagatgtcgtgggctgagtaatggtccccaaagatgtccagtcttaatcgttggaacctgtgaacaggttgcattgcatggcaaaagggacattactcatgtaatgaagattaaggaccttaaaatagggagattctgctggaatctctgtgtgggcccaatcaaatcacaagagctattaaaagcagagagcctgccctggttggagtcagattctgcagaggaggaaggcagaggagaagctggagaggggaggtcagaagttccaagcaggaggattgaatgtgccttaggcaccatgtgtgagtatctgagagaaggctctaggagctaaggatggctcttaacaaggaagtggaaacctcttttctatctgcaaggaagtgaattcaggcaagaacctgaatgagcttggaagtggattcttccccagagtctatggaaaggaatgcagaccttcccgtatgttgatcttagccccatgagactgggtggacttgcaatccacacgactgtgccatgatacataggtgctgtttaaagccatttggtttgtggtaatttttatggcagcaatagacacccacacagcagagaagatgccctcgcttcctggcctctcagatcctggaactcctctcctccatgatcttctcctgtctgcctgaatctcatgcccttgttatcccctaggcctcatcatggctaagaaccccagcccttccatactctcaactcacacttcccactctctgaccatctttccactcatccccttgcaaggtggccacaggctctgaggacacagatactatcattttatcatatgctgtgatgtaatatcagtggaccactcatcgcatatgtgcttgctttccacgcttggagtctaccctgtagtacatcaattccaacaatcgttccaccctcctgggattcccaatccagtgatcctgccatctactcactgtccctcaccctgggtgtcctgtcctccctcctcacccattttgaattctatggtaaataatttccatccctcccttccctctcccttgagttgtcacactcacctggcaaaactacacagctggtgggttccacctcggcctatgctgagcctgcccccatgagctgcaggaggctggagagaagcacacagtacgctgactggtctcttaaaatttaggattccaaaccacatgggaagtctctaccatggccagcaatcaccctctccctgcatggctcaccctcagcctcctcctggcctgggtgactcttccataccttttctttgtgctcacacatccaatctgccttccccattcttacttcagctgatgaccttgcttcccacttcactgagaaaactgaacacattagaagacaacttcacagattccaccactgtctgctcatgcatttgcaactgcaccacatgtcaggcgttttaccatgtgacggactgttgtgggttaaccattctgctcccagccagagccagaccctcttctggtgccccaattgccaccccttatcatctacttaaaggtgtcagttcatcaattaataccatttttatctttatcgtcaacctttttcctctctccccactggatcattgtggcagtcatgagaatgcacatcccagcccctcatctagaagaagcagaattgatgatggccccagctcttgaagtctgaaatctattgccacatttgctctgagactatgcccacccctggctttttccagccaatgattgaggaaagtagggcagaaactaaggcaggacatttctcttctgaaggctgactgaagctccagggctccctgccacccttactgaacttcccttagcctgcacagggtctaggatgcttccagctgaccttcctgcactctctacatcactgaggctcagagttgctttgtggtccagtggctttcccagcattttctatctcatgaatttctctcacaagtatttcccctaataaatccttacatgtttactactgtattggggtccgcttctcaggggaccctaactaacacaagtggcatgaagggtgatccatgaaaacaggcaaaaatgggaatttgaaataagcttcccactgcctggcaggccaagaggatgccacccgggttggtggcagacacagaaagtccatggcacaaggtgcagctgagcagctgggggtctcaccagtgctgagctgagaagttgccttggttagggagtgctatggcagatgcagtgatagaatgccctgcataataaggacagggttggaagaaacctacaaagacagtggctttggctggttactgctcggctgcatcgatgctgtgtaaaaggataatgagaatctgcggattgttgacagctatgactggctacatctgacaccctcggcagtgtctcatgggcaggtctttatctcctgtagcaaaagggcagataccaaggaatggtagctgaacatcattatgagggccacagtgctccagagatgtttgacactcaaccaacgcaggcctgttacaggaaagtcagggctttggtggggaaacctgagattctgcaaactggaacaggattatgcgatgggtgccctccaggatcttctgggcatgcagaggaggctcacccttctctagtaatggttcccactttcaatgctggaagatgctacacaatcctcacccctatgatgccacgggaatcccactcaggaggtttgtaggaactagccagcacatccccatcggagcccagggaccacttctgggattggaatttgagggtgtttgatcaaggaaccagaatttcagtctggatgaatataatcctttggcttgaagacactttctcagggcatggatttatcaaacactccaggactttgataagtggaataaacccactgctgggatgtatccacatagtctagaaaaaaacatgcccaactctcaacaaggtagacatgtcttagttgccctggaacatgtagagaatggaataacaagctgaggggagtgggcttggtgaaggcctaccaaaaccatgctccacaagagggcccagaggacacaccttccaccagagcctcaggaacttgatggtgagagggacctgcatcactaagaagtgacggggtattgtcctttgtaggctgggggtgatggtagtaaagatagtcccagagtttcatttctaatattactggggagagtgtggccctgaagagacaaagaccaagtggtggcagtgacttgcaaaagccagagggcacggttactatggcaacctcagaggagaagccaagaggactcaagctgcagggaatgtggggaaggataatagagggtggtgtcccagggttaggacaggcagctgattgatatctatgataagaaagcaagaattgagaagcaggagggtgaaggtgtttgacccaatacaaaatcatgatcccatcctcaatgcctagacctcagccaagatgcagattcagatctcagtgacagaggaggagtccatatctctaggcggaataccctgcaaccccgtggaagtatatgctgggacaattccctcagtccttcggcaaagaaacatatagccatttactcaggaggttgtacactggggaaaggaaacaggcagaactagggggattattgacactgggtgtgaactgacattgatgctcagatgcccacagcactatcatgtctcccatcacagtggggcttacggaggtcagggagtaaacctggacacattatggcccacaatggaactactggatccatacacccagccctgattatcttcctataccctgagtgcataattgacactgatgcactgctaagtggagtcacccccacaatgggtccctagtctgtggagtaaggactttcattgtgctgaaagccaaagggaaacctctgacactgcccccatcctggccaaatcaaaaatcatagtgtgtcccagggtgggtcttgtggaagacacttcaagtattgtgggggtcacatcaccattacagagctgaaggatgtgggatggtgttggggctgtctgttgtctctacgtaatccagcaatctgtccctgaagaagcctgatgaagcctaaagaatgaactagattactccaggtctggccaagtaggagttataattgcagcttttgtgctgtctggatatcactggtagagcagattaataaacccttggacacagagcatgcagctgtggatttggtgactgcatttctttccactccaattagaaagtggatatggagtgattcacattcatgtgggatcctcaaaacattgatttatcatttgtctcagggctattgtaactcccctgacctctatagtatagtcttaagactatactagacatactggatatccaataggatattaaatcagctcatatcattgacaacttcctgttgacctgggtggatgagcagcaggtagaaagtgcactgtagtccttggcaaaacaagggcactccagaaggtgaagataaaccttacaaagcttcaagagtggccactcggccaggcgcagtggctcacgcctgtaatcccagcactttggaaggccgaggtgggtggatcacctgaggttgggagttggagactagcctaaccaacacggagagaccccgtctctactaaaaatgcaaaattatccaggcatggtggcgcatgccagtaatcccagctactcgggaggctgaggcaggagaatcacttgaacccaggaggcagagattgcagtgagccaagatcgtgccattgcactccagagtgggcaacaagagcaaaattccatctcaaaaagaaaaaaatagtgggcattgaagtaaagttttatgggtgaacaatggccaagtgtttaggggaatgcaggtgtgtcccctccaaggtaacagacaaactgtttcatcttgcatcctcaccagaaagaaggaagcacactgcctgatgagcctctttcagttctgacaacaccactttccacatctaggtatgttgctttggcccacactctaggtgacataggaggaggccagcttcaagtggggcccacacagaaaaggaccctgcagcagatccaggccatggtgcaagcagccaccatctctcagaccccctggtgctggtgatgccattggtggggaaagatgcaggatggagctgaaccaagcaccagtgggaaagtcacagtgaaaggcctgggattctggagtaaggtcatgtcattcacagcagagacatatgccacctattagaagcaacttttagtgtcccttgtcctgattagatagaatgtttgaccacgggacaccaagcaactatgtggttccaagtgcctgtgtgacccacagagtcatagattggacaggcccaacagcatccatcatgaggtgaaaatggtccacctgggttgagcttgaatcccatgtttacacccacagaaaatacccaagtctgaagtggcactgaacaaccaaacagacaaatggaagttagccagccttcaccatgggtcagccctggtctggtaggatgagttcatgaatggagcaaccacagtggcaggcatgaggctacatatggggccaacagcactgactcccccctaccaaggcagatccagctgtcgacacctctgaatgtccaactcatcagcaattgaggcccatgatgtgccccagtggggcactatttctttaggtgactaactagccactaagtaacaagttgactacatttagctacttccatcctggaagggccagaggttcatcttcacagggataggcttctattccatgggtgttttcatgtcctgctctcagaaactcagccagcaccactctccgggtgctgttgacattcctgatctgcaggctaggaggtgctcctagcccattatctgcctgaaggacccacttggctgggaaagtttcagtgtttccatggctgtgggttccactaatcctatcaccatctggaccatccagaggctgccagccacaaggaatgctggacaggtcttctacaggcaaaactcagtgccagcctggaggaagcactctgagaggtgggtgccgtctttcaggacaccgtgcattgtttgaatcagagatgtctctagagtgctgtgttctcaataggaagaacatgtgtgtccaggaatcaaaagatggaagcaggtttggctccacgtccaatcccttagattcacccaatggggtattttgcacgttttatcttccaacactgggctgtgcagggtacgaggtcctggtttccaaggagggtacccttaaaaggatacaaaagacagcccactgaactacacattccgattgtcacgagagaagttttgattagtatgtgcccagagaccacctggtgaaaagaggattctcctcctctccaggcccaggtaatagatcctcatcttcaggagaaggcatggctactttcacacaatgagggcggaagtgtgtgtggaaaccagagatcgacctgggggccttctggtttcccttacctcattgtaagtgtgaacagaatcatccagcaattcagcctgagacagcttgatttccaaggacccagacccatcagggcagaaggtttgagtaatgctgggtaatctcccaaggccctgctcctgtgctctgacatcctcagtagcattggtgctgaggccctgcttccaatgggctgttcccaaccagtgacagatcacaccagtgacacgaaagcaggacattcctgggagaccagggactcctctgatagccaactgtagctcaaggactcctccatggccttgcttaactctccttagattgcctgtggtctagggcacatccagtaaactttctctccttctgtccatcactggggatcacctttgcatcttgttgcctttcccagggtaacctacctcccttgccatatcgcctgacaggtgtgtcccctaataaaatgctataactttaatcccatgatggaacttgctttttggagcatttggactataaaatcattttcatctgcccactagtgacctcttgcttattccaatgtgtaaaatctttttgtttattcaacttctacctgcattggctccattttgctggtatttgtattatgcttttgagttcctcaatgtttgttgtttaatcactaaatttgggggtagtttgtcacaaagcaatggataactaatgaagccctcttacatttccattattctatagaagttaactacatctgttttattttctcctattttgataatattagccacacatatggtttctagtttcttaacacctattcttttctttattttagtttcttttctcctttgttccttctgttttttgtttttttttttttttgagatggagtctcactctctcgcccaggctaaagtgcagtggctcaatctcagctcactgcaagctctgcctcctgggttcatgccattctcctgcctcagcttcccaagtagctgggactacaggcacctgccaccacgcccagctaatttttttgtatttttagtagagacggggtttcaccatgttagccaggaaggtctctatctcctgacctcatgttctgcctgcctcagcctcccaaagtgctgggattacaggcatgagccaccacacctggcctcttccttccctttctccttccttctagccctccctctctctctttcttctctatttccattcaacctatcaccttccctccttctttctccctttccttccccttccccttccttcttttcttctttcactttttcctccattcctccttctttccctcccttcctccagtttttcctttttattataaaattttcctaacatataaaataaccctatgtgattgggctgtaagtaagcattttctgaatctatctgtcaaaagcataatgtcttttatatgagaaacaagtaaacaacaggaagttattaacagaataaaaatgcttgctataattctaccaccaagacagtgacttttaacacaattccttcaactcagtgttttcagaacacatcatcaacatcaagtattacacatttattgtaaaagtttaagtagccacaatcactttggaaatcatattatcattatctagtatggttaaagtccatacaatgtatcatgcaaccaacccattcctaatcatccactctgggagctttggggctttcttgcctatgtgcacaggagacatgcacactaatatttatggcaaaaactggaatcagccacatgtacatcaataggaaactggtgaaattgtggtaaaacgatatgtaagccttcagcagtaaaaatgaatgaatgacagcctcccacaccacagataactcctacacataatgtgcatcatgggaaaatacatgcagtaggaatttgctatacaggaagcttaaaaaccagcaaaactaactgaggtttgttttggggagatatatatatatatatatttattgcacaaatctttgaaggaatacaaaggaatatgtatcagaagactcaggatggagtctcctgctgagaccagctcggtcagggagaccctaacccagtggtgctagaggaattaaagacacacacacagaaatatagaggtgtgaagtgggaaatcaggggtctcacagccttcagagctgagagcccggaacagagatttatccacatatttattaacagcaaaccagtcattagcattgtttctatggatattaaattagctaaaagtatcccttataggaaacgaagggatgggccaaattaaaggaatagattgggctagttaactgcagcaggaacacacccttaagacacagatcgctcatgctattgtttgtggcttaagaatgcctttaagcagttttccgccctgggcaggacaggtgttccttgccctcattcccgtaaacctgcaaccttccagcttgggcgctagggccattatgaacatgttacagtgctgcagagattttgtttatggccagtcttggggccagtttatggccagattttggggagcttgctcccaacatctctcccttctttgatttgtaaggagataaaagcaagggctgctttgtcacggtgagctacttcttgcaggaatcgggatctgcatctgcagactatatgaagacaaacaacatagattaaaagcacagtcatcattgaaatcacagagcttccaagtgtttttatccattttaatgggttactagctgctaatttgtcggcagctcctttaagcactccagtttctggcattaagttcaggtgttcctgagatgctttacatatttcttcttttaattttaaatccttatgttaagctcctacagtgggccatatcatttcaggttgaggtgccactataccgccatggttccagataataggaacttttgccatacttcttatcatttctaccatctgaccattttgttcagatcatctgaatatagtgtgaccatggcatgcagactgagaggtgcaattcaagctaaacatccccttaggggaccaattaatgattccataggaattattgtgcagcacctctgcctgttctgcaaagcaatcttcctaaacaagtatgttcattttttctaactgggtccaattttgtttccaaatacgtttttgagggtggtatgcctcaattataggagcagatttattatggtaaatactgagatcagaaagcatgtgtaaccatgtcatagagtgattgcatccaggcattattacaaacccttattgaaggaatactcacggcagtggtgataaccgctatcatagctgccattaaattattcattgtgactggttgtcctgctttcctcaggttttcttctgccatctgtgacagcttcttcatctgtccccaggtaggtggctgtgtttgacaggtgttgctcatgacagttggggtcctcctcagcatcagtctcaacatggctgcaaccgaggggtcctcgggatcctcctggagtctcttccttggcatctggctcatgataaggtttcaggtatcttgatggtatccaaattggctgttgattttggcctggagaaatacaagcatagcccctaccccaagttattattttacctattttccaatttttgttatcggatctctccaccaaatcagttgttctgtttctgtctttgcagctgatttctgtagatgctgttcagctgctgataacatctggcctttgggcaggctcaaaaaatttaaagttaataatgataggttcagttgcatttgtggggttccatattctctgtctctccctttctgcttttgcaactgctgttttagggagagattcattctttccactatggcttgtacttgagaattgcatgggataccagtaatgtgtttaatagtccacatagagaaaaatgtagctaaagcttggctagtagagccttgggcattatctgttataatagaagctggaatgcccatcactgcaaaacactgcaaaagatgacgtttaacacaggcagaagactctcctgttaggcatgtagcccagacaaagtgagaaaaggtgtccacacatacatgtacataagctagtctcccaagccagggaacatgtgtgacatccatttgccaaacagagttagattccagtcctcaaggattaactcctcctgtaaaagatgaggaacgtaccatttggcaagatgggcatcgctggataatagctttagcttctttccaggtaatgctgtatctgcgtttgagaccagaggcattaacatgggttaaattgtgaaagtgtctagcattaaatattgcagtagcaactaagcaatcagccatttgattcccttcagtcaaaggtcctggaagaggtgtatgagccctaatatgagtgatgtaaaaaggatgcattctactcctaactgctgtttgcaattgggtaaataaagtcatcagttgttcatctgtatgaaattgtgagaattttaaataactgtgtggagtgaaccatccatgaagaatcagaaatcacattaataggcatatcaaaagcagtcaatacctcaattacagctacaagctctgctttttgagctgaagtatagggcgtctgaaaaactttactttttgagccagaataagaagctttaccattactagacccatctgtaaaaacattctcagcaccttcaattggtttaagtttattttagggagaatccaattagttaatttgaaaaactgaaacagcttcattttaggaaaatgattatccagaatacccacaaagtcagctaaaatgggtttgctgagtaagactatttataaaagcttgcgtatttgtgccttcgtgagagggacaagaatttttccaggatcatatccatgtaatttaacaatccgagttctcccaatccctatcatagtagtgatttgatctaaataaggagttagagtccataaattagtatgtgaaagaaaaagccactccactaagtcctgttcttggacaataacaccagtaggtgaatgctgagttgaaaaaattagcaaatctagagtcttctctggatctattctatttaactgagctttatggacttgctcctcaatcagttgtaactctgcctctgcctcctttgttaattgctgagggctagtgagactaggatttcctctaaggatagaaaacagattactcatggcataggtaggaatgcttagagcaggtcgtatccaattaatatcccctagtaatttttgaaagtcatttaatatttttagttgatccctacgtatggttactgtctgtggcacaatggtagtgtcatttactaaggtccccaagtaggagtagggagtagtggtctgaattttgtcaggagctataattaaatcagcatgagaaatcgaattttgcaagtgatcataacattgaagtaatatttctcgagtgggggcagcacaaactatatcatccacatagtgaataatgtaacattgtgaaaattttttacaagtaggttcaattgcttgccccacatatgtctggcaaattgtgggactgtttaacatgccctgtggcaacactttccaatgataacacttagcaggctgcaggttgtttactgcaggaattgtaaatgcaaaccgttcacagtcttgctcagctaaagggatagtaaagaaacagtcctttaaatctatgactattaaaggccaatttttttgaattatagcaggagaaagtaatcctggctgtaatgctcccataggttgtataactgaattgatggctcttaagtcagttaacattctccatttacctgattttttcttaattaaaaaaaactggagaattccaaggggaaaatattggagctatgtgcccattttctaattgttcaacaactaatttctctaaagcctccagtttttctttacttagtggccattgttctatccaaattggcttatccattaaccattttaaaggtataggttcggaaggcttaacaatagccaccataaaaaatgatatcttaatctttggtgggaactttttaaaccttgcaaatttttttctagtcccataccagggacataccccatttcatgcattgtttgttgattttcagggatatataattgatctggaattagaacttgtgctctccattgttgtaataaatctcttccccataaatgtataggtacagaagtgataactggttgaatagtcccaggttgtccatcaggcccctcacaatgcaaaatgtaactattttgatatacttcagcagctttaccaactccaactatgttaaattgagcgggttgaattggccacatggacggccagtgctgtagagaaatgattgaaatgtctgctcctgtatctaccaaacctttacatttctttccctgaatagttatttcacaggtaggatgttcattagtaatttgattcacccaataagcttctttgccttgtttatttgtgcttccaaatcctcctgttcatttaatttcactttttcccattcccacatatggcaaaatcaggagctgtgctatgtgctctcctggctctgctttccagggaacagaagtagatacaagaatttgaatttccccattgtaaactgaatcaatgactcctgtatgtatttgtacgccttttaaacttaaactaggccttcctaaaagtaatcctattttccctgctggcaagggtccacagactcctgttgggaccttttgctggggttccccaggcagaaggctcacagattttgtgcagcataaatctaatgcggcactaccagctgtggctggggaaggacattgtacaggggtgagggaatggcctgagctggaaatgccctggtttagaatggggcccgggacgggcccctcatggtgtttcctgagaatgagttcccttgtttatcaaacttagagtgacattgactagcccaatgttttccttttttacattttggacatatttcaggctcaacagttttcttttttcctctgtctggcggcctgactcactgactttttctacattcttttttagtatgaatagcttgtttaaattctttgagtaatttaaaagggaaaggctcaaatgtagctataatatttccctgttgatctggggggtgtattctaacagggaactgccaagcctctaaatcaccctcttgtctagcttgctgaattcctgcctgaatagaactaagagctgtcacatgaggcgctgctcgaacagtcactggggcaattactttttgcccagtgtcctccagaaaagaaagatgtggggggtcatcttcatcaaaataataaggagggggtgcagaagggtagggatgaatctctccttcctttgctgctttagctttagctggcaaataaacatgctctgtaacctcttctgttacttcgctatactcttgttcctcctcattaccagtgtgaaaaagttccaaggtgaaatgaaccagaccccatacctgtcccattgttaccctgacacttccgagctccccttcttacgcacgacagggattgctttaagagtactcgggtgtcctccagctagtttcccattccaaccattgctctggtgacccttcgacctggatatgagcccccacaaatggacaccacttgccaagaccaggtcagtcagagagactctaacccagtggtgctagaggaattaaagacacacacacagaaatatagaggtgtgaagtgggaaattgggggtctcacagtcttcagagctgagagccccaaacagatatttacccacatatttattaacagcaaaccggtcattagcattgtctctatagatattaaattaactaaaagtatcccttatgggaaacaaagggatgggccgaattaaaggaataagttgggctagttaattgcagcaggaacacacccttaagacagagatcactcatgctattgtttgtggcttaagaatgcctttaagcggttttccgccctgggcaggccaggtgttccttgccctcattctcgtaaacccgcaaccttccagcttggacgttagggccattatgaacatgttatggtgctgcagagattttgtttatggccagtcttggggccagtttatggccagattttgggggacttgctcccaacggtctccttctagggggtgactgggtagcagcccagggtagctttacaggtttgtgttttacaccagtgctgggcaccctggtagatacttgattataattccttaaacagagttttccaaattaaaatatacctgttttttatagaaatgaaaaagaaaagaatttcaaagttcattgcaaagattcttaacaagaactacttacattggaagaaaaccacagagaattgtaaggagccatgtgacagagaggaccaggatgccatgaaaatggccttggctacaaataggtcatttgatccttggctccctggcatctctctagattttcaatgatacaatgttcaatctgctgtgcaagataatttcatcttgcaaagatttgatgttacattttaccacacattaaactgaaataaacttttacagattggaaatgcacatcattgatcaaaataaatgaaacatgaaaagagtaggaaggaatacccagtgatggaatagcaaatatgaatggaaaacagaataggactgctaaaaagaaaaaaaaaaattcagaagcatgtaatagcagcgctatttagaatcacagtggtgtccaaatcacttctatcacatctcattcaataccacaacaaaagatgttaagtttattatagaatgcccatcaaatagccagtttttgaaaaaaacttgtttctcaattagaactaaccatttcaggctacagcatcaagccaaaattattggcatcatgctaagctaggtgtgtttactgaagtatgagattcacatttttgtaaatgaaaagcaatttgattaggcatttttttctgcacagcaaaagaaactatcatcaatcacagtgaacagacatcctacagaatgggagaaaaattttgcagtctatccatctgacaaaagtctagtaatcagaatccacaaagaacttaagcaaatttacatgaaaaaaaacttcaataaaaagtagacaaagaacttgaacagacacttctaaagaagacatacatgtggccaacaaaaatacgaaaaaaagctcaacatcgctgatcattagagaaatgcaaatcaaaaccacaaatgaggtaccatctcatgccagtcagaatggcaattattaaaaagtcaagaaacaccagatgctggcgaggttgcagagaaataggaatgcttttacactgttggtggaaaagtaaattggttaatccattgtggaagacagtgacaatgtggtgattcctcagagatttagaatcagaaataccatttgatccagcaattgcattacagggtatatacccaaaggaatataaatcattctattataaagatatatgcatgtttacattcatggcagcactattcacaatagcaaagacatggaatcaacccaaatgcccatcaatgatggactggataaagaaaatgtggtacatatacaccatggaatattatgcagccataaaaaggaatgagatcaagtcctttgcagggatatggatgaagctggaagccattatcctcagcaaactcacacaggaatggaaaaccaaacaccacatgttctcatttataattgggaactgagtaatgagaacacatggacacagggagaggaacaacacacactggggcctattggggcagggtggtggtgggaggatcattagcaaaaatagctaatgcatgccagggttaatacctaggtgatgagttgacaggtgcagcaaaccaacatggcacatgtttacctatgtaacaaacctgcacatcctgcacgtgtaccctgaaacttaaaaaaaattaaattaaaaaacaagcttaaagaaaaagacaagctgaaagagttaatgaaaaataattagataaaagaagtctttgattttcaaaaacctgaaacaatagttataattttgcttttaacatatattcaaaacatttgatactgttcccttccagaggtgcatcttaattccctctcctgagtgtggcttggacttaatgaggcacttctgatatggcctggttctgtgttcccacccaaatctcatcttgaattgttatgcgaattgtaatccctacctattgggggagggaccacatgggaggtgattggataatggaggcggtgcccccatgctgttctcgtgatactgagggaattctcatgcaatctgatggttttataaggggcttttccctgcttcattctgcatttctctctcctgtcatcatgtgaagaaggatgtgtttgcttccacttctgccatgactgtaagtttcctggggcaggctcctcagccatgcagaactgtgagtcaattaaacctctctcctttataaattacccagtctcaggtatttctttatagcagtgtgagaatggactaatataacttctaacttacagaataatgctgacataatggtttgtgactctgggtgtagaacctaaaactcactgtggcttccaccttctctctctctgtctctgggatcatgagctctgggggaagccagctgctgtgccacaagcagccctgcaggaaggtccatgtggctgagaaccgaggcgttctgggaacagacaacaaagaactaggccttttccaacagccatatgactgatccatgtttcatgtgaatcctcagccccagtgaagccctcagatgatgcagcccttggctgacaactgtactgcaaccttgtgagaggccccgagcaagaagcactcagggaaacctctcctggactcctgaccattggaaactgcggcagatgaggaatatttgttgttttgagctaagttttacataatttgttatgcaatagtaaataaataatacactttcacaagagaggatgtattattacacattaaattgcatttgctttaaatgtatcatcgtcatcattattatttttgagacacggtctcgctctgtcacccaggctggagtgcagtggcatgatcaccatgtactgcagtgtcgacctcctggggtcaagggacccactgatctcagcctcctgagtagctgggactaccgtcatgaactactatgcctggctaattttctaattttttgtatagatgggggttttgcccaggctgatcttgaacttctggagtcaacaaatctgccttcctctgccttccacagtgctaggatggcaggcatgagccaccatacctggcgtaaattaattataagatattaaacacgtaacttagttttaaaaggtaaggagaatttccatggctgaagaggatgtattttatgaccattcacaatgatcactttacttgaacttcaatttccaactgtgtccgaagtaaacacaaaaggaagatccaacccttgctaggctgattctattatgccctcaacaaccagctcctggtcattcaccatcctccagttattcaatcaactctaatgtaggtgctgctgtgaagggagttagtggatataattaagggtctcaattagttgactttaggctgggtttatcctgcttggactgtcctaatcaggtgagaccttgaaaggactgggttcttcctgagcatagagactcacagtgtgagagggactcagcatgaggggtttcctccagcatgggctttgaaaatgaaggggctgtgggccaggtgcggtggctcacgcctgtaatcccagcactttgggaggatgaggcgggcggatcacgaggtcaggagatcgagaccatcctggctaacacggtgaaaccctgtctctactaagaatacaaaaaaaaaaaaaaaaatagccaagcgtagtggcgggtgcctgtagtcccagctgcttgggaggctgagacaggagaatggcgtgaacccgggagccatagctggcagtaagccgagatcccgccactgcacccaagcctgggctacagagcgagactccatctcaaaaaaataaataaataaaattaaaaatgaaggggctgtgtaggaaagaatgctggtgaggaccaggaatcaagcacagccctccctgttctctacattgacagccagcaaggaacagggacctcagtcttacaactgccagaaactgcattctgccacctctgtataagcctgaaggaggattcaaaatgaaaacacagcttttggaagcccagaagagagattccatccacattttgcccagatttctgatcaaggaactataagcagataaatgggtgttgtttcgccaggcgtggtagtgcacgaatgaattgatgaattgatatgcacactagttacataaaataaaatctttctgaacttcttccgtgttttgcactttataattatctgtaatgcaatttaatacactcatatttcattcattcagtcgacaaaaattaatttagtccctacgataaaccagatatcccctcatatgctcacgtgcctgacactccagaagtttcacaagaccgaggtggagacactggagtgttttaagtggagagatgacacattctgactcccaggagcaggaccactgtgaaaagaacagtcacgtaacaggtcatgggacagtgctagtgtcacaattcacaagtgacagtgtggtggggactaaggggacaggacggcctgaaggatgagaagaatggagggaagggttggagaagcaggaggtgaagaaaaggagcagaggaaagaattcgaaagcagcagaattcttaggtttaaatacattgttttatggattttaatacatccatctacagagccctgcaggatgtccttggcagttggcctttaatactttatgtgggtctgcctaaaaactaattttttaatgttaatcaggtttaaaaattactaagtgttcctataaaatatacacaacacttagcagtggatacttcctaaaaacagacagtgcatgagcactagtgaggggcattgcgactacattgaacagttgcaactttgaggtgaataaagcctgtactgactcctggttgtaacgtacctggttgcaaagtacacagtgtgctactttgtattgaggagatatcctggactcacacagaaactcaaagctatggaatgatggcaaatttaaaatatgacaagcgggagtcacaggtacactgcaaaagtgaaacttagaagctttgtgagtcctgttgtaacgcttttgggcacatttatacatcatggggccaaagtcacattttttaccgattagattcctgatcattcaggggttaccaaggttctgctatccaatgtatttaataaacaaataaataaataaactggtctctattctgtctcatgcactcaggcacaacttttcccaataaaaaaaaaaaacaaaaaggaaaacaaaaaacagtttctacacctccattcccagagcaagctcactctctgtcaccaaactccgtgggtgagttttcttctagaagagtccaggtggacagggagtccagttcagggacggagattccgggatgaaaagtgaagggagagggacagggcccatgccgagggtttcttcctggtttctcagacagctcctgggccaagactcagggaaacactgagacagagcgcttggcacaggaggagcggggtcagggcgaagtcccagggccccaggcgtggctctcagggtctcaggccccgaaggcggtgtatggattggggatgccccgccttagggattcgccacctccgcagtttctcttcttctcacaacctgcgacgggtccttcttccttgatactcacgaagcggacacagttctcattcccactaggtgtcgggtttctagagaagccaatcggtgccgccgcggtcccggttctaaagtccccacgcacccaccgggactcagattctccccagacgccgaggatggtgctcatggcgccccgaaccctcctcctgctgctctcaggggccctggccctgaccctgacccagacctgggcgcgtgagtgcagggtctgcagggaaatggtcgggaggagcgaggggcccgcccggcgggggcgcaggacccggggatccgcgcagggaggagggtcgggccggtctcagctcctcctcgctcccaggctcccactccatgaggtatttctacaccaccatgtcccggcccggccgcggggagccccgcttcatctccgtcggctacgtggacgatacgcagttcgtgcggttcgacagcgacgacgcgagtccgagagaggagccgcgggcgccgtggatggagcgggaggggccagagtattgggaccggaacacacagatctgcaaggcccaggcacagactgaacgagagaacctgcggatcgcgctccgctactacaaccagagcgagggcggtgagtgaccccggcccggggcgcaggtcacgacccctccccatcccccacggagggccgggtcgcctcgagtctctgggtccgagatccaccccgaaaccgcgggaccccgagacccttgacctgggagaggcccaggcgcctttacccggtttcattttcagtttaggccaaaacccccgcgggttggtcggggcagggcggggctcgggggaccgggctgaccgcgggggcggggccaggttctcacaccatgcaggtgatgtatggctgcgacgtggggcccgacgggcgcttcctccgcgggtatgaacagcacgcctacgacggcaaggattacatcgccctgaacgaggacctgcgctcctggaccgcggcggacatggcagctcagatcaccaagcgcaagtgggaggcggcccgtcgggcggagcagctgagagcctacctggagggcgagttcgtggagtggctccgcagatacctggagaacgggaaggagacgctgcagcgcgcgggtaccaggggccacagggcgcctcccggatcgcctgtagatctccggggctggcctcccacaagaaagggagacaaatgggaccaacactataatatcgccctccctctggtcttgagggagaagaatcctcctgggtttccagagagtgactctgagggtccgccctgctctctgacacaattaagggatgaaatctgtgaggaaatgaagggaagacaatccctggaatactgatgagtggttccctttgacactggcagcagccttgggccccgtgacttttcctctcaggccttgttctctgcttcacactcaatgtgcgtgggggtctgagtccagctcttctgagtccctcagcctccactcaggtcaggaccagaagtcgctgttccctcttcagggactagaattttccacggaataggagattatcccaggtgcctgtgtccaggctgttgtctgggttctgtgctcccttccccaccccaggcatcctgtccattctcaagatggccacatgcgtgctggaggagtgtcccatgacagatgcaaaatgcctgaattttctgactcttcccgtcagaccccccccaagacacatatgacccaccaccccatctctgaccatgaggccaccctgaggtgctgggccctgggcttctaccctgcggagatcacactgacctggcagcgggatggggaggaccagacccaggacacggagctcgtggagaccaggcctgcaggggatggaaccttccagaagtgggcggctgtggtggtgccttctggagaggagcagagatacacctgccatgtgcagcatgagggtctgcccgagcccctcaccctgagatggggtaaggagggagatgggggtgtcatgtctcttagggaaagccggagcctctctggagagctttagcagggtcagggtccctcaccttccccccttttcccagagccatcttcccagcccaacgtccccatcgtgggcatcgttgctggcctggttctacttgtagctgtggtcactggagctgtggtcgctgctgtaatgtggaggaagaagagctcaggtaaggaaggggtgaggagtgtggtctgagatttcttgtctcactgagagttccaagccccaggtagaagtgccctgcctggttactgggaagcaccatccacactcatgggcctacccagcctgggccgtgtgtgccagcacttactcttttgtaaagcacctgttacaatgagggacagatttatcaccttgatgactgtggtgatgggacctgatcccagcagtcacaagtcacaggggaaggtccccaaggacagacctcagaagggcggttggtccaggacccatatctgctttcttcatgtttcctgatcccaccctgggtctgcagttgcacatttctggaaacttctctggggtccgagacttggaggttcctctaggaccttatggccctggcttctttctggcatctcacaggacattttcttcccacagatagaaaaggagggagctactctcaggctgcaagtaagtatgaaggaggctgatccctgaaatcctttggatattgtgtttgggagcccatgggggagctcacccaccccacaattcttcctctagccacatctactgtgggatctgaccaggtcctgtttttattctactcgaggcagcaacagtgcccagggctctgatgtgtctctcacggcttgaaaggtgagaccttggggggcctgatgtgtgggggatgttgggggggaacagtggacacagctgtgctatggggttctttgaatttgatgttttgagcatgcgatgggctgccaaagtgtcatccattactgggacagatatgaatttgttcatgaatattttttctatagtgtgagacagctgccttgtgtgggactgagaggcaagagttgttcctgccttccctttgtgacttgaagaaccctgactttctttctacaaaggcacctgaatgtgtctgtgttcctgtaggcataatgtgtggaggaggggagaccaacccaccctcatgtccaccatgaccctcttccccacgctgatctgtgttccctccccaatcatctttcctgttccagagaggaggggctgagatgtctccatctttttctcaactttatgtgcactgagctgtaacttcttacttccctcttaaaattagaatctgagtaaacatttactttttcaaattcttgccatgagaggttgatgacttaattaaaggagaagattcctaaaatttgagagacaaaataaatggaacacatgagaaccttccagagtccatgtgtttcttgtgctgatttgttgcaggggaggagaatagatggggctgtgcctagtgggtgctcaggccagtatggactttatgtggtcactgctcagctgggtcatctttgctccttcattctccttggcccttcagtagaaccttgtcctaccaccacctgtgatcacagggacttggatgtcacctacggtggtccctgcatacaaatctcattgtggtatcaagagactaattttcagacctgtccagctcttgccctcctcccagggctctttcctggattgtatttttcatcttgcctccaatctttttaaaggaagcagattctaaaatttgcagagaggaggggtcccatagtttctcatcatagtgaactttttgttggagctcctcttctgctctcttactcttcttccttccctgagttgtagtaatcctagtgctggctccaatccaaactcatggatttacaaagcagagtctaatttagattcatacgtggttggaaaattgtacccataagcctagggttatctttcctgaagagaaaaatatggttgtgtgctgcagtgtgcaagagggttggtgtgggaggaggtagggagggagggaggacacacaagcagtcctagtgagaaaagcactggcggcatcgatgtccacatgagatgatgttgttctttagctgccacaaaacagcatttgccctgaggctaccttaacaaagatattggcttcagaatagagaagtgctttacagtgatcattcattcaactgacatttgttgtctgctagggatatgactgcttttgcatttagaaagcatcattaaggtgaaaatagaaaaatttctggcgttgtggtacatatgttctagatgctagcttgtccaacccatagctcgcaggctgaatgtggcccaggacagttttgaatgtgaggagtttttgcttttctgtggcggacctgagacctggagtgagtgcacccacctccctcaggatcaggagtgaatgctttaggaaccctcctttgcagtgacctgcaaaagatagagggcacagttactgtgagaacccagagtagcagccaaaggggctcaaccttcatggagttttgggaaaggttagtaaaaggtggtgtcccagcgtcagaacagatgggcagccagcgagggcactgcttcatatctatgatgggaatgcaagaattgaggagcaggagactgagggtgtttgactaaatacaaagtcatgatcccagtctcaattcctagacttcagccaagcttcagattcagaatccacagtggggcttaaggaggccaggaagtaaacctggacacattatggcccactgtgggaccactgggttcataaacccagtcctggttatctccccattctccacatgcataattggccttgatgcactggcaaagagggtcacccccacactacatccctagtctggagagtaagggctatcattgtgctgaagcccaaagggaatcatcatctaaaacttccctcatcccaaccaagccagaagcaatattgcgccccaggtgggacttcaggagggtactgcagatattgtaggggtggcactgccattagagagctgaaggatggggggtggtgttgggattgcctattatctccatataattcagcagtctatccctgaagaagcctgataaagaatgaatggaattactccagacttgaccaagtaggagtcctgattgcagctgccatgctggctggatatcactgcttggggagattaataaggcctcaggcacatggcaaacagccatgcatttggtgagtgcattctttcccattccatttagaaaatggatatggaatgattcacattcacatgggatttataatacatttattgatagcttgcctcagggctactttaactcctcaaccttctataaatatcaccttaagagatctggacaaatcagacatctcacagaatactaaatctcttcatttcattggcaatatcacatagattgggatggatgagcaagaggaggaaagtatgctgagttctttggcaaaacatgtgcactacagaaggtgaagattaaccttacagagcttcaagagtggccactgcagtgaagtgttatgggtccagtggttaggggcatgcagggctgtcctctccaaagtaaaagacaaacttgcatcttgcatcctcaacagaaggaaggaagcacactacctggtgagcttctctgtgtcctggcaacaccacattccacatctaagtatattgtttggcccactgtctgggtataatataggaagaggtcagctttgagtgcggactagacaggaaaggacactgcagcagatccaggcggtggtgtaccaggtcatcaaccctcagtcccctggtgctgggggtgacagtgtggggaaagatgctagatggagctgaaccaagcagctgagatcaagtgagctgagatcccgcccctacactccagcctgagcaacaagagtgaaactccatctcaaaaagaaaaaaaaaaaattaaaaggataagcaccctcccacatcagagataactctccaacacataatgtacatgcggtgtgagttctctgtatggggaagttaaaaaaaaaacaggtcaaactgtgatttgggtatatatatacttattgtaaaaatcttcagtgacaatgccaaggaatagcaaatacaagactcaagacataggttccttttaggggataggattggacaacagcctagggtggcttcataggttctgtttcttatgccaggaggggatatccaggtagttagttacttgatcataaaactttatttatttatttatatattttgagtctcgctcttgttgcccaggctggagtacagtggcatgaactcagttcactgcaacctccgcctcccaggttcaagggattctcctgcctcagcctcctgagcagctgggattgcaggcaaatgccaccactcccagctaatttttgtatttttagtagagacgggcttcaccatgttgaccaggttggtctggaactcctgacctcaggtgatccacccacttcagcctaccaaattgctgagattacaggcatgagccaccactcctggcccacaaatctttaaagtggtatttttcaaaatgcaccttgtgtgccattcctgattgattatttggaaatgaaagagaaaagaaaatgccaaagttcatcacaagcatcctttgcgataactactcatagtaaaacaaagccgcagctggccgggcacggtggctcacttctgtgatcctagcactttgggaagtcgaggcctgtggatcacgagatcaggagttcgagaccagcctgaccaacatggtgaaaccttgtctttactaaaaatacaaaaattagctgggcgtgttggtgcgtgtctgtaatccaagctactcagaaggctgatgcaggagaatcgtttgaacctggaaggcagaagttgcagtgagctgagatcctgccatcgcactccagcctgggtgacagagccatactccatctcaaaacgaacaaacagacaactacaaaaaacaagccacagccaattttaaggagccatgtgagaggaccaggatgccatgaaaaacagccttggctacaaataggtcatttgatccttggctagttggcgactctctacattttctgatacacagtgttcaatctgataggcaaggcaatagtatcttgcaaagaatttgagaatttgatatgttgctcacattttaccacacaaacaagtgaactaaacttttacagaatagaaaaaaagcattgttgagcaaaataaattaaatgaaaagacataaatgaataactagtgatgaaatagcaataagaatggaaaacacgaaagagctgcttttaaagcaacattagaagcacaaaataacagtgtttttcagaatcatactggagtccaaatcacttctaccacatctaattaaaaaccacagtgaaagatgttaaactgatcacaggatgcccactgaatagccagttactgaaaaatcttgttcctagattgaagttaaccatttccacctaccacatcaaaccaaatcattgtcatgatgctaagctagttgtacagacaaagatgtgagactcacatttttctaattgcaaagcaccctgattaggcaaatatttttgtagatgcttgagtcagaaaattgtcattttgggcattcttttttttttttttttttgccttcaagcatctgtttaacaaagcacatcttgcaccgcccttaatccatttaacccttagtggacacagcacatgtctcagagagcacggggttgggggtaaggttatagattaacagcatcccaaggcagaagaatttttcttagtacagaacaaaatggagtctcctatgtctgcttctttctacacagacacagcaacaatctgatttctctgtcttttccccacatttcccccctttctattcgacaaaaccgccatcatcatcatggcccgttctcaatgagctgttgggtacacctcccagacagggtggcggccgggcagaggggctcctcacttcccagacggggtggccaggcagaggtgccccccacctcctggacggggtggctggccgggcgggggctgccccccacctccctcccggacggacggctggccgggcaggggctgccccccacctccctcctggacggggcggctggccgggcgggggctgccccccacctcccggacggggcgtctgccgggcggagactctcctcacttcccagactgggcggctgctgggtggaggggctcctcacctctcagacggggcggccggggagagacgctccttacctcccagacggggtcgcggccgggcagaggcgctcctcacatcccagacaaggcggcagggcagaggcgctccccacatctcagatgatgggcggccgggcagagacgctcctcacttcctagacgggatggcggccgggaagaggctgcaatcttggcactttgggaggccaaggcaggcggctgggaggcagaggttgtagcgagccgagatcacgccactgcactccagcctgggcaacattgagcactgagtgagtgagactccgtctgcaatcccggcacctcaggaggccgaggctggcagatcactcgcagttaggagctggagaccagcctggccaacacagcgaaatcccgtctccaccaaaaaaatatgaaaaccagtcaggcgtggtggcgcgtgccttcaatcccaggcactcggcagactctaaattattcaatgcctcagacactaactttccaaggaataggagattatcccaggtgcctgtggccaggaggtgtctgggttctgttctcccttccccaccccagatgtcctatccattctcaggatggtcacatgggtgctgctggagtgtcccatgaggaatgcaaagtgcctgaattttcttactcttcccctcagaatcccagaatacatgtgggatccactaccccatctcggaccatgaggccaccctgaggtgctgggtcccgggcttctaccatgtggaaatcacagtgacccaactgtgggatggggaggaccaaatttaggacacagagcttgtggggaccagacctgcagggtatagaaccttccagaagtgggcagctgtggtgctgtcttctagagacaagtagagatacacatgccatgtgcagcaggaggcactgccagagcccctcacactgagatgggctaaggagatgaatgaggggccatgtctcttctcagggaaagcaggagcctttctggaggccttcagcagggtcagggctgaggcctgggggtcaggacccctcacgttcccctcctttcttagggccatcttcccagcccacattccccatcgtgggcattgttactgtcctggttgttctaggtgctgtggtcactgctgtgatgtggaagaataagaccccaggtaggaaaggggtgagttccaagatttcttcttccattcgtggatttcaagctccagatggaagttggctcatttcctgcctagttgtgagacactatctccacacacatttaccctgttcagatgccatgtcaactctcactcttttgtaaagcacctgtgaaattgaaggacaaatttatcaccttgattgtgatcatgggaacctgactcccagcagtcacaagtcaggagaatgttcctgctgaggacagatgtcaaaaggacatttggttcagcttcaacacatcctcttccctcgggtttcctgatcctgacctgggtctgcagtcacagttctggaaactcctctaggatttcatggccctgcctcttccctggcgtctcacagtttgttttctttcctcatatggaaaaggagtcagctatgctcaggcttcaagtaagtgtggtaggggtgggagaatgattcctgagatccttggaatagtgtagacaggagcccatgggggagcacagccaccccaaaattcctcctttagtcacatcacctgtgggctctgaccagactttgtttttgttccaccccaaacaggaacagtacccagggctctgatgtgtctctcaagtcttgtaaaagtggcaccttagagggcctgaagtgaaggaggagttggggcagatgggacacaactaggctctagagagtctttgatttggaatttttcaatgtgtggtgggctgttcagtgtcaccacttaccatgactgacttgaatttgttcatgactattttctttctaagactgccttgtgagggactgagatgcaagatttgttcatggctccactttgagacttcaagggcctctgtcttctctttctgccaaggcatctgaatgtgtctatgtccctggtaacatgtgagaagtggagagaccagcccaccctcatgtccaccatgacccctgatactgtttggatctgtgtccccacccaaatctcatgctcacttgtaatccctaatgttggaggtggtgcttggtgggacgtgattggctcatgaggatggatcattcatgaatggtttagaatcatctctttcatgctgttcttgtgatagttcttggaggcattgtgccacctccctagggatctgtggaactttaaacttgagagtgatgattaagggtatctgatggaagaaatttctcagtagcatagaattcaggatttggtctggctgcctgtaatagcctatgtgcatatgtgtgagcaaagaaacgacccaaaactggaactgatatttaaatggggaaatttaatacccaggacaattcttagcagagctgcagcagtaggacccctgccaggactactaaatggtagagccactggctatgtgcaacctcagcctggaaaagccataggcattcaattttctcccatgacagcagctatatgggttatgttcagcaaagccataaatgtggagctgcaaatggcattaggagcccagcagttgcaccagccactgtgctctggattcaaaatatacagtcaaaggagattcttttagacctttaagttttaatgtctgccatgatgagtttcaatcttgtgaggaaactgcattcatttcttttggcccatttatataccttttggaatggaaatgtacaagaaatgtctcttccactgttgtattaatattttagatgtaaataacattttttaaaaaaaattttacaggctcaaagctataagaatttatcttgagtctcagatgagactctggaattttgagttgatgctggaacaacctaacacatttgggacaattgggagaagattattatattttgcaatgtgagaagaacatgacctttggctggctagggaggggatgcaatgatataaacatttatcccctgatacctcatgttaaaatctgatgcccactgtgggacgtggggcctaatggccaccatttgggtcatggtgaccaatcttttatgaatagagagatactgccctctcttgggaatgaatgaattgttgctttattattttccaagagagctagttgttaaaaagaccctggcaacttcctactctctctgttcctctgttaccatgtgttctctgcatataccagctcacctttgtcttctgccatgagtggaagcagcctgaggccctcactaaatgcgcaaacatttccagacatcagaatcttgagccacatgaaccttgtttatataaattagtcagtctcagacatttctttatagcaacacaaaatggaaaaagataacactcgcatcacaggtatgtgtctctggcagctagccaccgttcttaagatatccaggatccactcagccaagagtcttctcatcagtactctaaagacacttatcactcaagagagtctaaggtttttaggagaaaccagggacaaagtctaaatgtttttgtgataactcagattgcccacttttctttgaccacatatcttttacaggaaaaaggattgtaacagtaaagaggtattggcatattatcagagtctcatccattcattcaaaattaggccagtttatcatcctcttgtatgaatatgtctcccagaatgaaatcactcagctttgctgacaacactcaatcttaccaggttccaaaaacaagaatggtctcagggacatacagcttcactcttttaggcatccagtataattgacctaagtgacaatatcttctcttgctcacaccacctttgaggagttaagctaatattgaatttttctcattatataaccctttgatttattcacttgccctcagccactattcctccctctgtccctttatatcagttgtttccaggtttgggagtgacattaggtttgtctgctgggctggcctagactgcaggcagcaatagtattctagcatgtcttccctcagtctagtcttgatcatagagggtaggttatataggtaaggaactagtgggggctatcaagaccaccaggctatataactctacttactgttaatcctaacttttccagatgaaatgaatacttgagaattcttacataaaggtataaaaatatagttatggtttttggcttagggataattcctgtttctggcacttttatttacatccctattcctggtactatggcataacatatgaaaaaataaatttgaggtgaagtgtagtctttattccagcatcctctcctcttcagaagaattgtatgtatcgtcataacagcatcgtcctgatccatcaggtaaaagagaggatgctacctagtggagttattcttgcagccccactcatgttgacagcgagcacattcatgaagatataaaagccagtccttcatgtttatattgcccaacaattagattggcagtttttagacaaacaatgtttcaattgaccatttcaattttctatcaaattttcccctgaggaggacatgtccctctgcattgttggccatttgaggctgtaaagtgtgttttcttgtgtaaagaagtgtgactcggcagtccaaattggtgcaatctcttcttttctggttcttgtatagcccttgaagcattgacatctacccctggttgagcatagcccaatccagagtcagtgattttcctgtcaagatccattggcagctcctttggggttgctggcatcattctggcttgccaggtattatgatcaaagccttcccactagagaatctgtcacatctccatctgctgcctctgtctgttttcttgaccaacagtgaaaaaagagattatgagaaataagataaattaccaaaattgtgaacaaaagagagattatcactaatgacccttaggaagttaaaaaacattataagtgaatactctgaaaaacctgaagccaataagttagaccacttggataaaaaggaccaattcgtgcagagatagaaattgccaaaactgacccaaattaactggaaaacctgaagagaactgtgaactaagtcagaaattgaaaaaccttctcaaaaagaaatgccaaagcccagatatcttcactggtgaattctatcaaatattttgaaagctctttcagacaagaagagaggagggaagactttccagcccatttacagaactggcattaccctcatatcaaagtcacagcaagactcacaggaaaagagtgccatacaccagtgtcaccaataaacataaatgaaaacatccttaacaaacattggcagataatacaaagccacataaaaaaggattacactccatgaccaatgggattcatcccaggaacatatggttggattaacatttgaaaatcagttcatggaatgcactgtattaatggaaaaaaagacataattatctcaaaagatgcaggagaaacagttgacaaaaatgttaacatcactcatgttcataagtttcaacaaaataggaatggaggagaccttcttcactctgataaagggcgtctataaaaaacccacagctaaaatcaaacttaatgaagaaagactgaagactgaatgcttttctcctaagatggggatcaatgcaaggatgtccaatcccaccacttttatttaatattatactggagattgtagccagtgcaataaggcagaaaattaaaaattaaaggcatccagataaaaaggaaaacatacaattctattcacagataacatgaccctgtctgtagaattcacaagcagataaaaactggctagcactaataaatgaatccagaagggcccataggatatcaaatcaatataaaaattaattattaacatatttctctatagaagcaatgaaaatctcaactttcctatcacagtagttaccagaagagcgaaataggaataaatttaggaagacagcagtgtttgttcactgaaaataaaaaaacattcctcagagaaattaaaggtctaaataaatggagagatgcgagttggaaagctcgataatactgttaagatggcagttctcccccagtagatctataggttcaacacaatccctatcaaaatcccagcagggattttatagaaaattgacaaaataggccgggcgcggtggctcatgccggtaatcccagcactttgggaggctgaggcgggcggatcatgagatcaggagatccagaccatcctggctaacacggtgaaaccccgtctctactaaaaatacaaaaaattagccgggcgtggtggcaggctcctcgggaggctgaggcagaaaaatggcatgaacccggtaggcagaagttgcagtgagcggagatcgtgccactgcactccagcctgggtgacagagcgagactccgtctcaaaaaaaaaaaaaaaaaaaaagaaaagaaaaaaagaaaagaaaattgacaaaataatcctaaaaatgtatatgaaaatgcagaggatgcagaagggccaacacaaatttggaaaaaaaaatggaatgtcatatgaaactacaataatccagacagtgtgaaactgagagacacagagatcaatgaacagaagtgagaatctagaaagatattcttactttttttgtcagttgattttcaatgaagttgcataggtaacacaatgttacatttaacaccatataaaatatcagctcaaacaaattagagacctaaacagctaaaatttatgagttaaaactataaaatttctaaaagaaaatacaggagaaaatttttgttactttgggtagttaggcaaaagattcttagttaaaataccaaaagcatgatctacaaataaaaaaaagagagagagaaattgggcttagttaaaatttaaaacttgagtgctccaaaagacattgagagaatgagaagacaagctatagacagggagaaaatatttcacaatttatcacaaattacatttgtgttgaaaaacatgtttccagaataatgtggcaagttcttaaactcaatgtaagaagatgagcaactcaactgaaaatgagcaaaacacacaaatatgctcaactgacatttacaaaagcacaaaaacaattcaatgaaggaaggagagctttcccaacaaacggtgctggagcaactggacaaccacagtggaaaaaaaataagctgagcccaaacctcacgctttatacaaaaaaaaaaaaaaaaacctcaaaatgaatcacaggctttaatgtaaaacacacagttaaaattacaaacattgagccaggtgtggtgtcacaggcctgtactctcacctactcaggagactgagtgggaggatcccttgagcccaggagttcaaggccagcctaggcaagatttttttttaaataaataacaaatacattaaaaaattaaaattacaaatcttttaacaaaaagccatcagaactaagactagacaaagagttcttacacataacaccaaaagtatgatccgtaaaagaaaaagttactaaactggatcttttcaaaattaaaactgttgctctgtgagagacctatgaagagcataaaaagacaagctacagaatgagagaagatatttgcaaaccacatattcaataaagacttgcattcacaatatatgaagaaatgtaaaaactcaacagtaaaaatgaaatccaaataaacaataggcaatgagcaagacatgaacagacgtttcactgaagaggataaacaccaggctaacaagcagatgaaaagacactcaacatcactatccagtaggaaaatacaaatgaaaactgcagtgatgagaatggctgaaatacaaaataaaggtagcaacagatgctggcaaggttacagagaaactggatcattcatattgctggtaggaatggattttaaaatggtacagccactctggaaatggatattgcagttttcttcaaactgaacatgcaatttaccatatgactagcaattgccctcctaggcatttatttcaaacaagggaaaactttatgttcatgaaaaacctgtatacaaatactcttgcagctttattcataatactcctggaagtaattattcataattacttccataaactggaaataatgcaattgtctttcagtgggtgaaggagatctgctggttgaactcataactgagtctacacaagtgccctttctcaagactactatcctgcttctctttgcatatctcccattttctcacaaagaatattaaagacatgtactcaaggatcaaaatttaatgaacataaatattttactgctccatcaaaggcattcttaaatgggactgcagtttggagccactgccttggttctgctaaggtgctgggtgtgctaccgaccttggcatttgcagcattaatggaaaagtcaacataatgaaacaggcaaatggcatcttggtattactgtgaaaacaggtttccctccaggactctctgaaggcagctcagggggccatactttcaaaatggcagagatcaattatggttcctagtgagacccaacccctagcctattcagattcagcactctctctcgctcttttttttccctcattcttccaacttataattgtatatattttcaaatgtgcaaagaagctgaaagaatagtgcagtaaaattcaagttatcactctgatatatctgattaatatctctttatatgcatgaaagcagcgtgtggaatgatagacaatagagacccagaagggtaagagtggttggcagtgggtgtatcgtagaggagtttcttgttggggtcaatgtatctgtctccagtgctggatgcactgaaggccctgactttaccacaactcaatatagcaatgtagcaaaactgcacctgtgccccataaatatatacgaatttaaaaatttaaaaataaaataacatctctctttatagatacaggtagacatgtttgcatagcatgtgtgtgaatgtgtgtgtatgtgtgtgtagagaggcagcaggaatgaagagattaagcttttgtgactgagccattctaaagtaacaaacataaaacacgcatggataaatgtctatgtgacaacaaacctgaatataaacatgaaagaatatgtctataaacatatctctggctagataacctatgaaagaattccctaccccagctcccttactggttaccctgtgaacacaggcaggcagggaacaggacccaactaggttccctcatcctcttgcttccaggcaggtcctgcatccactcctgctgcacagagggctcccatccctgccttggtcggtttcacaggtgctcctctaactctctctgccaccactgccttacctgggtggagctgaggctgccctgaccaggaacagcaccacccatctgtgccccaagaccaggaagttagggggaaccacgcaacagagtcaataactatcccacctccccagtcagtctgaactgatggcgggagatgctgatgcttgcttatcctcattccccgtttatttattcttcattaattcaatccaaactcccctcagtctgaactgatggtgggagatgctgatgcttgcttatcctcattccccgtttatttattcttcattaattcgatccaatctccccagcagtcacttcacccaggaagcagactgacctctgctcttcataatcaggaaaccccaaagcactcttcatcacctccctgatatcacccttcatctctacgtcatcacatgtgggctctaactctgaaggcaggtgtcctcccacagggtcaacccctgaacattggccccagatgtctccccatctcttcccagccctttcagtactgctgtgaatctgtccctcactgagaactggcggggcgatgtgggggaggaggggaaatttcttggtgctgtgtcaaagcatcaagacagacctctccttctctcctgaacctcacactctatcccttcccagacacttgaaataaaacacagaccagaaatgtttatttaagagtcagcacaatttctttttctagacaagtttctcttattctcagggctcagccatgactgtgggtgaccaaacaactattcacaaaggacagagctcacttcaatgccagcttatgaatccacaccttgccacctgcagaggtggaaaaaggcacctaaatccacgatccaatagttcttcctgcccttaactcctcacacacatcaggacacttggagagtgtggagggcacccagggtgcatggtggcagtggaggccttgggaaaactggccaggaagccaagatatgcacctcaggtgactacatttttttactgttctgcacttgctggagaatgaccccaaaagataagatcaatttgttgactaccaacttatttggctgagccatggacatggagcagatgagcattgcctttacctacgacatgcatgaggattctgagacctacctgcagcagttaagccccacacccagagggacacccactctcccacctccttactttctgtatcttttcacactttacatcctcatccttccctctgggagtcttccctctttgggtcttctagtcctatcctaccctctatccccttccaggtggcacagggcttgaccatcacatttgtgtcaggtgacaataatgccagaatcctcagtatgggcagcatcgctttgaggtgagtgatagtgagctgcctgatgagacagacatctcctccacagtgagtgctgatgtcatgaagccctttaggtcttcctagttccttaatatgtttgtcttcaatcctgtcatgggcacctgatgcataatggacacttggctggttcatgcaccctggtctttgatgctgtgttgggatgtttttctgactgttatgtggggtatctgttttctttcatcatattacatctctttccccactcccaagtctgtcctctaaatccacacagtacaccagcatctgcatgtgtgctgtgtgttcctgcctcactttttccttttcatgccttattctcaccatgccacattttcccctcagttgaacagacacagtaggggactagcccattctggcatgtgaccacgcttcaggaggagactgcaggttgggggtgaaggagactctactgaccccacccctgacatcctcttcccccaccccctggcttctgtcctctgcctcagcaccactcctgaacccccattcctgattgtcagaatttttaacataactaaaaatgaaacacaagtgcctctgcattatgtgtgggtgctctctccctttattttatttggggtgaggttattttagggcatggcccagggtaaattcctgcaaggccttggtgccctgctgtgaggtcaaagagggatgggactaagactgcagagccctggctcccccactacctgccaattgccagccctttgtggggtctcttctgctttctctggcctgggagatgctggggtgtttctgatcctggggttcctggggggtggtgcacattagttccaggcatggagggtgctgtgggcactgctgggaagcttggctgtcccctcccaggctctctcctcccaggctctctcagtgcctcctcatctgtttctttagcttttggatcttgagcaccagggcccgggcccccacccactccttcccttccaggagggcctggtccaactccagctgctgtgcaagcaactcctcggcttgggccagctcagctgtgtggggggctcagggccctggtcagagggagtggaggagggaacatcagccagggtagaggggttgaggcccttggaacctgtgttgcaagatctcatggtaagtgaggaattcgacgttgttttctctttttccagcccattagcttaagtccacctgtactgagaatcccagggagcaacctgtcctgggcataggcctctggagggcagatacagatccctggctcaggggctatatctggatgccttgaatgaggatgtggggtcactggaaagagacgaccaggtgtctgtccccactaataaatgattaactgttagatgagggggaattcctgttcaaggactctggactgtgctgctctgggcagagggagggctggagagagggagcccggagggctgggttggggtgggggtggaaggagctgagagttggaaataggcaaaaagctgcagaggtgagggtagtgcagggtgggattgagagaatttcccccgactactgtactgatcccttcatctcctccacccgagcacttggagccacctagggggtggcctcatcttcccactgtcccagaagctgttctgcccttccatacttgccttggagttttgggagcagcatgtttatgagccctggggtgccagggaccaggagggcaggaggaggtgaagaaaacagcaccgagagagccaggggagtgggaggactgtggcaggtgaggcaaagagctgtctgagccgctcagcagccttcaggaggctctctccaggcctgtcttcactccagtgcctggccctacccaggcccccactcctactctgctctcaacctggccccagacaggatcccaaacaactcctgttcctaatgtgaaaaatgtttctgccgctttaggcagaacttgctttagagcactggcacagccttccgccggtcgtgtgtctgattctcttggcactgtgccttttttcacttattcttctgcaaggaaggaattatatcactggttgggtgaggcaactggctcagatgggttcattgagcactcacccgctgggagagtgtctgtcggggccagctatggccaagatgtgtccaaggctctatagctagttggtggaaaggcctggagggttcatattcaggtccacctaacttgaaaacttatattgaccttacttaagtactgattccccctttataatccatgccgcaaacttcattgtcttattttaagaagttgccataagagcctttagcaaccaccctcctgatcagccagcaatcatcaacattgaggcaagaccgtgccccagcaaaaagattaagattagctgaagcctcagatgatccttagcatttttgagcaatagagtaattttaaattaaggtatatacatagttcttttatacataatgctatcatacacttaataggctacagtagagtgtgaatataacttttctatgcactggaaaaacaaaaatttgtgtgacttgtttgttgccatggtctgaaaccaaatctgcagtgtctctgaggtacgtctgtagtttccctttctctcttcctgctggcccggaatgaccttgtttcttgcccctgtctagccctgcatgctgcaagggtttgccttctctggtaggtctgggaactttgcatccttgtaaccttggctcctggcatacgacactggtaccaagctctgttggactagtgagcctcctccccacacacctcctgaactagaaccaaagctctgtgcatgcaccgtgcatgtgtgagccaatgacaagatgttgtcttcctgcaggtgttctgaaggaatgttctgttgtgactggaggacacagccacgggccccccaggcagaagtggctcagaagggagtggatggccccggttttgatcatctggggacaagaaggtcctgagataaaaacccatgttttggaaaacaaaactgcctgagactgaaaagtggctaaccaattcgctatctgggacatcactgcacactgggatggaagatggcttctgccatggtgtagggtcctggacctagacaaagaggccttcctatggctcagtgcttctgaagcacctttaaatgaggccaaagacctcatgttcatgattagctgacttgttcccactcagtggaaaaaaaacccagaacttttgcaaaattttaggagagagggatttccctcttgtctcttagtgctacggttatgcatgactcatacttgaattgcaatgtgtacacagcttaaggacttaactattagaatacaagaggcccaaactactgttgttatagatatgtaaaactatatggtataaggttaaacaacccacaactaattaacagtgaagataaattaactacattgcaaatttaaaacaagattagcagccttttagaaaaaaaaacaaaacacatgggaggttgcaaaggcaatctaaatgatactctaataaaaatccttcatgaaaatgacatttcaaccatctgagtttctgctttaagttatgaactccagaatggactaacacccaataatttacagtagggaggtctaagccacaaagaaaggtgtcagggcagacctgaaacctggaatgaacacgccccctctctcagggtaatgagtaaatcctctaagacccgttctatctcagacagaccatccactcataaggaggtcaaaaacaagttccacacagcactgagacacaaccacctcattgtcctcacctccacggacagagcccaggtgagagccacccctgctcctcctccctcatctcccacagcctcagcaccattgtctgcgccgagtccaccaggactcagctcatcatgtcctttccctgtttgtgtcagtgacactgggtcccccacatactctgcactcacatccccacaaggctctgaacaccactattctgtctccccaacctcctgaaccacagaaatcttcccagtgcaccccctggaatctcagtcaatgatcagcaaaacctccacaccctccctcaggatgttcctgcacctcacagctccagcagcaacctggtctccctgaggacatgaccccctccaaagtcctcccacataggggagtttcccccatggacttgtacccctgggttcagaggtgaggtggggtcctttctcctcactgtggttctcagaactttctgcctccctcctccctaaaacccctaagctgtcatcagattagacccccattcccctcattgtagccattccctgtgggcccctggcctttcctctcaatcctgactcttgtagctcttggttcactgtcaccctctccagcagtctccttgactgttgatgacttcaacatgtggtgggttgagtaatggtcccgaaagaggtccagtcttagtccttggaacctgtgaacaggttgcattacatggtaaaagggactttactcatgtaatgatgattaaggaccttaaaatagggagattctcctggacaatctgtgtggccccaatcaaatcaaatgagccactaaaagcagagaacctgccctggctggagtcagattctgcagaggaggaaggcagaggagacatagaagaggggaggtcagacgttccaagcaggaggattggatgtgccttaggcaccatgtgtgagtagctgaaagaagattctaggagctaagggtggctcttaacaaggaagtggaaacctctgttctatgtgcaagaaagtgaattcagacaagaacctgaatgagcttggaagtggattcttccccagagtccccaggaaggaacacagacctgcccataccttgaccttagccccataagactgtgcggacttgcaacctacaggactgtaacatgataattaggtgctgtttaaagccacttggtttgtggtaatttttatggcagcaatagacacctatacagcagagaagatgcccttgctccctggactctcagatcctggaactcctctcctccatgaccttctcctctctctgcctgaatctcatgcccctgtcatcccctaggcctcatcatgcccaaggaccccagcccttccatactctcaatttcacacttcccactctctggccatctttccactcatcccatgcaaggtggccacaggctctgaggacacagactctatcactttatcatatgctgtgaggtaatatcagtgactactcattgcatatgtgcctgcattccaggcttgaagtccaccctttagcacatcaattccaacaatccttcgacccccaccctgggaataccaatccagtgattctgccatctactcactgtccctcatcgttggtgtcttctctaacttcatgacccaaaccacatggggagcccccaccagggccagcaatcaccctctccctgcatggctcaccctcagcctcctcctggcctaggtgacccttacacaccttctctctgtgctcacacatccaaccctccttccccattcttatctcagctgacaaccttggttcctacctcactgagaaaactgaacacattagaagacagattccatcaccatctgctcatgcatttgcagctgcaacacatgtcaggtgttttaccatgtcggggactgttgtgggtaaaccattctgctcccagccagagccaatccctcttctggtgccccaaacatcatcccttatcatctacttaaaggtgtcagttcatcaattaatacctttttttctctttatcatcaacctttttcctctctccccactggatcattgtggcagtcatgagaatgcacatcccagcccctcagctagagtaagcagaattgatagtggcctcaacttttgaatcctgaaacctattgccacatttgctctgagaccacacctgccccctgtcttttcctgccaatgactgaggaaagcagggcagaaactaaggcaggaacatttcttctctgaaggctgactgaagctctagggcttcctgccacgcttactgaacttctgttagcctgcacagggtctaggatgcttccagctgaccttcctgcactgtttacctcactggggttcagagttgctttgtggtctgatgacattcccagcattttccgtctgtgtcctgaatttctctcataactatttcctccaataaatccttgcacattgaatactgtattggggtctgctcctcaggggaccctaactaacacaagtagtatgaagggtgatccatgaaaacaggcaaaaatgagaatttgaaaaaagcttgcccactgcctggcaggccaagaggatgccaccagggttgtgggagacacagaaattccatagcacaggatgcagctgagctgctatgggtctcacccgtgctgagctgagaggatgccctggttaggggaagctatggcaggtggggtgatagaatgccctgcacaataatgacggggttagggggaaacctacaaagacagtggagttggctggttgctgctcagctgcaatgatgccctatgaaagtatcatgagaatctgcagattgttaacagctgtcactggctacatgtgacagcctctgcagtgtctcatgcagaggtctttatctcttgtagcgaaagggcagataccgtggaatggtagctgaagacatcattatgagggccacagtgctccagagaggtttgccactcagccaaggcaggcctgttacaggaaagtcaggaccctggtggggaaacctgagattctgcaaacaggaacagggttatccgatgggtgccctccaggatcctctgggcatgcataggaggctcacccttctctagtaatggttcccacttcctatgctggaagatgctacagaagtctcacccccatgatacagcaggaatcccactgaagagctttgcaggaactagctggcacgtccccataggaggctgaggagcacttctgggattggaatttgagggtgtttgatcaaggaaccagaatttcaatctggaagaataaaaatcctttggcttggaggcactttctcaaggcatgggtttatcaaacaccccaggactttgataagcggggggccaaacccaccgctggggtgaatccatatagactagaaaaaatgatgcctaactctcaacaaggtagacgtgacttagttgccctggaacttgcacaggatggaataacaaggctgagggaagtgggcatggtgaaggcccaccagtaccatgctccacaagacagtccaaaggaaacaccttccaccagagcctcagaaacgtgatggtgagagggacctgcatcattaagaagtgtcggggtgttgtcctctgcaggctggatgtgatggtagtaaagatgacccagagttacatttattaataaccctggggagagtgtggccctgaagacacaaagaccaaatggtggcagtgacctgaaaaagccagagggcagagttactatggcaaactaaaaggagtagccaataggactcaagctgcagggaatgtggggaaggatagtagagggtgttgtcccaggattaggacaggaagccaacaagggcgctgcttgatatctatgataagaaagcaagaattgagaagcaggagggtgaaggtgtttgacccaatacaaagtcatgatcccatcctcaatgcctagacctcagccaaagttcagattcagatcccagtgacagaggaggagtccatatccctaggaggaataccctgcaaccccgtggaagtaaatgctggcacaattccctcagtccttcagcaaaggaacctatagccatttactcaggagattgtacactggcgaaaggaaagatgcagaactggtcagattattgacactgagtgagagctgacattgatgcccagatgcccacagcactatcatgtctcccatcacagtggggcttacggaggtcagggagtaaacctggacacattacagcccacaatggaactactggttccatagacccagccctggttatcttccaattccctgagtacataattgacactgatgcactgttaagtggagtcacccccacactgggtccctagtctgtggagtcaggactctcattgtgctgaaagccaaagggaaacctctgacgctgcccacatcctggcaaaaaaaaaaaaaaaaaatcatagtgtgtcccagggtgtgtcttgaggaagacactgaaagtaatgtgggagtcacaccaccattagagagctgaaggatgtgggatggtgttggggttgtctattgtctctacataatccagcaacctgtccctgaggaaccctgatgaggactaaagaatgaatgagattactccaggtctggccaagcaggaattataattgcagcttttatgttgtctggatatcactgcagagcagaataataaagcctcgggcacacagcgtgcagctatggatttggtgagtgcatttctttccactccaattagaaaggggatatggagcgattcacatccatgtgggatccacaacacatttatttatagttttttctcagggctattgtaactcccctgccctatatagtatggtctaaagacaatactagacatactggatattctataggatattaaatcagctcatttcactgacaacttcatgttgactgcggtgaatgagcagcaggtagaaagtgcactggagtcattggcaaaacacacgcactccagtatgtgaagataaaccttacagagcttcaagagtggccactgaagtgaagttttatgggttaacaagtgccaagtgtttaggggaatgcaggtgtgttccctccaaggtaaaagacaaactgtttcatcttgcatcctcaccagaaggaaggaagcacactgcctgatgagcctctttgagttctgacaacaccacattccacatctaggtacgtgctttggcaaacactctaggtgatataggaggaggccagcttcaagtagggcctacacaggaaaggaccctgcagcagatccaggccatggtgcgagcagccagcgtccctcagaccccctggggctggtggtgccagtggtggggaaagatgcaggatggagctgaaccaagcaccagtggaagagtcacagtgaagggcctgggattctggagtaagatcgtatcatccacagcagagacatatgccccctgttagaagcaacttttagtgttccttgtcctgatttgatagaaagcttgaccacaggacaccaggcaactatgtggttccaagtgcctttgtgacccacaacatcataaattgcacaagcccaacagcattcatcatgaagtgaaaatggtccacctgggttgagcttgaatcccacgtttacacccacagaaaacacccaagtctgaagtggcactgaacaaccaaacagacaaatggaagttagccagccttcaccatgggtcagcccaggcctggtaggatgagtgcatgaatggagcaaccacagtggcaggcatgagggccagcagcactgacttccccctaccaaggcagatccagctgctgccacctctgaatgtccaactcatcagcattttaggcccatgatatgccctagtggggcactatttctttaggtgactagccattaactaagaagttgactacatttacctacttccatcctggaaggaccagaggttcatcttcacagggttaggtacctattctaggggggtttttctgtcctgctctcagacatagccagtaccattctctggatgctgttgacattcctggtctgcaggctaggttgtgctcctagcccattatctgcctgaaggacccacttggcaagggaaagattcagtgtttccatggctgttccttccactaaccctatcaccagctactctccccaggggctgccagccacaaggaatgccccatatgtagcctcacacctgccactgtggttgttccattcatgtgcccatcctatcatgcatgggctgacccatagtgaaggctggctaacttccatttgtctgtttcgttgtttaatgacacttcagacttggctgttttctgtgggtgtcaacatgggattcaagctcaacccaggtggaccattttcacctcatgatgaatgctgtttggcctgtgcaatctatgactttctgggtcacacaggcacttggaaccacatagttgcttggagtcccgtgatcttccacaggcacaactaagtgccagcctggaggaaacactctgagggttgcatgccatctttcaggacatggtgcgttgtttaaatcagagatgtctctacagttctgtgttcgcaagaggaagaacatgtgggtccagaaatcaaacggtggaagcaagtatggctccatgtctaatgttttagattcacgtaatggggtatttgacatgttttatctcagaacactgggctgtgcagggtacgaggtcctggtttgcaaaggagggtacccttaaaagcagacaaaagacagcccactgaactacacattaagtgtgtcaccagagaagtgtggacagtatatgcccagagaccacctggtgagaagaggagtctcctcctctccaggcccaggtaatagatcctcatccccaggaggaggcatggctactttcacacaataaaggcagaagtgtggaaaccagagatccacctgggggccttctgttttccctcaccccattgcaagtgtgagtagaattatccagcaattcagcctgagaggatttgatttccaagggcccagacccatcagggcagaaggtttgagtcacactcctgggtaatcctccaaggccgtgctcctgtgctctgacatcctcagtggcattggtgctgaggccctgcttcccatggactattcccaaccagtgatgggtcacaccagtgacactaaggcaggacattcctggaagacaggggactcctctgatggccagctgtggctggaggactcctccatggccttgctcaactctccttagattgcctgtggtctaggacatgttaagtaatccttccttccttctttccatcactgggggtcacacttgcatcttattctattgcctttcccagggtaacctacctccctcaccatatcgtctgacaggtgtgtcccctaataaaatgctgtaactttaatcctatgatggcacttgctttttggagcatttggactacaaaatcattttcgtctgcacaccagtgacctcttacttattccaacgtgtaaaatctttttgtttattcaacttcttctacctgcattggctccattttgctggtatttgtattatgtttttgagttcaccaatgtttgttgctgtaagtcactaaatttgggggtagtgttttacacagcaacagataactaatgcagccttcttacatttccgttattctatagaggttaactacgtctattttatttcctcctattttgataatattagccatacagagggtttccagttcccaacgcctattcttttctttattttagtttcttttctcctttgttccttctttttctctttccttctgtccctccttccctctttacttccattctatctctcaccctccttctcccttcctcctttccgtcctttttcttccccttccccttccttcttttcttctttcactccttcctcaattcctccttctttctctcccttcctccattttttcctttttattatgaaattttcctaacatattaaataacccctacgtgattgtgctatcagtaagcattttctgaatctatatgtcaaaagtataataccatggtatataagaaacaagtaaacaacaggaagttattaacagagtctgaataaaaatgcctgctataattctgcagccaagacagtggcttttaactcaattccttcaactaggtgttttcagaacacatgagtttaagttgacacaatcaccttggaaatcatattatcattatctagtatggttaaagtccatacaacatatcgtccaaccctcccactcctaaccatacactctagcgggctttcttgcctatgtgcccaggagacaggcacactgatgtttatggcaaaaactggaatcagccacatatacatcaataggaaatatacatcaataggaaattgtggcataaaatgtaaaccttcagcagtgaaaatgaatgaatgacagcctcccacaccacagataactcctgtacgtaatgtgcatcatgggaaaataaacgcagtaggaatttgctgtacaggaagcttaaaaaccagcaaaagtaaataatttttttttggatatatatatgtacatatatatatatatacttattgtgcaaatctttaaagaaatacaaaggaataaggatcacaagactcaggatggagtctctctctctgggggatgtgactgggcagcagcccaggggagctttacaggtttgtgttttacaccagtgttgggcatctttttagttacatgattgtaatttgttaaacagagttttcaaattaaaatatacctggtatttataaaaatgaaaggaaaagaataccaaagttcattgcaaggatccttaacaagaactacttacattgaaagaaaaccacagagaaatgtaagcagccatgtgacagagaggaccaggatgtgatgaaaatggccttggttaataatagttcatttgatccttagctcactggcatctctctggattttcaagtatacaatgttcaatctgatgtgcaaggtaattccttcttgcaaaggatttggtgttacattttaccacacatacaactgaattaaactttcacagaaatggaaatacacatcactgatcaaaataaatgaaacaagaaaagagtagaaaggaacaaccagtgatggaatagcaaatatgaatggaaagcaaaataagacagctaaaaaaaaaaaaaagaaagcttcagaagcacataatagcagtgctatttagaactgtagtagtgtccaaatcacttctaccacatctcatgcaataccacacccaaaaatgttaagtttacaatagaatgcccctgagccatttttggaaaaaatttgattctcaattcgagttaagcattttgggctactgcatcaaaccaaagttactggcattatgctaagctagatgtgttgactgaagtatgagattcccatttttgtaaatgagaagcaatctgattatgcaattttttctaagtgaaagcaagtttattagagaagtaaagaaacaaaagaatggctactccatagacagagcagtgtgtgtgtatttttttttaagtgtaggcaaatgttttctgaagatgatatgtcaataagaaaattggcacttggggcatacttccactaaatttgagacatcttagacaaaacaaagacttattttcaaggcatgattcttatggcactgaagtcttggaactatttgatctagttactctatgttctcaactgtgttaacttattgaaaaacattgttattaaaggtatttacaagagaaacgcagagatactgttgtttctcctttctctgtctcaaactgttttctctgcagcacccaaggctctgtcatgtctcaaacatttaatcattaatttaaaaagagaagcttatcacagaattagaaaaaaaaatttgaaaattcatatggatccaaaaaagaggttgtgtagccaggagaatgctaagcaaaaagaataaagctggaggcatcaggctatcctacttaaaactatactataaggctaaagtaaccaaaacagcatggtactggtagaaaaacaagcatatagaccaacagaacagaatagaaaactcagaaataagacctcacatctacaaccatgtgatcttcaacaaacctgacaaaaacaagcaatggggaaaggaaacgctatttaataaatggtgctgggaaaactggctagccatatgcagaaaattgaaactggaccccttctttacaccttacacaaaaattaactcaagatggattaaagacttaaatgtaaaacccaaaactagaaaaaccctgaaagaaaatctaggcaataccattcaggacataggcatgggcaaagattttatgatgaaattgccaaaagcaactgccacagaagcaaaaattgacaaatgggatctaattaaacaaaagagcttctgcacaggaaaagaaactatcatcagagcgaaaaggagacaacctacagaatgggagaaaatttatgcaatctatcgatctgacaaaggtctaatattcataatctaaaaagaacttaagcaaatttacatgaaaaaaacaacttcattaagaagtggacaaagcacatgaacagacacttctcaaaagaagacatacaggtggccaaaaaacatattttaaaaagctcaatatcactgatcgttagagaaatgcaaatcaaaaccacaataagataccatctcatgccagtcagaatggcaattattaaaaagttaagaaacaacagattctggcgaggttgtaaagaaataggaatgtttttacactgttggtggaaatgtaaattggttcaaccaatgaggaaggcagtgtggtgattcctcaaagatttagaaccagaaataccatttgacccagcaatcccattgcagggtatatacccaaaggaatataaatcattctattataaagatatgtgcatgtgtttgttcattgcagcacaattcacaacagcaaagacatggaatcaacccaaatgcccaccaatgagggactagataaagaaaatatgatacatatatgccatggaatattatgcagccataaaaaggaatgagatcaaatcctttgcagggatatggatgaagctggaagccattatcctcagcaaactaacacaggaacagaaaaccaaacaccacatgttctcacttataattgtgagctgaacaatgagaacacatggacacagggagaggaacaacacacactgcggcctgttgggggagggcggtggtggggggagcattaggaaaaatggctaatgcatgcaggggttaatacctaggttatgggttgattggtgcagcaaactgccgtggaacccgtttacctgtgtaacaaacctgcacatcctgcatatgtaccctggaacttaacattaaactaaattaaattaaaggacaagattaaaatgttaaggaaaaataattagattaaaagcctttaacttaaaaatcctgaaataatagtttgaattttgcttttaacatatatgcaaatcctttaatactgctcccttccagaggtgcagctgaattccctctcttgagtgtggcttggacttaatgatgcacttctgatatggcctggttctgtgttcccacccaaatcacatcttcaattgtcatgcgaattgtaatccccagtattgaaggagggacctcatgggaggtgattggatcatgctgttctaatgatagtgagtgaattctcatgagatctgatggttttataaggggcttttccccgcttcgctctgcatttctctctcctgccaccatgtgaagaaggacgggttttcttccacttctgccatgattgtaagtttcctggggtggcctcctcagccatgcagaactgggagtcagttaaacctctttcctttataaattacccagtctcaggtatttctttatagcagtgtgagaacagactaatacaacttctgatggagcaatgccgacataacagcttgtgactctgggtgtagaacctaaaactccctgcagcttccaccttctctctctctgtctctgggatcatgagctctggggaaagtcagctgctgtgccatgagcagccctgcagcaaggtccatctggctaagaactgaggccttctgggacccaattacaatgaactaggccttttccaacagccatgtgactgatccatgtttcatgtgaatcctcagccccagtgaagccctcagatgatgcaggcctagactgacaactggactgcaaccttgtgagaggcccttagcaagaagcactcagggaaacttctcctggattcctgacaactggaaactgtgggagatgatcaatatttgttattttgaaatggtacattttacataatttgttatgcaatagtaaataactaatacattttcacaagagaggatgtattattacatgttaatttgcatttgctctaaatttatcatcatcattattattatttttgagacagggtctcactctgtcacccaggctggagtgcagtggcatgatcaccatgcactgcagtgtagacctcctgggctcaagggaccctctgacctcagcctcttgagtagctgggagtacaatcatgaaccactgtgcctggctaattttctaattttttgtagagatgggggtttccccatgttgcccaggctgatcttgaacttctggagtcaacaaatctgccttcctctgccttccacaatgctaggattgcaggtgtgagccaccaaatctggcctaaattaattaaaagatataaatatgtaacttagttttaaaaggtaaggagaattttcatggctgaaaaggatgtattttattaccgttcacaatgattactttacttgaacttcaatttgcaactgtgtcccaagtgaacacaaaaagaagatccagcccttgctaggctgattctatgatggcctcaacaacaagctcctggtcattcaccttccccccattattcaaccaactctaatataggtgctgctgtgaatggatttagcagatataattaagggcctcaattagttgactttaggctgggtttatgctgcttggactgtcctaatcaggtgagtccttgaaaggattgggttcttcctgagcatagagattcacagtgtgagagggattcagcatgaggggtttcctccactgtgggctttgaaaatgaaggggctgtacagggaagaacactggtgggcatcaggaattgagcgcagccctccctgttctctacattgacagccagcaaggaacagggacctcagtcttagaactgcaagaaactgcattctgccacctctgtataagcctgaaggaggattcaaaatgaaaacacagctttgggaagcccggaacagagattccatccacatcatgcccagatttctgactaaggtactataaacagataaatgggtgttgtttggccaggcgtggtaatgcacacctgcaatcctaacatctgaggagctgacacaggaggatcacttgcatccaggaatttgagaccagccaagatcaaacagtgagacactcatctctacaatttctttttaattagctgggcgtggtggcacttgtctgcagtcctatctattctgaagactgaggcaggaagatcccttgagcccaggagtttgaggctgcagtgagccatgatcatgtgactgcacttcaccctggatgacagagggagactctgtctctaaaaacaaataaatcaacaataattgggtgttgtttaaagtcaatgtttgtgataatttgttatgcaatcttataaaattcatacacaggctcaacagactcggaatgaattgatatgcacactagttacataaaataaaatatttcttaatttttcagtgttttacattttataactttctgtgatgcaatttaatacattcatatttcattcattcagtcaacaaaaatttagtgcctaagatgaaccaggtatgccctcatatgctcacgtgcctgacattctagaagcttcacaagaccgaggtggagccactggagtgttttaggtgaggaaatgacacactctgactcacaggagcaggaccactgtggagagaacagtcacgtagcaggtaatgggacaatgctagagccacaatttagaagtgacagggtggtggggactaaggggagaggagggcctgagggatgaaagggacagagggaagggctggagaagcaggaggttaggaaaaggagcagagggaaggaattggaaagcagtagaattcttaggtttaaacacattgttttatagatttttattacatccatctacagagcctcgctcagtgttctttgcagttggcctttaatacctaatgtaggactgcctaaaaactaatgttttttatgttaataaggtttaaaaaacacttagtgttccttctttgcagttggcctttaatactatatttgggactgcctagaaactaattttttttaattaatcaggttttaaaaatactaagtgttcctataagatatacacaccacttagacgtgaatacttcctaaaaacaggcagcacatgagcactgctgaggggcattgtgactgcattgaacacttgcaactgtgaggtgaataaagtctgtactggctcccggttgcaacatatagtaacgcagtgtgctactttatattgaggagatgtcttggactcacccagtaactcagggctgtggaatgaaggtaaatgtaaaaaacaagcgggagtcacagatacattgtctgcgaaagtcaaacttagtagctttgtgagtcctgttgtaatgctttcagacacatttatgtatcaaggggccaaagttacatttttttaccgattagatacctgatcatttaggggttgccaagattctgctacccactgtagttaataaacaaagagaaaacttgtctctatgctgtctcatgtactcaggcacaacttttccggatttaaagaaaaaaaaaacaaaaacctgtctctacgcctccattcccagggcgagctccctctctggcatcgagctccctctctggcggcgagctccctctctggcggcgagctccctctctgtcaccaagctccctggggtgagtttttttctagaagagttcagggaaataggtaaggagtgggaggcagggagtccagttctgggacggggattccgggatgaaaaatgaagagggacggggcccatgacgagggtttctccctggtttctcagacagctcttgggccaagactcagggagacattgagacagagcgcttggcacaggaggagcggggtcagggcgaagtcctatggccccaggcgtggctctcagggtttcaggccccgaaggcgatgtattgattggggaggcccagggttggggattccccatctccgcagtttctcttctccctctcccaacttatgtagggtccttcttcctggacactcaggatgtggactcagttctcacccccatttggtgtcgggtttctagcgaagccaatcggcgtcgctggggtccctgttccagaagtccccgcgaacccattgggactcagattctccccagacgccgaggatggggtcatggcgtcccgaaccctcctcctgctgctcttgggggccctggccctgaccgagacctgggcgggtgagtgcgggatccggagggaaatggcctctgcggggaggaggtaggggcccgcgcactggggcgcaggacccggggagcagcgcaaggaggagggtcggacgggtctcagcccctcctcgcccccaggtacccactccataaggtatttcagcaccgccgtgtcccggccgggtcgcggggagccccggtacatcgcagtgggctacgtggacgacacgcagttcgtgcggttcgacagcgacgcggcgactccgaggatgtagccgcagtcgccgtggttggagcaggagggaccggagtattgggaccggagcacacggaacatcaggcccgcgcacagactgacaagagtgaacctgcccatgccgcgccgctactaccaccagagctaggccggtgaatgaccccggcctggggcgaaggtcacgacccctcctcatcccccacggacgtcccgggtcccccccgcgagtctccggctccaagatccaccccgaggctgcgggacccgccagatcctcgacccgggagaggcccaggcgcctttaccaggtttcattttccgtttaggccaaaatccccgcgggttggtcggggcgggggcggggctcggtgggcggggctgaccgcgggggcggggccagggtctaacaccctccagataatgtatggctgcgacttggggctggaagggcgcctcctccgcgggtatgaacagcacgccaacgatggcaaggattacatagcccggaactaggacctgcgctcctggaccgcggcggacatggcggctcagatcaccaagcgcaagtgggaggcagaagaatttgcagagcagatcagggcctacctggagggcacgtgcgtggagaggctcgcagacacctggagaacgggaaggagacgctgcagctcacgggtaccagggaacacaagacgcctccctgatcgcctgtagatctcctgggctggcttcccacaaagagagaaggaaaatgggaccaacactagaatgtcgtcctctctctggtcctgagggagaggaatcctcctgggtttccagatcctgtacaagagagtgactctgagggtctgccctgctctctgatacaattaagggatgaaatctctgaggaaatgaagggaagacaatccctggaatactgatgaggggttccctttgacaccagcagcagccttgggccccgttacttttcccctcaggccttgttctctgctttacactcaatgtgtgtgggggtctgagtccagctcttctgagtccctcagcctccactcaggtcaggaccagaagtcactgttccctcctcagggactggaattttccacggaattcggagattatcccagatacctgtgtccaggttggtgtctgggttctgtgctcccttccccaccccaggtgtcctgtccattctcaggatggccacatgcgtgctgctggagtgtctcatgagagatgcaaagtgcctgaattttctgacacttcctgttagacctctcccccagacacatatgatccaccattccgtctctgactataaggccaccctgaggtgctgggccctgggcttctaccctgtggagatcacactggcctggcagcaggatggagaggaccagactcgggacatggagcttctagagaccaggcctgcaggggatggaaccttccagaagtgggcagctgtggtggtgccttctggagaggaacagagatacccgtgccatgtgcagcatgaggggttgcccaagcccctcaccctgagatggggtaaggcaggagatgagtggagggggggtcatgtctcttaggaaagcaggagcctctctggagaacttcagcagggtcggtgctgggggctgagggtcagggacgctcaccttccccttttttcccagagcagtcttctcagcccaccatccccatcgtgggtatcgttgctggcctggttctccttggagctgtagtcactggagctgtggtttctgctgtgatgtgcaggaagaagaactcaggtaaggaatggatgaggagtggggtctgagatttcttgtcccactgagggtttcaagccccagttagaagtgtgtcctgcctggttactgggaagcaccatccacactcatgggcctacccagcctgggccctgtgtgccagcacttactcttttgtaaagcacctgtgacaatgaaggacagatttatcaccttgatgattatgatgatggggacctgatcccagcagtcacaagtcacaggggaaggtccctgctgaggacagacctcaggagggcagttggtccaggacccacacctgctttcctcatgtttcctgatcctgtcctagatcagcagttacactttcaggaaacttctctgggatcaaaggctagggggtttgtttagggccgtatggccctgactcctttctggcctctcataggacattttcttcccacagatagagtgagctactctgaagctgcaagtaagtatgaagtgggctgatccctgatccttgggatattgtggtcgggagcccatgggggagctcacccaaccccagattcctcctctagccgcatctcctctgggctctgaccaagtcctgtttttgttctaccccaggcagcgaccatgcgcagggttctgatgtgtctctcacggcttgtaaaggtgagacactgggggacctgatgtgggggggtgttgggggcaatagtggacgcagctgtgctatggggtttctttgaattggatgtattgagcatgtgatgggctgtttaaagtgtcacccctcactgtgacggatatgaatttgttcatgaatattttattttatagtgtgagacagctgccttgtgtgggactgagaggcaagatttgttcacgccttccctttgtgacttcaaaaaccctgactctctttctgcaaaggcacctgaatgtgcctgtgttcctgtaggcataatatgaggaggtggggagaccaacccacccccatgtccaccatgaccctcttccctcatgctgacctgtgttccgtctccaataattaatcattcctgctccatagaggtgaggctgagatgtctccatctctgtctcaactttatgtgcactgagctgtaacttcttacttccctattaaaattagaatctgagtataaatttactttttcaaattcttgccatgagaggttgatgggttaattaaaggagaagattcctaaaatttgagagacaaaataaatggaagacatgagaaccttccagagtccacatgtttcttatgctgatttgttgcatgagaggagagtagatggggctgtgcccagtgggtgctcaggccaccgtgcgctttatgtggtcactgctcagctgggtcatctttgctgctctgttgtccttggctgtatgatccgtccctacggggcttagcgggttttctccccgtgtgcggagatgagagattgtaataaataaaagcacaagacaaagagataaagagaaaacagctgggcccgggggaccactgccatcaagatgcggagaccggtagtggccccgaacagctgggctcgctgatatttattgcatacaagacaaagggcagggtaaggaaggtgaatcttctaaatgattgacaaggtgaagcaagtcacgtgattacaggatagggggcccttcccttttaggtagcatatgtcaccattttcttttctgcacttaagatcaaagactttaagactttcactatttcttctaccgttatctactacaaaattcaaagaggaaccaggagtacaggaggagcatgaaagtggacaaggagcatgaccactgaagcacagcaccacagggaggggtttaggcctctggatgactgcaggtagctctggataatatccagccttctacaagaagctggtggagcagagtgttccccgactcctccaaggaagggagactccctttcatggtctgctaagtaacaggtgccttcctagacactggtgttaccacttgaccaaggagccctcaagtggcccttatgcgggcgtgacagaaggctcatatcttgccttctaggtcacttctcacaatgtcccttcagcacctgaccctatacccgccggttattcctaggttatcttagtaatgcaacaaagagtaatattaaaagctaatgattaataatgtttataataatgattgataattgttcatgatcatctctatatctaatttgtattatgactattcttattctaactattttctttattatactaaaacagtttgtgctttcagtctcttgcctcggcacctgagtaatcctccacccacacttggcccttcagtagaaccttgtcccaccatgacctgtgatcacagggacttggatgtcacctacggcagtccctgcataccagggtccttgtggtatcaagagacaaattttcagatcgttcaagctcttgccgtcttcccagggctctttcctcattgtattttccatcttttctgcaatctttttaaaggaaccagattctgaaatttgccaagaggcagggtcccatagtttctcatcataggtaactttctgttggaactcctcttctgcactcctactcttcttcctgccctgagttgtagtaatcctagtgctggctccaatagaaactcatcaatttataaagcagagtctagtttagattcatatgtggttggaaaattggacccataagcctagggttatctttcctgaagagaaaaatatggttgtgtgctgcagtgtgcagtagagttggtgtggggggagggagggagggagggaggacacacaagcagccctggtgagaaaagatctggtggcactgatgtcagtgtgagatgatgttgttctgtagctgccacaaaaataaagcatttgtcctgaggctacattaataaagatattgcctctagaatagagtggttctctatgatcattccttcaactgacatttgtttctgctaggtatatgactgtttttgcatttagaaagcatcattaaagtaaaaacagaaaaatttcgggccttatggtgtatatgttctagatgcaagcttgtccaacccgcagctcgtgggctgcatgtggcccaggacaattttgaatgtgaggacttttttgcttatctgtggtgcacctgagtcccggagtgagtgcacccacctccctcagggtcaggagtgaatgctttaggaaccctccttttcagtgacctgaaaaagatagagggcacacttactgtgataacccagagtatcagtcaagggggcttgaccttcaaggagttatgggaaagcttaataaagggtggtgtcccagggtcagaaaagatgggcagacagcaagagcactgcttgatatctatgataagcatgtaagaattgaggagccctctccctctccctctccctctccctctccctctccctctgcctctccctctccctctgccacggtctccctctccctctctttccacggtctccctctgatgccgagccgaagctggactgtactgctgccatctcggctcactgcaacctccctgcccgattctcctgcctcagcctgccgagtgcctgcgattgcaggcgcgcgccgccacgcctgactggttttcatatttttttggtggagaaggggtttcgctgtgttggccgggctggtctccagctcctaaccgcgagcgatccgccagcctcggcctcccgaggtgccaggattgcagacggagtctcgttcactcagtgctcaatggtgcccaggctggagtgcagtggcgtgatctcggctcactacaacctccacctcccagccgcctgccttggcctcccaaagtgccaagattgcagcctctgcccggccgccaccctgtctgggatgtgaggagcccctctgcctgactgcccagtctggaaagtgaggagcatctctgcctggccgccatcccatctaggaagtgaggagcgtttctgcccggccgcccatcatctgagatgtggggagtgcctctgccccgccgccccatctgggatgtgaggagcgcctctgcccggccgtgaccccgtctgggaggtgaggagcgtctctgcccggccgccctgtctgagaagtgaggagcccctccgcccggcagccaccccgtctgggaagtgaggagcgtctccgcccggcagccacccactccgggagggagttggggggtcagccccccgcccagccagcctccccgtccgggaggtgaggggcgcctctgcccggccgcccctactgggaagtgaggagcccctctgcccggccagccgccccatccgggagggaggttggggggtcagccccccgcccggccagcctccccgtccgggaggtgaggggcgcctctgcccggccgcccctactgggaagtgaggagcccctctgcccggccagccgccccgtccgggagggaggtggggggggtcagccccccgcctggccagccgctccatccgggagggaggtgggggggtcagccccccgcccagccagccaccccgtccgggaggtgaggggcacctctgcccggctgcccctactgggaagtgaggagcccctctgcccggccaccaccccgtctgggaggtgtacccaacagctcattgagaacgggccatgatgacaatggcggtttagtggaatagaaaggggggaaaggtggggaaaagattgagaaatcggatggttgccctgtctgtgtagaaagaagtagacatgggagacttttcattttgttctgtactaaggaaaattcttctgccttgggatcctgttgatctgtgaccttacccccaaccctgtgctctctgaaacatgtgctgtgtccactcagggttaaatggattaagggcggtgcaagatgtgctttgttaaacagatgcttgaaggcagcatgctcgttaagagtcatcaccactccctaatctcaagtacccagggacacaaacactgcggaaggccgcagggtcctctgcctaggaaaaccagagacctttgttcacttgtttatctgctgaccttccctccactattgtcccatgaccctgccaaatccccctctgtgagaaacacccaagaatgatcaataaaaaaaaaaaaaagaattgaggagcaagcttcacattcagaatccagtggctgaggaagtatccatatccctaagagaaagaaccttgggacaccatgactgttacatgctgggacaattccatcagcccttctgcaaaggagcctatagccatttaatcaggagatgggataagtgttaacattgggtgtgagctaacattgctgcccagattcccacagcaccattatgtccctatcacagtggggcttacagaggccagggaataaacctggacaaattatgccccacggtggaatcactgggtccataaatcctgtcctggttatctccccattctctgtaaaaaggattctctgtaaaaagattacatcgccctaaaccaggacctgagctcttggactgcggcggccatggcggctcagattacccagcgcaagtgggaggcggcccatgaggcggagcagcagacagcctacctggagggcaggtgcgtggagtggctccgcagatacctggagaacaggaaggagacactgcagcacacctgtaccagggaccacgggcgcctccctgatcgcctgtaatctcccgggctggcctcccacaaggatgggagacagatgggaccaacactagaatatcaccctccctctggtcctgagggagaagaatcctcctcagtttccagatcctgtaccagagagtgactctgaggttccacactgctctctgacacaattaagggataaaatctctgaggcaatgacgggaagacgcaattaagggataaaatctctgagggaatgacgggaacacgatccctcatttagtgatcccaagtcactaaatttgggagtagtttgttacacagcaatggataactaatgaagccctcttacatttccattattctctagaggttaactacatctgttttattttctcctattttgataatattagccacacataggtttctagtttctcaacacctattcttttctttattttagtttcttttctcctttgttccatcctttttttttcttttttcttttcttttctttttttttttttttttttttgagacaaagtctcgttctgtcgcccaggctggagtgcagtggctcgatctcggctcactgcaagctctgcctcccaggttcatgccattctcctgcctcagctttccaagtagctgggactacaggcacctgccaccatgcccggctaattttttgtatttttagtagagacagggtttcaccatgttagccaggatggtctctatctcctgacctcgtgatctgcctgcctcagcctcccaaagactgggattacaggcatgagccactgtgcctggcctcttccttccctttctccttccttctagccctccctccatctctttcttctctatttccattcaaactatcgccttccctccttctttctccctttccttcccctccccttccttcttttcttcttttgctttttcctccattcctccttctttctctctcttcctccattttttcctttttattatgaaattttcctaatatataaaataactctatgtgattgggttgtaagtaagcattttctgaatctatatgtcaaaaatataatgtcatgtatatgagaaacaagtaaacaacaggaagttattaacagagtctgaataaaaatgcctgctataattctacagccaagacagtggcttttaactcaattccttcaacacagtgttttcagaacacatcatcaacatcaagtattacacatttattgtaaaagtttaagtagccacaatcactttggaatttgtattatcattatctagtatggttaaagtccatacaacgtatcatccaaccaacccattcctaatcatccactctggggggctttcttgcctatgtgcacaggagacatgcacactaatatttatggcaaaaactggaatcagccacatatacatcaataggaaactagtgaaattgtggtataaccatatgtaagccttcagcagtaaaaatgaatgaatgacagtctcccacaccacagataactcctacacataatgtgcatcatgggaaaataaaggcagtaggaacttgctgtacaggaagcttaaaaaccagcaaaacaaactgatatttgttttggggatatatatatatacacacatacatatatatatgtgtgtgtgtatatatacacatacatatacacatatatacatatatgtgtatatatacacatatatacatatatggatacatatatgtgtatatatacacatatatacacatatatgtatatatatacacatatatacacatatatgtgtatatatatacttattgcacaaatctttgaagaaatacaaaggaataagtatcacaagactcagcatggagtcttctgctgagaccagctcggtcagggagatcctaacccagcggtgctagaggaattaaagacacacacacagaaatatagaggtgtgaagtgggaaatcaggggtctcacagccttcagagctgagccccaaacagagatttacccacatatttattacagtcattagcattgtttctataaatattaaattagttaaaatatcccttatgggaaacgaagggatgggccgaattaaaggaataggttgggctagttaactgcagcaggaacatgcccttaagacacagatcactcatgctattgtttgtggcttaagaatgcctttaagtggttttccaccctgggcgggccaggtgtcccttgccctcattcccgtaaacccacaaccttccagcttgggtgctagggccattatgaacatgttatggtgctgcagaaattttgtttatggccagtctcggggccagtttatgaccagattttgggggacttgctcccaacagtctccttctggaggatgactgggtagcagcccagggtagttttacagttttgtgttttacaccagtgctgggccccctggtagttacttgattataattccttaaacagagttttccaaattaaaatatacctgttttttatagaaatgaaaaagaaaagaatttcaaagttcattgcaaagattcttaacaagaactacttacattggaagaaaaccacagagaattgtaaggagctatgtgacagagaggaccaggatgccatgaaaacggccttggctacatataggtcattcgatccttggctcactggcatctctctagattttcaataatacaatgttcaatatgctatgcaaggtaatttcatcttgcaaagattctacgttacattttaccacacatacaactgaattaaacttttacagaattggaaatgcacatcactgatcaaaataaatgaaacatgaaaagagtaggaaggaatacccagtgatggaatagcaaatatgaatggaaacagaataggactgctaaaaagaaaaaaaattcagaagcacataatagcagtgctatttagaatcatagtggtgtccaaatcacttctatcacatctcattcaataccacaacaaaagatgttaagtgtgttatagaatgcccattggatagccagtttttgaaaataacttgtctctcaattcaagctaaccatttcgggctacagcatcaagccaaagttattggcatcatgctaagctagatgtgttaactgaagtatgagattctcatttttgtaaatgaaaagcaatcagattaggcaatttttttctgcacagcaaaagaaactatcatcaatcagagtgaacagacatgctacagaatgggagaaaaattttgccatctgttcatctgacaaaagtctagtattcagaatccacaaagaacttaagcaaatttacatgaaaaaaaacttcattaaaaagtggacaaagaacatgaacagacacttctaaagaagacatacatgtggccaacaaaaatatgaaaaagaaagctcccatcactgatcattagagaaatgcaaatcaaaacgacaaatgagataccattttatgccagtcagaatggcaattattaaatagtcaagaaacaacagatgctggcaaggttgcggagaaataggaatgcttttacactgttggtggaaaagtaaatggttaatccattgtggaagacagtgacagtgtggcgattcctcaaagatttagaaccagaaataccatttgacccagcaatcccattgcagggtatatacccaaaggaatataaatcattctattataaagacatatgcatgtttacattcatggcagcactattcacaatagcaaagacatggaatcaacccaaatgcccatcaatgatggtctggataaagaaaatatggtacatatacaccatggaatattatgcagccataaaaaggaaggagatcaagtcctttgcagggatatggatgaagctggaagccattatcctcagcaaactcacacaggaacagaaaaccaaacaccacatgttctcatatataactgggaactgagcaatgagaacacatggacacagggagaggaacaacacacactggggcctgttgggggagggtggtgatgggaggatcattagcaaaaatagctaatgcatgccagggttaatacctaggtgatgagttgacaggtgcagcaaaccaacatggcacacatttacctatgtaacaaacctgcacatcctacacatgtaccctggaacttaaaaaaaaattaaattaaaagacaagcttaaagagttaatgaaaaataattagatacaagaagactttgattttcagaaacctgaaacaatagttataattttgcttttaacatatattcaaatcctttgatactgttcctttctagaggtgcagcttaattccctctcttgagtgtggcttggacttaatgaggcacttctgaaatggcctggttctgtgttcccacccaaatctcatcttgagttgttatgcaaattgtaatccctacctattgggggagggacctcatgggagttgattggatcatggggacggtgcccccatgctgttctcctgatgctgagggaattctcatgagatctgatggttttataaggggcttttccctgcttcattgtgcatttctctctcctgtcaccacatgaagaaggacgggtttgcttccacttctgccatgactgtaagtttcctggggcagcctcctcagtcatgcagaactgtgggtcaattaaacctctttcctttataaattacccagtctcaggtatttctttatagcagtgtgagaatggactaatacaacttctaacttatagaatagtgccaacataacagtttgtgactctgggtgtagaacataaaactaactgcggcttccaccttctctctctctgaatctgggatcatgagctctgggggaagccagccgctgtgccataagcagccctgcaggaaggtccacatgactgagaactgaggccttctgggaacagacaacaaggaaccaggccttttccaacagccatgtgactgatccatgtttcttgtgaattcccagccccagcgaagccctcagatgctgcggcccctggctgacaactggagtgcaaccttgtgagaggccctgagcaggaagcactcagggaaacctctcctggattcctgacgattggaaactgtgggagatgagaaacatttgttgtttcgagctaagttttacgtaatttgttatgcaacagtaaataatatattttcacaagagaggatgtattattacacatcaaattgcatttgctctaaatgtgtcatcatcatcattattatttttgagacagggtcttgctctgtcacccaggctggaatgcagtggcatgatcaccatgcactgcagtgtcgaacgcctggggtcaagggactctctgacctcagcctcctgagtagctgcgactaccatcatgaactaccatgcctggctaattttctaattttttgtatagatggaggttttgcccaggctgatcttgaacttctggagtcaacaaatctccattcctctgccttccacagtgctaggatgacagatgtgagccaccacacctggcctaaattaattataagatattaaacatgtaacttagttttaaaaagtaaggacaatttccatggctgaagaggatgtattttatgaccattcacaatgatcacgttacttgaacttcactttccaactgtgtcccaattaaacacaaaaggaagatccaacccttgctaggctgattctatgatggcctcaacaagcagctcctggtcattcaccttcctccagttattcaaccaactctaatgtaggtgctgctgtgaagggatttagcagatataattaagggtctcaattagttgactttatgctgggtttatcctgcttggactgtcctaatcaggtgagtccttgaaaggactgggttcttcatgagcatagagacttacagtgtgaaagggactcagcatgaggggtttcctccaccatgggctttgaaaaggaaggggctatgggccgggcgcggtggctcacgcctgtaatcccgacactttgggaggccgaggcgggcggatcatgaggtcaggaggtcgagacaatcctggctaacaaggtgaaaccctgtctctactaagaaaaaaaaaattagagcatagtggtgggcgcctgtagtcccagctacttgggactgagacaggagaatggtgtgaacccaggaggcggagcttgtagtgagcagagatcattgggccactgtaccccagcctgggctacagagccagactccgtctcaaaaaaaaaaaaaaaaagaaaaattaaggggctgtgtaggaaagaacgctggtgagcaccgggaattgagcccctcccagttctctacattgacagctagccaggaacagggacctcagtcttacaactgcaagaaactgcattctgccacctctgtataaacccgaaggaggattcaaaatgaaaacacagcttttggaagcccagaatggagattctatccacatcttgcccagatttctgaccaaggaactataagcagataaatgtgtgttgttttgccaggcatggtagtgtgcgaatgaattgatgaattgatatacacactagttgcataaaataaaatctttctgaactttttcagtgttttacagtttataattatctgtgatgcaatttaatacactcatatttcattcattaagtcaacaaaaattaacttagtccctacaatgaacgaggtatcccctcatatgctcaagtgcctgacactccagaagcttcacaagaccgaggtggagacactggagtgttttaagtggagaaatgacacactccgactcacaggagcagggccactgtgaaaagaacagttacgtagcaggtcatgggacagtgctagtgtcacaattcatgagtgacagtgtggtgggaactaaggggagaggagggcctgaaggatgagaaggatggagggaagggctggagaagcaggaggtgaggaaaaggagcagaggaaagaatttgaaagcagcagaattcttaggtttaaagacattgttttatggattttaatacatcaatctacagagcctaggagggtgtccttggcagttgtcttttaatacctcatgtgggtctgcctaaaaactattttttatgttaatcaggtttaaaaattactaagtgttcctataaaatatacacaacacttagaagtggatacttcctaaaaacaggcagtgcatgagcactagtgaggggcattgtgactgccttgaacagttgcaactttgaggtgaataaagcctgtaatggcttctggttgcaacatataggaacacagtggctactttgtattgaggagatgtcgtggactcacacagaaactcagagctaaggaatgatggcaaatttaaagtaagacaagcaggagtcacagatacattgtctgggaaagtgcaacttagtagctttgtgagtcctgttgtaatgcttttggacacatttatacattaaggggccaaagtcacattttttacctattagattcctgatcattcaggggttaccaagattctgctacccactgtagttaataaacaaagagcaaattggtctctattctgtctcatgcactcaggcacaacttttccggattaaaaacaaaaacaacaacaacaaaaatctacacctccattcccagatcaagcttactctctggcaccaaactccatggggtgatttttcttctagaagagtccaggtggacaggtaaggagtgggagtcagggagtccagttcagggacagagataatgggatgaaaagtgaaaggagagggacggggcccatgccgagggtttctcccttgtttctcagacagctcctgggccaagactcagggagacattgagacagagcgcttcgcacaggagcagaggggtcagggcgaagtcccagggccccaggcgtggctctcagagtctcaggccccgaaggcggtgtatggattggggagtcccagccttggggattccccaactccgcagtttcttttctccctctcccaacctacgtagggtccttcatcctggatactcacgacgcggacccagttctcactcccattgggtgtcgggtttccagagaagccaatcagtgtcgtcgcggtcgctgttctaaagcccgcacgcacccaccgggactcagattctccccagacgccgaggatggccgtcatggcgccccgaaccctcctcctgctactctcgggggccctggccctgacccagacctgggcgggtgagtgcggggtcgggagggaaaccgcctctgcggggagaagcaaggggccctcctggcgggggcgcaggaccgggggagccgcgccgggacgagggtcgggcaggtctcagccactgctcgcccccaggctcccactccatgaggtatttcttcacatccgtgtcccggcccggccgcggggagccccgcttcatcgccgtgggctacgtggacgacacgcagttcgtgcggttcgacagcgacgccgcgagccagaggatggagccgcgggcgccgtggatagagcaggaggggccggagtattgggaccaggagacacggaatgtgaaggcccagtcacagactgaccgagtggacctggggaccctgcgcggctactacaaccagagcgaggccggtgagtgaccccggccgggggcgcaggtcaggacccctcatcccccacggacgggccaggtcgcccacagtctccgggtccgagatccaccccgaagccgcgggaccccgagacccttgccccgggagaggcccaggcgcctttacccggtttcattttcagtttaggccaaaaatccccccgggttggtcggggctgggcggggctcgggggactgggctgaccgcggggtcggggccaggttctcacaccatccagataatgtatggctgcgacgtggggtcggacgggcgcttcctccgcgggtaccggcaggacgcctacgacggcaaggattacatcgccctgaacgaggacctgcgctcttggaccgcggcggacatggcggctcagatcaccaagcgcaagtgggaggcggcccatgaggcggagcagttgagagcctacctggatggcacgtgcgtggagtggctccgcagatacctggagaacgggaaggagacgctgcagcgcacgggtaccaggggccacggggcgcctccctgatcgcctgtagatctcccgggctggcctcccacaaggaggggagacaattgggaccaacactagaatatcaccctccctctggtcctgagggagaggaatcctcctgggttccagatcctgtaccagagagtgactctgaggttccgccctgctctctgacacaattaagggataaaatctctgaaggagtgacgggaagacgatccctcgaatactgatgagtggttccctttgacaccggcagcagccttgggcccgtgacttttcctctcaggccttgttctctgcttcacactcaatgtgtgtgggggtctgagtccagcacttctgagtccctcagcctccactcaggtcaggaccagaagtcgctgttcccttctcagggaatagaagattatcccaggtgcctgtgtccaggctggtgtctgggttctgtgctctcttccccatcccgggtgtcctgtccattctcaagatggccacatgcgtgctggtggagtgtcccatgacagatgcaaaatgcctgaattttctgactcttcccgtcagacccccccaagacacatatgacccaccaccccatctctgaccatgaggccaccctgaggtgctgggccctgggcttctaccctgcggagatcacactgacctggcagcgggatggggaggaccagacccaggacacggagctcgtggagaccaggcctgcaggggatggaaccttccagaagtgggcggctgtggtggtgccttctggagaggagcagagatacacctgccatgtgcagcatgagggtctgcccaagcccctcaccctgagatggggtaaggagggagatgggggtgtcatgtctcttagggaaagcaggagcctctctggagacctttagcagggtcagggcccctcaccttcccctcttttcccagagctgtcttcccagcccaccatccccatcgtgggcatcattgctggcctggttctccttggagctgtgatcactggagctgtggtcgctgccgtgatgtggaggaggaagagctcaggtggagaaggggtgaagggtggggtctgagatttcttgtctcactgagggttccaagccccagctagaaatgtgccctgtctcattactgggaagcaccgtccacaatcatgggcctacccagtctgggccctgtgtgccagcacttactcttttgtaaagcacctgttaaaatgaaggacagatttatcaccttgattacggcggtgatgggacctgatcccagcagtcacaagtcacaggggaaggtccctgaggacagacctcaggagggctattggtccaggacccacacctgctttcttcatgtttcctgatcccgccctgggtctgcagtcacacatttctggaaacttctctggggtccaagactaggaggttcctctaggaccttaaggccctggctcctttctggtatctcacaggacattttcttctcacagatagaaaaggagggagttacactcaggctgcaagtaagtatgaaggaggctgatgcctgaggtccttgggatattgtgtttgggagcccatgggggagcccacccacctcacaattcctcctctagccacatcttctgtgggatctgaccaggttctgtttttgttctaccccaggcagtgacagtgcccagggctctgatgtgtccctcacagcttgtaaaggtgagagcttggaggacctaatgtgtgttgggtgttgggcggaacagtggacacagctgtgctatggggtttctttgcattggatgtattgagcatgcgatgggctgtttaaggtgtgacccctcactgtgatggatatgaatttgttcatgaatatttttttctatagtgtgagacagctgccttgtgtgggactgagaggcaagagttgttcctgcccttccctttgtgacttgaagaaccctgactttgtttctgcaaaggcacctgcatgtgtctgtgttcgtgtaggcataatgtgaggaggtggggagaccaccccacccccatgtccaccatgaccctcttcccacgctgacctgtgctccctccccaatcatctttcctgttccagagaggtggggctgaggtgtctccatctctgtctcaacttcatggtgcactgagctgtaacttcttccttccctattaaaattagaaccttagtataaatttactttctcaaattcttgccatgagaggttgatgagttaattaaaggagaagattcctaaaatttgagagacaaaataaatggaagacatgagaaccttccagagtccacgtgtttcttgtgctgatttgttgcaggggaggagagtagatggggctgtgcccagtttctgttctggccaccatgggctttatgtggtcacagctcacctgggtcatctttgctgctccattgtccttggcccttcagtagaaccttgtcccaccaagacctgtgatcacagggagttggatgtcacctagggtggtccctgcatacaaatctccttgtggtatcaagagacaaattttcagacctgtccaggtcttgccttcctcccagggctttttccttaatggtattttcgatttttctccaatctttttaaaggaaccagattgtgacatttgcagagaggaggggtcccatagtttctcatcatggttaactttctgttggaactcctcttctgccctcctactcttcttcctgctctgagttgtagtaatcctagtgctggctccaatccaaactcatagatttataaagcagagtctaatttagattcatatgtggttggaaaattgtacccataaggctagggttattgttcctgaagagaaatatatggttttgtgctgaagtgtgcaggagggttggtgtgggaggagggaggacatacaagcagccctggtgagaaaagcactggcggcatggatgtccacgtgaacttatgttctttagctgccacaaaacagcatttgccctgtggctacattaataaagatatgggctttagaatagggaggtgctctacagtgatcattcattcaactgacatttgttgtctgctagggatatgactgcttttgcatttagaaagcatccttaaagtaaaaacagaaaaatgtctggggttatggtgcatacgttctagatgcaggcttgtccaacccgcggctcgtgggctgcatgtggcccaggacaattttgaatgtgaggacttttttgcttatctgtggtgaacctgagtcctggagtgagtgcacccacctccctcagggtcaggagtgaatgctttaggaaccctccttttcagtgacctgcaaaagatagagggcacatttactgtgataacccagagtatcagccaagggggcttgaccttcaaggagttgtggggaaggttaataaagggtggtgtcccagggtcagaaaagatgggcagacagcaagggcactgcttgatatctatgataagcatgtggaattgaggagcaagcttcagattcagaatccagtgactaaggacatatctatatccctaagagaaagaaccttgggacacgatgatggttatatgctgggacaattccatcagcccttctgcaaaggagcctatagccatttaatcaggagatgggataagtattaacattgggtgtgagctgacattgctgcccagattcctacagcaccattatgtcccccatcacactggggcttacagaggccagggaataaacctagatacattatgccccatggtggaatcaccagttccataaatcctgtcctggttatctccccattctctgagtgcataattggccttgatgcactggcaactggagtcaccccacactgtgtccctagtctggagagtaagggatctcactgtgctgaagcccaaagggaaacatccctcatccaagccaaaccagaagcaatattgtgcctcagggtgggtcttgtggagggtactgcaggtattataggggtggcactgccattacagacctgaacgatgtggggtggtgttgggattgcctgttatctccatataactcagcaatctgtacctgcagaagcctgatatggctaaagaatgaatggaattactccagacttgaccaagtaggagtcctgattgcagctgccatgctggctggatatcactgcctggggagattaataaggcctcaggcacatggcaagcagctgtggatttggtgagtgcattccctcccatttcatttagaagatggatatggaatgattcacattcacatgggatttataatacatttattgatagcttgcatcagggctaccttaactcctcaaccttctataaatatcaccttaagagacctggacgaatcagacatcccacagaatactaaatctcttcatttcattggcaatatcacataaattgggaaggatgaacaacagcaggaaagtacgctgaattccctggcaaaacatgtgcactacagaaggtgaagataaaacttacagagcttcaagagtggccactgcagtgaagtgttatgggtccagtggttaggggcatgcagagctccccgccgccacacacacacacaaagtaaaagacacacttgcatcttgcatcctcaccagaaggaaggatgcacactaccttgtgagcctctctgggttctagcaacaccacattccacatctaagtttattgctttggctgacactctgggtgatataggaggaggccagctttgagtggggcctggactggaaaggacactgcagcagacccaggctgtggtgcagtcagtcaccatccctcagacccctggtgctggaggtggcggtctggggaaagaagcaggatggagctgaaccaagcatcagtgggaaagtcagaatgcagggcctgggatcaggagtaaggccatggagtccacagcagagaaacatgctccatgttagaagcaacttttagcatgttactggccctgataagatagaatgcttgagcataggacaccaagcaaccatgtgattccaagtgcccgtgtgtattggcttctatgtgacccatagagtcattcactggacaggcccagcggcatctatcatgagacgaaaacggtccatgtcggttgagcctcaattccatgttaacacccacagaaaacacccagtcctgatgtggccctgaataaccaaacaaattgaagacaaattgaagttagccagtctgcatcatggatcagcccaggcctgataggaaggacccgtgagtggagcaaccacagtggcagggatgaagctacaaatgagtccagcagcactgtctctccactaccaaggcccacccagctactgcttcctctgaatactctgctcgtgagcattgcagaccaatgataggcaccaatagggcactatttcttaaagtaactgactagcccctaagtgacaagttgaatagcttgagcaccatccatcctggaaggggcagaagtttatcctcacagggataggctcacagggatgcgatgtggtgtggttttcctctctgctctcagaccctcagtcaacaacactattggcattcctgatccactggctcagaatttcagtacactatctgcctgggggacacacctgttggggaaggggatgaagtgtgggccctgaccatgggatcccctggtcgtatcaccacctgcgcctctcaagtgctgccaggcacacagagtcatggacaggactctacaggcacaattcagtaccagcttggatgaaaccctctgaggaatgggtgccatctttcaggatgtgatgcatgtattgaatcaaagacgtctctaaggcactgttttcagaaggaagaatacgcgggtccaaaaaccaagaagtcaaagcaggtgtgtctcattccttatattcacccccagggtgatttacttataagtaaataaatacataacatgaatacttaaataaatttatttatgcatgtatgtatgtatgtatttattttattcattatattcacccccagggtgattttgctcttcttacttccaaaatctggactctgcagggtaggaggtcctggtttcccaaagagggcaccctggcaaggagacaaatgagagtccatggaactacacattgtggttgcacccagggatatttgaatagtatgtgcccagagacaagcaggtgagaagaggaggaggcagcgctgctatcacacaatgagggcaggagaagtgtgtgtggaaaccaggaatccacttggggacgtcctggtttcccttgtccgttgtgtgagcggaatcatccagcaacccagcctgagagggtttgatattcaagagcccagaaccctcaggaaggaaggattgagtgatactcctaggtaatgtcccacgtctctgcttctgtgctctgacatcctcagcaggattagtgcagaagccctgcttccatgagttgttcccagccagtgaccggtcacagcaagcacactaaggcaggccattactgggagacatgggactcctctgatggccaaatgtggctccaggactcctccatgcccttcctcaactctccttagactgcctctgctctaggatgcgtcgaacagaccttgtctccttctgtccagcacttggggtcacacttgcatcattgtctgccgccttttccagggatttctggctcgcgtctcatattcccttacaggtgtgtcccctcataagatgccgtagactttaagctcatcttggcatctgctccttggaggacttggactaaaaagcattgccatgtgcacaccaataactcttacttattccaacctgtaaaatccatctctttaaccaacttctgccacccccataaaatctattttgcgcgcgttcgtagtatctctttgaattaacagatatttgttgtattaagccactaaattttgaggtagtttgtgacacagcagttaataactattaaggctttcttaagtttctgttattccatggatgttatctacatcttttaatttcctgcattttaataatattagccacacttgctgtttctaatcctttcctcctattcttttttgaaaatgttcattttgtctttctctgtccttccatctttctttcctcctttcctccctcagagctttctccctccctccactttttcataaactctatgtggttaggctaaaaagaatcactatttgaatcttatgcttaaagtataatgccataatttacaggataaaagtaaagaaaaggaaggtattaatggaatatgaaaaaatgcctagggtgattctgtagccaagacaatggttttttaacatgtaatctccaccttcaactgaatgttttcagaacacatgagcaacataagttctttcccattcttggtacaagcacttgggaaatcaaattagccttatcttgtatgattaatgtccatacactgtataatcccaccatctgctcctgatcatacactctggggatatctttggctatgtgtcccagagacgtgtacaccaatgtttatggcaaaaaaactggaaacaatcacatatgcatcaatgggaattaacaaaattctgatataattacgaaaagtaaaattttagcagtaaaaatgattgaacagcaccctcccacatcagagataactctcctacacataacatgcatcacagaagaatacatatagtgtgagttctctgtacagcgaagttaaaaaaacaggtcagactgtgatttgggtatatatatttattgtaaaaatctttagagacagtgcaaaggactagtaaatacaagactcaagatagaggttccttttggtggataggattgggcaacagtctagggtggcttcataggttctgtttcttatgccaggagaggatgtccaggtaattagttacttgatcataaatctttatttatttatttattcatttatttttgagatggagtctcactcttgttgcccaagcgggagtgcaatggtgtgatctcgtctcactgcaacctccgcctcccatgttcaagcgattctcctacctcagcctctgagtagctaggattacaggcacctgccatgatgcccggctaatttttgtatttttcgtacagactgtgcttcaccatgttggccaggctggtctccaactcctgatctcaggtgatccacccacttcggcctcccaaaatgctgggattagaagcatgagccaccactcctggcccacaaatatttatagtggcaattttcaaaatgcaccttgtgtgccattcctgattatttggaaatgaaagagaaaagaaaacacaaaagttcattgcaaggatccttagcaataactacatgagttaaaacaaagccacagccaattgtaaggagccatgtgacagagagtaccaggatgccatgaaaaaatagcctttgatagaaataggtcatttgattcttggctaattggcaactctctacattctctggtgtacaatgttcaatctgatgtgcaaggcaattgtatctcgcaaagaatttgagaatttgatatgttgctcaattttaccacggatacaagtgaattaaacttttacagaatagaaaaaaagcactgtcgagcaaaataaattaaatgaaaacacataaaggaataactagtgatgaaatagcaatacgaatggaaaacacgaaagagcttcttttacagcaacattagaagcacaaaataactgtatttttcagaatcatactggagtccaaatcacttctaccacatctaattaaaaaacacagcgaaagatgttaaattgatcaatggatgcacactgaatacccagttattgaaaaatcgtgttcctagattggagttaaccatttccgcctaccacatcaaaccaaatctttgtcgtgatgctaagctagctgtacagacaaagatgtgagacacattttctctaactgcaaagcaccctgattaggcaaatatttttgtagaagcttgagtaagaaaattgacattttgggcattcttaaaaggaattagtagcttctgaggaaaaagaaagatagttatgattgtaaaggcattattatacggcaccagtcgtgggactctttggtctagctactgtattttctcaactttcttgcaactcatcaaagagaacattaatattaaaggcatttgcaaaaaaaatctgagatattgttgtatctccattctctgtctcaaagttttattcattactttacaaaagataattttaaagtattaaagaaaattagtcagatacaagaagtatttgatttacaaaatcctgaaacaataatgttaattgtggtgccagctacttgggaggctgaaggaggagcattgatggcatgagcccaggaggttgaggcttcagtgaatcatgagcatgccactgcattccagccagggcaacagagtgttactttgtctaaaaataactaactagctaactaactaactaaataaataaataatggaggcagtgcacgagccctggtgaagggcactttggctgcattgagcacttgcagatttgaggtgattacattctgtacgttacttaacatgcatactgtacatacttaacatgcatataaattctttgatactcctccttgcagaggtgcagcttcattcccttcctgtgagtgtggcctgaacttaatgactcacttacagactgatagagtaatgttgagataatagtttgtgactctgggtgtagatcataagactcactaagtctgggagcggtcactcacgcctgtaatcccaacactttgggaggtcaagagggcagatcatgaagtcagaagttcgagaccagcctggccaagatggtgaaaccccgtctctactaaaaatacaaaaattagccaggtgtggtggtgcatgcctgtaatcccagttgctcaggaggctgaggcaggagaatcacttgaacctggaagtcggaggttgcagtgagccaagatccagccactgcattccagcctgggtgacagggtgagactctgtctcaaaaaacaaacaaacaaacaaacaaacaaacaaacaaacaaaaaactcactgcagcttcctactttggttctggttttctctttctctgggatcatgagccttgggggaagccagctgctgtgtcataagcaggcctgtggaaagctccaagtgactaggaagtgaggcctcctggggccagacaataagaagatgaagcctcttccaacagccacgtgggatattcttgtgacttgtgaatccccagccccatttgagccctcagatgataaagccctggatgacaattagaccgcaattttgtgagtggccctgagccagaagaactttgagaaaactttcctggattcctgaccactagaaactgtgggacatgataaatatttgttgattttagttgctaagttttaagtgacttgttatgcatcagtagataactaacacaccttcacaagagaggatgaatcattgaatttttcatttgctctaaattgattataagatattaaacatgtcatttgcttttaatatttaacaagaattttcatggttatataagatatattttattatcactaacaatgatcaattttttttaccttcaatttgtatgttctattcaaacacaaaaggaagagccaggctatgctagggtgattctatgatgacaccccaataaccacccttggttgctcacattaccccagttactcggttgacactaatgtaggtgctgctgtgaagggattttgcagatgtattccaggtcccctgtcagttggctttaagatggggattatcctgcttggactgtcctaatcaggtaagctctgaaaaggactgggttcttcctgagaatagagactcacagtgtgagagggattcagtgtgaggggcttcctccattgtgggctttgaaaatggtgggatcatggtgaaagaacactggtggccaataggaagtagaagccctccccactgtctactctgatagcctgaaggaaacagggaccttagtcctacaattaccagaaaccgaattctgccaacgagctctatataagcttgggggagaatcccaatcttaagatgaggatacagctttgcgaaaccctgaacaaagaatctctgacactaggcctggatttctgatgaaggaaatgcagaaaaataaatgagtgctcttttaagccactaagtttgtggtaattggttatgtactaatagaaaattcataaacagattcaacagctaagcatatgacatttcctccaatggaatgaatttatgaactgatatgcatagtagttgcataaaaccaaatgtttcctaacttgctttgcatttttcattttgtgatttttgtgtgatacaatttttaacacaatcatatttcattcactcaagaaaattaacttagtgcctactatgtgccagatatgcttttagatgctgcagacacaactttgatcaaaacaacccaaagcccctgtgcttgtgccttccattttagaggcttcttgagagtgagatggagccattggagtgttttaagtgaagaaatgacacaatctgactcacattagcaggatttctgaccattgttgggagaacagtcatgggcagcaggcgaggggacagagctagggccgcaattcagtagtgacagagtagtagagactaaggggagaggagggcctgatgggtgacagggacagagagaagggctggagaagcaggaggtgaggtaaaggaacagagagaaagaattctaaagcaatggaattctcagacttaaacacagggttttatagatttttaatccatttatcctcagagcctggcacagtgttacttgcaccttggtctttaatacattctgtggggctgtctaataactaattgcctccttatgataaacaggttagaaaagaataccaggtgtcccaataaaatatgcacatagcttagatgtgaataattcctaaatataggcaggtgcatgagatggtcattgtggctcatgcctgtaataccagcattttgggaggctgaggcaggaggatcatttgagctcaggagttcaagactagcgagagcaacatagggagacctcatttctacaaatttttttttagaaaaattagccaggagtggtggtacaagcctgtggtgccagatacttggaggctgaaggaggagcattgatcgcatgagcccaggaggtcgaggcttcagtgagtcatgaacgtgccacagcactccagctagggcaacagagtgatactcggtctaaaaataactaactaactaaataaatgataaataaaggcggtgcatgagcactggtgaagggcactttggctgcattgagcacttgcaaatttgaggtgattaaattctgtacaggctcctggttgcaatatacggtaacacattgtgctttgtattgagatgtcctggactcgcgcacacaaactcagggctataagataaagataatttaaaaatacaacagaccagagtcacagatacacagtctgggaaagtaaaacttaactttgtgagtctaactgcaatgcgtttagacacatttatatataatggggccaaaaatcacctcttttacaaattagattcgtgaccattcaggggctaccaagattgtgctagccactgtactgcgctacccactgttactaagattgtgctactccgctgcgggaccagcggagatcctccacccaataaaagccccaggcgcctataccggattccattttcagttcaggcccaaatccccgggggttggtcgaggctgaggcggggctccgtcgaggctgaggcggggctcagcggcctgggctgaccgcagtcgctgggaatgggtctcacacccttcaatgggtacacagctgcgacgtggactcggactgcagtctcctcagtgggtatgaacataccctatcacggcgccagttacctcgtccgaaaccaggaactgcgctcttggactgcagcggacaaggcggctcagatgccctggcggaggaacaggcagagctgctcaaaacctacctgcagggaaggtgggcggagtggctcagcaaagtccttaagaatgggaaggagaggctgcagtgcccaggtaccagtggccacggggtgcctccctgatctcctgcagatctccttgagtcacattccaaaagaagggaaggaaaatgggaccaacgctaaaatatccctctccctcttgtgaggaggaagagtcctcccgggttttcagatcctatactagagagtgactgagggcctgccctgcactctgggacagttaaaggatgtagtctctgagggaaaggaggggaagacaatccctgaaatactgatccgcggtcccctttgtccccacagcagccttgggcaccaggaattttcctctcaggccttgttctctgcctcacactcaatgtgtatttgtgggtctgattccagcttttttgacctcggcctccgctcaggtcaggaccagaaatctctgttccggcctcagacactaaaactttctaaggaatagaagattgccccaggtgcctgtgtctagactggtgtctgagttgctcccttccccacttcaggtgtcccgtcaattttcaggatggtcccatgaggtggaatgtcccatgaggaatgcaaagtgcctgaattttctgactcttcccctcagaaccccaaagactcacatgacccaccaccccatctctgaccatgaggccaccctgaggtgctgggctctgggcttctaccctgtggagatcacactgacccagtagtgggatggacaggaccaaatgtaggatgcagaggttgtggagaccacacctgcagggtacagaaccttccagaagtgggcagctgtggtggtgtcttctggagaggagcagagatacacatgccatgtgcagcacgatgggctgccagagcccctcaccctgagatgggtaaggaaggggatgaggggtcatgtctcttctcacgggaactaggagcccttctggagcccttcagcaaggtcagggtttgaggcctgatggtcagggcccctcacgttcccctcctttcttacagctgtcttcccagcccaccagccccatcatgggcatcgttactgtcctggttgttcttggtgctgttttcaccagagctgtggtcactgctgtgatgtgaagaataagagcccaggtaggaaaggggtgagctccgagttttcttcttccattggtggattcccagccccagatgggagttggcttgtatcctgcctagtcatgaggcaccatctctgtctatcaacacttactcttttgtaaagaacttgtgaaaatgaaggacaaatttatcaccttcattggagtcatgggaacctgactcccagcagtcacaggtcaggggaaggtacccgcagaggacagacctcactaggacaattagtccagtttcaacacatcctcttacctagggtttcctgattctgacctgggtctgcagtcacagttctggacactcctctgggatctcatgaccctgcttcctccctggcctttcacagtttattttctttccacagatggaaaaggaggcagctatgctaaggcttcatgcaagtgtggtaggggtgggaagagtgatccctgagatccttgggatagtgtagacaggagcccatgggggagctcaccaccccaaaattcctcctttagtcacatcatctgtgggctctgaccagattttgtttttgttccacccgaaacagggacagtacccagggctctgatgtgtctctcaaggcttgtaaaatgacaacttagggggcctgaagggaaggaggagttggggcataggggacacaactaggctctggagattctttgatttggaatttttcagggtgtggtgggctgttcagtgtcacaacttactatgactgatctgaatttgttcatgactattttttttctaagactgccttgtgagggactgagatgcaagatttgttcatgcctcccctttgtgacttcaagggcctctgtcttctctttctgccaaggtgtctgaatgtgtctacatccctggtatcatgtgagaagtggggagaccagcccaccctcatgtccaccatcacccctgatattgtttggatctgtgtctccacccaaatctcatgttcacttgtaatcactaaggttggaggtggcacctcagggaggtgattggctcatgaggatggatccttcatgaatagtttaggaccatctctttggtgctgttcttgtgatagttctcacaacgtctggtgtttaaaagtgtgtggtacctccctgctctctctccctcctactccaggcttgtaagtcatgcctacttccccttaaccttccagcatgattgaaaatttcctgaggtcctctcataagttgagcagatgccagaatcatactttcatatagcctgcagaaccatgagccaatttaaaccttctgtctttataaattacccagtctcaggtatttctttataacagttgagaatgaataattcagaaaatcggtaccagaagttgggtactgcaataaacgtagctgaaaatgtgaaaatgtctttggaactgggtaacaggtagaggttggaagagtttggagagtttagaagacaagaaaatgggggaaaacttgcaacttcctagaggtttgttaaattgttgtgaccaaaatgctgatagtgatatagacaatagagcccaggctgatgaggtctcagatggagatgaggaacttactgggacctagagaaaaggtcacttttgttatgcattggcaaagaacttggaggcattctgccccctccttagggatctgtggaactttgaacatgagggtgatgattaagggtatctgatagaagaaatttctaagcagcatagcattcaagatttggcttcctgttgtaatagtctatgcacatatgtgtgagcaaaaaaatgatctgaaactggaactgatatttaaaggggaaatttaatatccaggacaattcccagtggagctgcaggagcaggacccctatcaggactactaaatggtggagccactggcaatgtgcaagctcagcttggaaaatccataggtattcaattttcacccatgagagcagctatatgggttatgttcagcaaacccaaggatgtggggctgcaaatggcattgtgagcccaccacttgaaccagtgtgctcaggattcaagatatagggtcaaaggagattattttagagctttaaattttaacatcttccatgatgagtttcagctttgtgaggacactgcattcatttcttttggcccatttattccttttagaatggaaatgtataagaaatgtctcttccactcttgtattaatattttagaagtaaataacctttttaaaactttacaggctcacagctatagggacttaccttgagtctcagatgagactttggaattttgagttgatgctggaacaacctagcacatttgggacaattgggaaattatcatattttgcaatgggagaaaaacatgagctctggctggctagggacagaatgtaatgatataaatatttacccccgatacctcatgttaaaatctgacccccagtgttggacgtggggcctaatgggtgctgtttgggtcatgggggccaatcttttatgaataaagagatcctgtcctctctcgcaagtgaatgaattgttactcttttagtttccaagagagacagttgttaaaaagagcctggcaacttcctaagctctctgttcctctcttaccgtgtgatctctgcacataccagctcccctttgccttctgccatgagtgggagcagcctgaggccctcaccaaatgctcaaacatttccagacatcagaatcccaagccacatgaaccttgtttatataaattagtcagtctctgacatttctttatagcaacacaaaatggaataagacagcgctctcatcacaggtatgtgtctctggcattcagcccccattctcaagatatccagggtccgctcagccatgagtcctctcatcaatattctaactcttatcactcaagagattctaaggtttttaggagaaaccagggacaaagactaaatgtttttgttatacctcagattacccgcttttctttgaccacatatcttttataggaaaaggattataaaagtaaagaggtattggcgtattatcagagtctcattcagtcattcaaaattagaacagttcaccatcctctcgtatgaatatgtctcccagaatgaagtcactcaggtttgcagacaccactcaaccttaccaggctccaaaaacaagaatggtctcaaggacatatggcttcactcttttaggcacccagtataattgacctaagagacaatatcttctcttgctcacagcacttttgaggagttaagctaatattgaattttcctcattatataaccctttgatttagtcacttaccctcagccattattcctccttctgtccctttatatcagtcttttccagttttagaggtgacatcaggtttgtctgctgtgctgacctagactgcaggcagcaatagtattctagcatgccttccctcggtctactcttggtcatagagggtaggttatgtaggtaaggaactagtgggggccatctgaccaccaggctatatagctctatttactgttaatcctgactttgccagatgaaatgaaggcatagcaccatctttgagttgcttgagaattcttatataaagatgtaaatatatagttatggtttttggcttaaagataattcctgtttctggcactttgattttcatccctattcctggtaccactgcatcacatatgaaaaaagaaatttgaggtgaagcgtagtcattattccagcatcctctccccttcagaagaattgtatgtatagtcataacagcatcatcctgatccatcaggtaaaagagaggaagctatctagaggagtcactcttgcagccccacccatgtggacagtgagcacattcatgaagatgtaaaagccagtccttcatgtttatattgcccaacaactatattgccagtttttagacaaacaatgcttcaactgaccatttcaattttctatcaaagttttcttctgaggaggacatctccctgtgcattgttagccatttgaggctgtaaagtgtgttttcttgcgtaaagaaatgggactcagcagtccacattggtgcaatctctttttttctggtgatttcatagcccttgaagcattgacctcttcccctggttgagcatagcccaatccagagtcagtgactttcctgtcaagatcccttggcagctcctttggggttgctgccatcagtctggcttgccagccatgtatgatcaaagccttcccactagagaatcacatagccatctgctgcctctgtctgttttcttgaccaacagtcaaaacagagatgataagaaatgagataaattaccaaaattgtgaacaaaagagagattatcactagtgaccctttagaaattcaaaagcattataagtgaagactctgaaaaacctgaagtcaataagttagaccacttagataaaatggacagattcatacaaagatagaaattgccaaaactgactcaaaaataactagaaaacctgaaataaggaaaaacaaaaaataataatgtattgcttgctgttttatctggcctaaaaagcccatttgtcagccttcagtcctttggcctaagtttagctcaaataaggactgtatatgccaagctttaattctctatgtgaatgataaaaccccatcttcacaagaggagatgggttatgctgtttgttggattagtgaattaagccccgtgttcccccttaaagagaaataaaaagagcatagtaaagagccctcacccagtgaaaagccctgggatcccctaacacgcttgccctacaccctatacatctcacaaagtagaggacagggagatcagggggcaaaaggaaggtcggaggaaaaggatttgggaggtcatgaaggagctaaacccaatgctcccttaaatccttatccaaacttgaggaaagaattagaacaatgtaaggaaggacaaacctgataaaaacaagcaatggggaaaggattcccgatttaataaatggtgttgggaaaactggctagccatatgcagaaaactgaaactggaccccctccttacaccttatacaaaaatcaactcaagatggattaaagacttaaacataagacctaaaactgtaaaaaccctagaagaaaacctaggcaataccattcaggacataggcatgggcgaagacttcatgactaaaacacaaaaagcaatggcaacgaaagccagaattgactaatgggatctaattaaactcaagagcttctgcacagcaaaagaaactatcatcagagtgaacaggccacctatggaatgggagaaaatttttgcaatctgtccatctgacaaagggctaatatccagaatctacaaagaacttaatttacatgaaaaaaacaaacaactccatcaaaaagtgggcgacggatatgaaaagacacttctcaaaagaagacatttatgtagtcaacaaacatatgaaaaaaggcccatagtcacttatcattagagaaatgcaaatcaaaaccacaatgagataccatctcacaccaattagaatggcgatcattaaaaagtcaggaaacaacagatgctggagaggatgtggagaaataggaacgcttttacactgttggtcggagtgtaaattagttcaaccatcgtggaagataatgtggcaattcctcaaggatctagaaccagaaataccatttgacccagcaatcccacaatcccactactggatatatacccaaaggattataaacattttactataaagatacatacacacatatgtttattgcggcactgttcacaatagcaaagacttggaaccaatccaaatgcccatcaatgatagactgaataaagaaaatgtggcacatatacaccatggaatactatgcagccataaaaaggatgagttcatgtcctttgcagggacatggatgaagctggaaaccatcattctcaggaaaccatcagctacgtgttctctgggtctctcagagaaagacccacaagaacagaaaaccaaacactgcatgttctcactcaaatgggagttgaacaatgagaacacatggacacagggaggggaacatcacacactggggcctgtctgagggtagggggctaggggagggatagcattaggagaaatacctaatgtagatgatgagttgatgggtgcagcaaaccaccatggcacatgtatacctatgtaacaaacctgcatgttctgcacgtgtatcccagagtttaaagtataataatgataataataataaattggatttgtaagtgtgcctttaacaagtactgaggttaggaattttaaaaaggaaatgaggccactctcggaagatcccctcagtttagcagaacagctagatcaatttttagaaccaaatttttatacttgggctgagataattcaatcatgaatattctgtttactgggaaaaagacgggaataattagaagggcagccataatcatttgggagagacagcagcatcctcctgggtaaggagtcctgccagctaagcagaaattcccaaatgcagatcctggatgggataataatgaccccagggatcgggtccaaatgcaagaccatagggagctaataattagagggattatgcagtccactcataggacacaaaacgtccccaaagcattcaagatccaacaacaagaagaggagactccctctgcatttctgcagaggctcagggatcaagtgaaaaaatattcaggattaaatccagaggacccagtagggcaaggccttttaaaggttaattttgtaactaaaagctgatgtaatattactaagaaactgcaaaagattaacggatggaataaaaaaccaattaaggaaatactgagggaagctcagaaagtttgtgtgtgtgtgtgagagaaagagagagagagagagttaagctgctatacctgaaggaagagagagccagcggcacagctgtgtgtggcagctggcttctaaaagctgttgataaaggttactgctgagtcatttccgcagagctgcctgtttttgcagacagacaaggggagccagggcacagcacggctcggctcatgcccagagaaagaggaagaagctgagtgtgagacagaaaggaaatgggatggcagagagagaatagaagaggaaaattagcaagagagactaaaagagacagagatcaaagagaaacacagaaggtaaaactggggagacaaataatgtaaaaggaaaaaagagtacaagacaaagtgagagaatgctgagaggttggcagggctgggggaagtttctggggacttaagcaacaaggaggtgcaggggaagggtgcatgcagtgcgtggccactgaggaacgacaaaacccgggaactgggggatggatgcaagtgagaaagggatgtggaggagagtttaggatcaggctgcctgaggtgtaatgggttgcctacagcaaaaactagatggctgtttatcaggaggtggtcaaaaggattcaagttatggaagagtaaatgaataagataacattaaggttttgttgttgttttagtgagaggctggaaggccaccaggggcagttagctgtcagtaaggcagcagaagggctggggtcgctacataaggaaaatcagtactagggctgtaaactcaaatgactacagggccagcaaataataaaaaggagggctgcagggctgggtgggaactgtggcggctgctcagctcttcttacagtgctggcactgtgttttcagattgtctgctttgtcagaggacaaaattctgactttttatgtaaaatataattttaaaatgctgatattctgttcaaataacttaaaaacccaaaacaggcaaaagaggatgccagtttgcaatccctgaagtagagagagctcgtgctggggaaaagtctgccaaaatgctttaaggtggaatgtgtaaaagttctgtttcccagagtcgggctgggccaggggaggatccttgcagcccaggaggaggaaaagccactaagtcccctcccagggctggacaaactggagaccctttacagttgctgggtcaccagtgggggttgcttgaaacacaaacagtgcacctctaggcctgccacggagaggaacggtgcctttgaagcacaaaaaaaaaaaaaaaacaggaagggagggcggagccagaaatgccttttctaatgagagtacccatcagggaaggctccataggctggcagatcttcaaaccagcagctcttggcccaaagccaaacccagcagggcccggccaagggcactctgggatgccagctgatcagtcccttgcctccccaagacctcctggggtcaatgggccctcgggaggtgactaaactaacaccagccagtttcttatgaaaaggagaggagaataagaaggcgtcagagtataactgtttagatatcacagagtatcaaactaaagttagtaccaaaccttaaaggaactctactacataatgggatgaggttgtttatgaatgggtcatcctgagtaataaatggtaaaagacacaatggctgtgctgtcatgaacaaaaacaaacaatccttatgtgaaaaagttaaattactcaataactggtcagcccaaacctgtaaattttatgcttttaaccaaaccctaaagctcctagaagatcaagaagacactatatatactaattccaaatatgcctataaagtagtacacacctttgaaaaaatctggacagagcagggcctagaaaatagcagggcaaaataattggtacatggggaacaagttttagaaagcctcctgtttccagcagagacagccatagttcatgtaaatggccatcagaaaagaaacactatagaagctgtagggaacaggcttgtggataaggctgctaagcaagtctccctggaggaaaaatttaaactgtttagcccagatatccctaaggtgatattaaaaccccaattttcaaaagaggaggaaaagctaggcaagataggagccacttaaactaagaatggaaggtgagtgctccctgatgggagagaaataataaacaaacccataataaaaaatctaatgttggccgggtgcggtggctcatgcctgtaatcccagcactttgggaggcggaggcgggtagatcacaaggtcaggagatcaaaaccatcctggctaacacagtgaaaccctgtctctactaaaaatacaaaaaagtagccggggcgtggttgtgggtgcctgtagttccagctactcgggaggctgaggcaggagaatggcatgaacccaagaggtggagcttgcagtgagccgagatcgtgccactgcactccagcctgggtgacagagcgagattctgtctaaaaaaagaaaaaaaaaatctaatgtctatattgcataagggaagtcattggggtccccaggacatgtgtgatgaaatactaaagaattatgggtgtatagaaatgtatgccctggctaaacaagtgtgtgggaattgtgtgaactcccaggaaacaacttaaggttaaaagaacttgtaacacaaaccccaccccttgagttcacagttcaccacttccagcctggcaactcagtgctaattaagacttggaaagaagacaagctccacccaagctgggaaggtccttatcaagtgaggcagctgtacaaacagctgatcaggggtggacacattacactcgggtcaagaaactggttaaaaaaaaaaacggaaggtaaattggaagtgtatagatcacctaagaaaccctttaagctaattctaaggaaaacctaaaagtaagccataagcaggctccatcactgggggctgatatggttagaattaatcctaacacaaggggtgaaaggaaacctaagtattgtataagaaccacacgccacctaactgtaaaaatttaaagtgcaatcctatattaattactataaacaacccagctactctaaaccagaaatcttgaaggtataaattaaaaataaatatctcagaaaggaatcccgtgggacggttagcttttaggttagtcaccaactctaccccaagcccacccagaattactagaactcctggtcccattaacttcctttaacccaccaaacaataaacctaagagagtaaaaataattaaagtaactgacttaaggcagactttaaaaattaaaacaggatatagagacataaatgcctgtgttaaatgggtgaaattttcagcacaagccctcgataaaagtaactgttatgcatgtgctgctggtcaacctcaggcacaggtggttccatttccccttggaggggatactaatcccaaaggaatgtgttgcgtgttggctgtataccaagacaaggttgcatggggaaataagacttgtaaaagtctgtcattgctctttcccactttgcagagatcagatcctaaagcaatcccctcattctctatagggaatataaatcactcctgttgtcactctagacagaaggtgaggttcgataaacctgtgggaaaactcgcaacctgcacccacatcctaaatgtcactggtaacccagactgtggcaaccattcaactctccatataccccaggcaaatgtctggtggtatttcgggaaagggaacctccgtaacttgttaccgtccaattggaccgggacttgtgctttagtacaattggccattccgttcaccctgtcattccatgaaacagctaaaaatacacatggtcatagagatcagagtaatttagcaatttattttaacccatatataatgtgtgtgtgtatatatatatacacacacacacacacaaacatatacatatacatatatatacacacacatatatatatacacacacacacacacatatatatatatacacacacacatacacacaaggcttctggaacagtggatgaaagctttgtatatctatctatccatctatctatctatttatctatctaaactccataggagtacctagaggagtgcctaataaatttaaagcacgaaaccaaatacctgctagatttgagtcagcacttttctggtggtcaactattaacaagaatgtaaattagattaattacatgtcttataatcagcaaagattcatcaattacacgcaaaatgcccttaagggagtagccagacaactaaatgccactagctaaatggcttgggaaaacagaattacactggacataatattagcagagaaaggtgatatatgtgatatgctgggtggaaaatgtgacacttccattcacaacaatgctgccccaaatggaaccatcataaagggatggcagggactaacaactctagtcaacgagctggcagaaaacacaggagtaaatgacctttttactaactggttagaaggttggtttgaaaaatggaaaggaatggtaccttcaattcttacatctctcgtgattatggctggggtcttaacagccataggatgttgtatcataccttgtgtgaagggtttatttaacacaaaggttaattaaagcagctattagtaaacaaatgcccctaatgtcccaacagaatgacttactattattaaaagccaaactaaacttctcctcctataatgaagaaagtaaaaaacttccagaacagttaataaacaaagatatgtaagtgaaaataagaccaaaaagggtaaaaagaaaaagaggaggtaagtgtaaaaaataacttacatgtgaagaaggttcattttcataagtgccttagaatatgtttaagcaggccacatggaaacaaagagataaagaagcaaaatatactaagccacaatcccctccttcctgctttccctttgacccagtgtccaggagcctactggtcagggccccctcaatgacccccctccccacctcaccaaagaatttagtttgggctagcttgccatcacctaagtgcagtcactaaggccgtaagtcaaatgctcagagtcttgagacagttgccatgtattatgggtggctgcaacaaaatgcagcaaaaaatgcagcaaaaagaccctaaagaacatacctgaagtcttaatacaactaccaataggtgatgcccaggaagactataaccccgtagtactcagctaatgaggaattggggaagggacttgcacactagggaagaaatagtttgttgaaactgtcccaggtgtacctgcactccagacacctgatcttgcaagactgtcattaaaagtctctctttcgctgttctctgggtctctgagtctattctttgggtttgaatgggtgagtttctttctcacagggatgtagatggcaacgtggctctcattcccctcccaaataccccaactttcatcgcctgttccagaagccttgtcacctacaagcctatctgcacagaaggtatgaggggaccctacagcccagacagggaccctcccatctctagcaactgtccccttttctcacctggaccctctgcacctgatgttgtcttcttcttgcatcaaaggacacagagaataataatactactaataatactaatgatgatgaaagcagcaacagcagcaacatatggaatggctggtcatcaactctgaagcaccagggccatccctgaaaaaaagggcctattacacactgggcacccacagccacagccgttcctgctgcccccaccctggcctgatcctccttatgttggaaccctcaagggtggtcccaggttcactagaggacacagggtgagtgctgtgattcctgctgtatcccatggagcagatgaccctctgctcctctccttggggaatcctgcaggccacctctgtgtggtaggtcccatcccattggacagaacaccccaagactgctgggcatcctggctcaaagacgccccatcctgtcaccaggtcagagagatattctggagatacaagccagagcccagcatatcagggtgatgttgccctccagggcctcactgcaggccacactcatggtggaggagtgggggactggagaagaaagggcagagacaatgaggcacatggccaaaccctgctcccctctaatggagatgcagggaatagggctggtccgctccactgctccgactctggcagaagtcctcacggaccccagaccttctgcaagtctgtcctcaccctggggaccaattcctcaaggctggcagaaggatgggcctcgagactgtgtctttatgctctgggatccctgcattgatgctgaggaggggaatgtcagggctgggctcctggtacatggggccagagggaactcttagggatgggcaggctgggaagcagatggggcagccttggccctgggggcttcctctcctgcctgacacccacccaggttcaggcttctgtcagagggcccactgcttccccagattgtgacactggacccttcaatccctgacccactgtctttttccagtggctctaacaggagagaaaaatcaggatataacacaccaacagaaaacacatgcatccatagcacaaggagggtttccctggacagagttgggggtcggggtgactctagtggaataggggagaggaaagcccctacccaggcccagtacctgctctcctgacacccacacaggattccagatactgctgtagtttctgcctgcagtctacccatatagggtgagagtgtgtctcggccggcatagcatcttccttctagaaatttgtgatgttcatagcaaaggtctgagttctggaggactgggatactgtccattcctgagtctccaggttgagagagaggaagagctacccataagagtaggaaagcctagagcccctggtgctgctggcttcctgatctcacaacccctaatctcctggagggaatgcaaggctacccccacccagcagttccaagtgaggaactcagaccagaggagacccctccctggccctcctccatgcctttctgtgtgggctgagtgccaggttacctccccaccgagctctgctgacccctattcctcacccctgcccccagccagatccagtggggacagacaggtccctgctctctgcccccagctctcctggaaaaggtctcccatcactcttgcctgctgccacctctcacctcccttctgtcccttgatatatgccagggcccttctgaggtcctgcccattctctgtcaagtcctcagtctctgtgtcccaggtctcagctcccagaactgcttctgcccactgtccccgggacccagccctgcctttctgcctgttgaagagcaggaagggctgaccatccagatgtccctcagcaagaaaccctgactgcacagatccatcccgggacagcaccgtgaggttgtaatgaagactgtggggccctggggaacaagaaaccacggatgaaacttcttcctggaagtaacttcacattgatgtttaacacacaggtctgctgtctcaacctttctgaggaggcaggaaatgtacatatgcaaagggacaagaatgaggatttcagatacaaggaaaactgggagggcaggaggatggaggagcagactgaggaacagaagaagggggaatggagatggcaaacatgtaggccagctgccaaggcagggtggctacaggccacctaagggtatagggaggaggccaaggagagaggctgccctgcagtggtgagggaggagcacgaaggcagtggtggaaggaaggtcttgccagaggggagggtggaaatgggaagggacccaggctcagagggacccatgaccagcatggctgtgctacacaggtgagggtgagatggagtcgcgggccgctgcctttgaggaaggctcatcatgtacaagatgggagtaagggaggatcagtgcatcttttccagaaacagtgccaggaaaacgacattcacatgcaaaaagaaatgaagttggactcctgacttacaccacatatacaagttaactctaaataaatcaaagacctacactcaggaactaaaactgaaaaattcttagaatgaaacattgggaataatcttcatgacataggttttgacaacacttttatggatataacaccaaagcacagacaacaaagaaaaaattgataagttggacccatcaaaataaaaaaaattgagcattaaaaaacacaatctgcagagtgaaaaagcaaccattagaatggaagaaaatatttgcaaatcatttatctaataaaagattaatatccagaatacataaagaattcctgtaacacaaacataagactcaaaaaaactatgtaggcaaagaatttgaatagccaattctccgaagaagacatacaaatggccaatagacacatgaaaagatgctcaacatctgtagttattagggaaatgcaaatcaaaactgcaatgggctactacttcacaccaattaggatggctataatcaaatacacacacacacacacacgcacacacagagagagagagagagagagagagagaaagcaagtttggcaaagaggtagagaaactggaacatttgtgtagtacattgggaaagacaaagtggggcacctgctatggaaatcagtgtgttgcttcctccaaaaactaaaaaattaattactatgtaatccagaaattctacatctgggtatttacccaaaagaaatgaaagcaggaacattaaaaagatatttgaacactcatgttcatagcagcataattcccaataaccaaattcatagagacagaaagtagaaccagtggttccaggggccagggggaaggaggaatggggagctactgtttagtaggcacagagtttcaggatgcacaaaaatgtgaatgtacttaatgccactgaactgtacacttttaaatggtgaaaatagtgaactttatatgtatattttacaacaattaaacaacaaaaaagaaattgtcaccgcgtaccaaacaataatatagaattagaaagaggctggggtcctggtcagagagaaaaaaaccaaggcctgaggaagggccttcagagaggagtggtgctgaaggcggagcagtcacactccaaaagagggctcaggttagaaaaccctcacaggaggaaggtggtgctgggagaaggcccagaggaggggatgaccacagcccactatgtggtaagtgaagattttggatatgaagtctaggaactgacagcccaccggggtcaaggaaccgaaagaggatgagggtcaaggagccgttggactagagcctgttttgggtctgggtgggggtgaggagatgggcagggcaaggactaaagggtggcatgagaaggaagtgggggtgaccctgggagaacttggggtaaagtgagaacaggaagggaggggttgtctgggggagggtggggtttggggaaggtgagaacttgctgagggccgaaggcagctggtcaagaggtgggaacagcataaggtcccaaggcagagaggggcagagggaccagggagggatggtccagcacctgagggtttcagggtggggtcctcaagagggtgaggctgaggatgaaggagtggggaacgggtcacctgaggcagggcccagagcaggcatctgcactggaggggagggggcatctgcgctgccctgcgccctgcctaaggcccaactttcattagcaccagggctccccttaagtggcctggaggggagtgggatggagggaagactcccccgacaaaaggcagcaccagaaagttagggtcagggacagctgggaatggagaggcataggggcagcactgggtgaaggctgcttgtaggaaaggcccataagggaggcaggagggacgggagcaggggatgagggcagaggacaccctacaaatggatcagagaactgcagatagaaaggggtagcagggagcagggagggcaacaggacccagggggccatgagaaaggaagctgaggaagtaggagggaacttggtgtccttagatcattggagtccacagtagctgggagggttgacagagaggaaagaaccctgggaacgggaggcgaagggataatgagctggggatgggagcagtcgcaggaagaatcctctgcctggagccggcaggctccaacccctcagcttgagagtcaggagccccatagtccccacagcaataggaagcaccagctcctggtcccgaaaaaaggagggccccaactccagggactgcggcccgccctggagctgagaacacgcggactccagggagaggacagggcttcagggacccgagagccgctctgagcaccgggggatgtgactgcctcagcggcagagctggaagggccctcgaatgccattcacaggaacagcccaggaacccagggacttcagaagggctggtttgtccgaaaagtgagaggaggcggaggagaggtgaggagagcaagtgcaagaagagaccagaaagtgcagggggtgggggtgatgcgcgatcccgaggaggactgaaaagagactgaaaagcagggctgaggagtggcggcaaccggcagcgtccagctcccgcacctcgctgcacatcgcacctgagccccgccgcgaccgcatcgcgctcgctgcgacccattcagaccccccagaaacgccaagccgctcccgctctagccgagggctagaacaatcctgccacctcagcctcctgagtagttgggactacaagcgagtgccaccacgtccagctgtcatttaccatctggtaccaacccccattagacaatgaaccatccatgatcacgaactgtgtcccttccatcttcgtcagctttaggagcattttttttcccaatggaactccacctatgattactaaccattccccaggacccctagcctacacttttctgtagatgaaaatgtcatacaccacagagttttaacaattacttagttttcccatccacattcactgattatttatttcgagcattatcatttattgagcacagcagggactggggtcttgtccccaccttagagggattatttacactgctaaaggtcacaagggtagtgaggggcagagagggagatggacccagctctcctgacgctggtcccaagctcttccctccacagtgtctaccctctctcgaggactttttctccctgcggcagttccagcaaaggatctcattcagctcacccccaagaagacttttaatacttcaatgacgatgatactaataataatatgcaaagtttgttccaacgcatttagaggtgatcgcgacaagacatgaagccaatccctccctttctggggcaggggaggcagtgatgatcttggactttggatgagtcgctccccagggtctaggcctggctgcccctccccaaccaaatctcccaggtcttttctgtccaaagccctccccctctaccctacctccagctccttctgctctgagccatcaactacgttttctccctcagcactcgccttagattcctggacttaccagcacaaaggtgattttctcctcgcagactgtaggcgccactgctgggtccggaaaagaaagagaaaaggcccagcgtggtcgcgtgtgtaactcaggacgcggctgcgctgggcgcccgagcgcgttctcaggactgcggcccggagttcactgcgaggactgggatcacccatcaccccgccctggtctacggaaaatgacaagtgtttactgatatagaaacggaataacggcgctgtgggctggggagggccgagctgccttcagggttctggtctccagctgcgcggcactcacacctgccgctgtgaaaatgcagacccacggggcaggaattccgagtcccggctggagcgcgatctggaatctgactcgcttgaaacagcaccgcggtggattcggagccgggtgagcagggaactgcgcctcagcccctcccacgggccgcccactgattccaggatccgaaaacgcttccagctgctccgtcaccccaggaaggcagcgccggcctctgggcggttctggtggaaacgggctccgccgcccgcaggaaaactcacaactaagggaccaggaaaaagcctctcagggtcgcgcgccttcagtgaggatcctaatttacaccccgagtgtggccccgtcaaagactagagcgaaggtcactgaaatgacacaagatcagcgaggcccagggcgctgccgctcacagaatgcggagacacggctgcctcgcgtcccttccctgacctgccccaggcggacgcggtgacgtgtgtttgcctcgaggctggaatacatggggatcaaatgcagagaatggagaaaggagggaaggatggggggacatttcgaggaaaggaagggagagggagaaaaggggagagaaaaggtgaaggtgagaataatatctgaaagatgtagttttattatttctaattttatttttgccctttatctagttttgttatttatgaacatttttaccaaagcttttttttctctgtgtgtgaatctgtaaatatacggcttattattcttatttcagagcctgcgaggtcaagctgcagagaacatgagcttctacctccagatgtgccagggtgcatctcgtgggtgcaagaacaagggttttgttttgttttacaaaatcaaagtacaaatctcaaatagaataatatttttaaaccattattgggacatactttgcacacaatcagtgtatctatttgaaatgcacagctcattgagttgtactgcttggctgttttacacacccacatatccactaccacaatgaagataaagaaataacatttccatagtcccctaaagaatagccacgcgataaaattccacgcagtccttaaaaagaggaggataaatttgtaagtattgttatgagaagatctgtgcccagcctacttttatccatttttaaaaggacgaggatatatggaattataataccagtaataccacttacataatatatattttaagtaggggaaaacatggaggattattccccaaaattttgacagggaccccagggactgggataacgttgtgactttcaccttctctgaaatgttggaattttatattacagaataaacttggattttggccaggcgcggtggctcaggcctgtaatcccagctctggaagctgaaggatagcttgagcccaggagttcgaggctgcagtgagctatgatctcaccactacactccagcctgggtgacagcaagagatcttgtctcagaaataaataaataaaatttaaaaataaaaataataaacttggatttgtgtggtggttaagaaaaaatatttgtttgaaaatattataaagataagccacacacccaaatagttacaggattttaaaaaccaaagtgttaattaaaacccaactccagaaactctcttttaagggggcttcatattttcatgtcattaaatctttctcaaagtatctttgatagagccgtttttagtgcagtagagagatgtgtaacaattttacaaaaggggcgggctgtaataaaaagggaaaggcaaaatccagtgtggacacactgtcccatttattttcaaagcacgtttgaaaactgcgctgctatagcgtctttgggttgagacaaagtcgaggaaaatcttgttcctggagtactgatttcctttttcccagggccaaagtctaaaactcagaagcaagtctaaaaactcaggctgactttcagatctgaagaaatctcaagaatatttgtgtggaagaacattccatgctaatgggtaggaagaatcaatatcgtgaaaatggccatactgcccaagctaatttatagattcaatgccatccccatcaagctaccaatgactttcttcacagaattggaaaaaactactttaaagttcatatggaaccaaaaaagagcctgcatcaccaagtcaatcctaagccaaaagaacaaagctggaggcatcacgttacctgacttcaaactatactacaaggctacaataaccaaaagagcatggtactggtaccaaaacagagatatagatcagtggaacagaacagagccctcagaaataacaccacatatctacaactatctgatctttgacaaacctgagaaaaacaagcaatggggaaaggattccctatttaataaatggtgctgggaaaactggctatccctatgtagaaagctgaaactggatcccttccttacatgttatacaaaaattaattcaagatggattaaagacttaaacgtcagacctaaaaccataaaaaccctagaagaaaacctaggcattaccattcaggacataggcatgggcaaggacttcatgtctaaaacaccaaaagcaatggcaacaaaagccaaaattgacaaatgggatctaattaaactaaagagcttctgcacagcaaaagaaactaccatcagggtgaacaggcaacctacaacatgggagaaaatttttgcaatctactcatctgacaaagggctaatatccagaatctacaatgaactccaacaaatgtacaagaaaaaaacaaacaaccccatcaaaaagtgggcaaaggatatgaacagacgcttctcaaaagaagacatttatgcagccaaaagacacatgaaaaaatgctcatcatcactggccatcagagaaatgcaaatcaaaaccacaatgagataccatctcacaccagttagaatggcaatcattaaaaagtcaggaaacaacaggtgctggagaggatgtggagaaataggaacacttttacactgttggtgggactgtaaactagctcaacccttgtggaagtcaatgtggtgattcctcagggatctaggactagaaataccatttgacccagccatcccattactgggtatatacccaaaggactataaatcatgctgctataaagacacatgcacacgtatgtttattgcggcactattcacaatagcaaagacttgaaaccaacccaaatgtccaacaatgatagactggattaagaaaatgtggcacatatacaccatggaatactatgcagccataaaaaatgatgagttcacgtcctttgtaggaacatggatgaaattggaaatcatcattctcagtaaactatcgcaaggacaaaaaaccaaacaccacatgttctcactcatagatgggaactgaacaatgagaacacatggacacaggaaggggaacatcacactctggggcctgttgtggggtggggggagaggggagggatagcattaggagatatacctaatgctagatgacgagttaatggatgcagcacaccatcatggcacctgtatacatatgtaactaacctgcacattgtgcacatgtaccctaaaacttaaagtataataataataataataataataataataataataataataataaagaccaaaaaaaaaaaagaatgtttgtgcggacagctacgctctaagaatccagctctcttgggctccaagctcaagctctctggggcttcacccagtgacaatggccggaaggacaggacacagtgaaatggcaccagtgagtcagaggccaaaggaggatttctggccccagcgcgcaggatgtgctttgttatagtggggttgggatagcggagcggaggcaaggacactctgggaataaatggcgagaaaaagtgcgctagggaggatccaaagccttcagacttcttcctttccttcctgttgggtgggaggggaccaacatggtccctggtggggaggtccgtgggatgcagagaatggggtcgctgcaaaggggcgttgcgcgccccacgcaaggcttctggcactcttctcctagctactactgatgagttcaaactagcaggagactaagacgtgtcctttgcaatgtagactccatatcttgcacttcggctggtttactaaatccatcttaataaaacacaaaaacaaagaaccaaattctgcgtgtgatatttctgacctctagaaggtcctccctctccccattcctcgtgggctcccttcttgccccgccccctccgctttgtctccacttctccatccctgtccatctctggaccccgctcctgagtatctccccccttcttcagaggacttcccctcatggagtacagactcctccacctccaggaaaaagagacaaagtccactgagaaggaactgagagactcctgttactccacccctgaagtcagcctgtcccacaacgctcactcaggctgcatgtgtgtgtgtgtgtgcctgtgtgtgtgtgcccgtgtgtgtgaatctgtgtgtgagagtgtgtctaaatatgtgtgtgaatgtgtgtgcgactgtgtgtgcctgtgtgtatcagttagcgtgtgtatctgtatatgagagagagtgtgtgtgtatgtgtgtgtgtgtgtgcgtgaatgagagtcaaagtgctaaacctggcatccaggaaacctccccaccttggcactgcacgcaggagtcagtgttatgtgcacctgtgcttttatttcaggagctgagacaattgtattaatcagatgtgcagagagccaagggccccacgctggaaagcatcagagaggagggtgagattggaggagcccctgactccaagtctcttgatcactcttacacagggatcttgaaaaaaaagtgcaggacactccgttctctcctgggagtgacagggaagccagagccactgtgcgtgtcaaattccatcaaagaaaaaccattatagcaaaacttccatgtcacagttttaagcctgcacaatgactcaaatagaaccaataccaaaaaaacaaattcctagctcaggtgaggtcagtgaagttggctgtcaggtgtaaaggaaactgcaggtataaagaaggacacctgtagatagggctgcagcccagtcgcccctgcatcttagggcgcctggaaaggactgtctccattcaatagtgcagggtgaggacattttgggggagaaatatagactgtccttagacccctggggtttgtacatttactttctgactttttagctgttgacttcatttttgaacaaattacagttacataaatttgctttgactttaagtgtaaaacaggaaaatattcctgaaacaggaaacaagggccaagtgacctgcactgtcacccccctctgtggctccctgatgcaacacaattgtgagccaacaaatctatggctagggaaacagtcaactccatttctgcaaatgtttcagatgttccttcttgctgagtaatgttctagttttaccccagccttaatattttaagtctatattttcccagctgttttttttgttgttgttgttgtttttgagaaggagtctcattctgtcacccaggctggagtgcagtggcacgatctcggctcactgcaacctccgcctctcaggttcaagcgattctcctgcctcagcctccccagtagctgggattacaggggcccgccaccacgcttggctaatttctgtatttttagtagagatggggtttcaccgtgttggccaggatggtctcaatctcctgacctcgtgatctgcccgcctcggcctcccaaagtgctgggattacaggcatgagccactgcgccaggccttgttggtttttaaataatgcatgtatatttattatttggtttgttgtagtaagccatctggaatcaactgtggaaataaatgaatggttctctattaaataactgctgagaccatctgaaaaatgtattaaccccaaaaccaatcacttcacactcgtctactgcctcctccccagagccattctctctaggatagtaaatccgacgggccttccagctgggctgcctgctgcatctcatgcagctgtccatcacccacacaacaggcagagtgaagctttcgaatgggaattagagcccatcctcaccaccacatcccagagacactccagcctcttcccttcctctctccatttcctattagcccctcaacacggggcccctctggccattctggcctcatctcaccactctcagcccagatcactcatctgcactcgcaccagtctcttgtcactgctcaatcctgtctctgccaccggcccctgctggtactcccacatgcacttgctccctagggatccacatggctcactcctcatgccattcagttctctgctcaaatgtcccttagtcaagttctcaggaacctcttatccaacaaaatatatctcctgccatcctcaccaccaccaatcttctaacccgagtatattttctccataacaattatcactgatattagaataaatttgaaagttgttgtctgtaccactaaaacatattatttgaggccaggaccttgtccagccaccacttgtatccctagcatctagaacataccagtacagaggaggggcttaacaaataagaggtgaatgatgggtgaatataattggtatgctgcttttgataagcaattttataacatgtgtgtccgaggcgggtggatcacctgaggtcaggagttcgagaccagcctgaccaacatggtaaaaccccgtcttttctaaaaataaaaaaattagccaggtgtggtggtgcacgccagtaatcctagctactcgggaggctgagacacaagaatgacttgaccctgggaggtggaggttgcagtgaaccgagattgtgccactgcactccagcctcagtgacagagtgagactccatctcaaaaacaaagcaaaaaaagttcatgcagtttgaccaaataatttatatttgagaaatctataattctacaatgaaatgcaaaatatagaagaatctttaggtataaggatattaatcagatattatttacaataaggaagaagaacttgtaaaagaagagtagctgggtcattttttggaaatagtatacagccaggaaaagtactgtttaagaagagtttatgataacatataaagttgcttattgataataataaaatttgaaaagcaagattcaaaataactcatacagtgtgactgcactaagtcatcctgcacagacaccacatgcacagaaaccaggggtggaaactcagggggcagctgcaaagcacagctccagggccccttttcactgacgtctctgaggctctgccaggcagaggttcatccggatcctcccagtggggacacaggtgttttccatctttctgcttcactacattttttatattttctgtaattgagcagattctactttctaaaagggtaaaatgctgattatgaagttttacaacatttgaaatacaattttaatgaaaaagtccaaatgtcctgtcccaactcaggtcactttctctttttttagagatagggacttgctctctcacccaggttgtagtgcagtgagttgatcatagttcactgccgccttgagctcctgggttcaagtgatcctgctgcctcagtctccagagtagccaagactacaggaaagccccaaaatgaccatctaattaaaaaaaaaaaattgaacagaatacatctcactgcttcccaggctggtcttgaactcctgggctcaagtgatcctcctgccttagcctccccagtgttctaggataacatgggtgagccactgtgctcagtcctaacttagcttgaagcaaagtctcctctccatgtcatagggcaaaaactccagctgatggagccttcagaaagaagaaataaactcttcctccacaatgcctcatccatccctgggttataggcgtcggctgaatgataaagtcaacactgagaatatgatcattttagattactgattgtcatttaattttaattccaccacacctgagagagtgggatggattctttcttttattatgatttgagcatctgagtcccttccatcctgaacatctgacatgggtgcttcaaaaatgtaggtcttgagacttaaagggcacttggtctcctgagcaggccccctgcatgcgccacacccactaaggctccataacagtgggaagagcagccacagtcagagcccaggtgggttcacactgagggaccatccacatccagggtacgctgaggaggggctgaggtgagaatccagcccctgcctaggctctgggtgagaggtgggcaggacagtcagctactgagtattactggagctattgccttttttctcctgaagaccccacccctgcacacaccaaaactttacattctttgtggagcaattttctttttagaaatgtaaacaccccctaatcttaaagccacccaatatcactcatagtgacaccgcagtaggataagctcttaactcccaccaaattagcctcagagttgtagtttttgtttgttagacatggggtcttactctgtcatccaggctagaatgcagtggcatgatcacggcttactgcagcctcgaactcctcggccccagagatcctcccacctcagactcctgaatagctgtcactagaggtgaacgccacaagccccagctaatgttttgtgttttttgtagagatggggttgtgccatgttgcccaggctggtctctaaggcctgggctcaagtgatctgctgccccggcctcccaaagtgctaggattagcatgaagccccacaccaggcctgcagctgagtatttggagctaaggcaggaagttgctgtggagtttgtacccagctaatttgaaaggtggtcctgaaaggtaaagtgcgattaggtggaccttggtggggaagcatagatgtttctggtgagaagagaacaagatagatgggaagcttctaaaagtgaacatcagtgggccctgtgctcacacagcactgggatttggaagaccttttcccacccacttttggcttgtgagcttttattccaccttcttgtctcctaggtcattgcaggaaatcccttcatttggtaaacatttatcaaacacctaccatgtgctaggcattgtgttaaaggagctggggctgaggtaagaggaaccaaaccccccttgccttcaaggttaagccgtcttgctcaggcagagatcagtaaggaaactctttatttatttatttatttattcatttatttttttagacagagtctcactctgttgccagtaaggaaattcttacacaaatggttggcagaatatgcaacttgctttgcggatgcacatgtagaccatctgctctgaccaaggagtcacagaagcttcataagacacaacatttgagctgcgttttgaggtataaataggagtctgacaggcatccaggacaggagagcattgctcagaacccaggacatgaatttttctctcctaggccaggccaggactcagactaagctgactgaggagccaggtgcttcctggcaaggaagtgtgtcccatatatgactatccagaagtcacagctgctcaatattgagtcttgagacagagagagagaggcctgatttgaaatgcagaattctgctgggggcccgttaaaatgcagtttctgattcagtaggtctgaggcagggcctgaaaattgcatttctaacaagtcctcaggtgatgccaatgctacttgtcccaggaacacactttgagaatcaccaccctaaggcaatccatattgatttctaatatcagaagagggctgacaggcaaaggtataggataaactagaccatgcatgggccatcttggagagcaccccacccaagtctgcagcatttgatttccttgggatcccgggaatggcagacacccaggaaggaatcaaatgtggggttacagggcaatccagaggctgagcttcacacagcatctggggttcccactacttcacaagtggcccccacacccccaatccttcccaccccttatgaaactgacctacgagtcttgctctgctgtcctgggctgtttgggcctgggatgtgagctctgactataccttctgatccaaatacagggtgacctcatatgacacatacttagaatgggctcataatgagaaccttccaaattcagcaaatggattcaatcgtgtgttttccaggagaattaccaagtgttctcttttctaaatatcacatacttgagctcacatggacagtagaggaagttctgagcctgctgaagccacaattggtacattggaccccgtagaattccttgtagattgggcttcaccatttacatcaggatttggtcaaaatttccttcaccaaaccggttgcatttgtgaagtaaccatgctctcattttgacttttaatgaatgaaagacagacacacacataaagaaagatagtgcaatgaaaaagaaaacaacatactgaattaaagtgacaggaaacatccttgtttgagaagtgatataatttttagacagtttttttttttaattaaggaaggtaagagaattaattctgttaggctctttttttaagttttttattttgaaggatttgattttgtttgttttgtctgccttggaattatcttttattttatgttttgacttggctcaaaactcaaaaagttaaaagtctctctcttatgctaccccatcttgacaggcagctatttatatcagtttcttgcttattctttcaaaggcattttatgcatatgcaagtcaatctaaatgtatatgtatataatctttctcccatttcacacaaattttagcaaactacatatgctttcctgcaccttgccttttcccttcacattgtatcacaaagaccatcacatgaagaaataccaagagcttagctacatctttgtttgaaattttcatgatacaccattgtatatatatgcaatatttaaaaaaaaaatagagattgcttcttttgagtgcggtgctttttaatcagccccctcttgataggcatttggattatttctttcagagaacaattttgcatcatgtaacatcatatggaaaagctgtagtgaccccactcctatatgcatattctagggaaactcacatatctctgagagcaggaggcaatgtcccaggatgttcattgcagtgaggtctacaatagagaaaatctaaaggtcaatgaagagggaaagagaagaattgtagtatattcctcccatggaatactatccaccaatgaaagcaaatgaactatttgtatgaacatagattcatgtcatagaacatgttaactgaaaaagcaagcaaatgaatgataaaattagccagaaacaatttataagaagtctaaaagcaaagccaggcaaggtggtgtacacttgtaatcctagcactttgggaggtcatggtgggtggatcgcttgagttcaggagttcaagaccagcctgggaaacatggcaaaaaccctctctccaagaaatacaaaaattagcccggcatggtggagcatagctatacccccagctacttgggtggctgaggtaggtgtatcgcttgagcctgggaggttgaggtacagtgagctgtgtttgtgccactgcactcaagcctgggtgacagagtgaggagacctgttctaaaaaaacaagtctaaaagacttcaaacaaagagatttcctaaaacttagtaaaaatataaaggcatacactaaattcaagtcacacatcctcttgcaattcttgatttgctcagtacagtactgactgaaacatgtgcatatcagagctgtgaaaaatcaaggctatctacatatatttctattatttttctatgtatactacatatagccaataatattaaaatgtcgccaattgacaaacctgggtggtgccttcacaaagattttttataattttctattctttcttccagctggaactactttgaattaatgtttgtgaagtgaatccacaggaactgagcaaaataagaaaagagttattgagtgtgaggaaagctgcacagaggtacagacagatggagagatgacaatactgagcatgtcagtgaccttcacagtaacagacttcctggaggagtgtgagcttgagccagaatgaagaggataaaatataaaagagggatgaaggagtggggactttagggggcaaatatgggattgagtaggccagactgggaagcgtggatggattctaaacattccactttaggtctagcacttagagaaagagaaatcatgtttatttagctccttccacaatctttagagaaatcttctgaaacattacaaaaaagacacatgaatggccaatagtcatcagggaaaaatgcaaagtaaaaccacagcgagaaaccactaagcacttattagaatggctgaaatttaagtgattaataaatataaatgttgtcaaggatgtgaaacagtctcatccactgcctataagaatataaaacagccactctgaaaatcacttttatatcatctaataaagttaaacaagctagtactctatggctagcatttccactcctaggtatttactcaagtgaaataaagattatgtccaagaatccctgtacaataatgtccatagttcatttgtaacaataaaaaaccgtgaatacccccaaaatgtacaaaaaaattgtgactcagtgatacaatgcaatactaccagcattaaaaatgaatgaattactgatacatgcaacaagctgggcagaccacatagatattacaccaagtgcaaaaagctaggcacaagggaggccatatgggatgaatggatacgtatgaagttttgaaacaggaagagctactctatcatgatagtcatcagatcaatggctgctggggaaagggggctaatttgaaggcagaaaaatagagaacttcgtgtatcttcatagtggcatgggtgctatggctgtatttgtcaaaattcattgatgaatttgatacagatctgatcatttcagtatatgtaaattttacaagtttaaaatgcttacaataaaaatttaaacgttagtaataaaaaatagtaattgaaaatattagcaacaaaatccaacaacagatcaaaacaatacaccataatcacgtgagttttatacccaggatgcaaggattgtttgacatatgtgaatcaaaatatgtcatataccgcatcaacagaatgaaggacataaaccatattatcatctcaatagatgcagaaaaagcatttggtgaaactaaacattgcttcttaatgagaactctcaaaggagttcctctgacaaaggaaccaagaatatacactggggaaagaacagtctcttaaataaatggtgctgggaaaatgctaccagatgcagaagaatgtaactagacccctgtctctcaccatatacaaaaaatcaactcaaaagggattgtagacttaaacgtaagacccaatactgtaaaactactagaagaaaacttatgggaaacattagtctaggcaaagattttatggctaagacctctaaagcacaggcaaaaaaagtaaaaatagacaaatgagactatattaagctaaaaagcttctgcacagcaaaggaaacatccaacagaatgaagcaataacctgttgaatcgtgaaaatatttactaagtattcaaccaaccagtatattcatccaattagtatattctagactaatatctagaatatacaaggaactcaaaaacttggcagtaaaaaatacaaataatccaattaaaaagtggacaaaggatctgaatagacattccccaagaggaggcatacaagtggccagcaggtgtgtgaaaaacacccaacatcactaaataccaggaaaatgaaaatcaaactacaatgagatatatcttaccctaaccctagttaagatggctattattaaaaaataaaaaataatagatgttggtgagcatgtggagaaaggggaatgttatacactgttggtggtcatgtaaattagtgcagccattatgggaaacagtagagtgatctctcaaaaaaactgaaactattaatagaactactatctgatgcaacaattctacttctgagtatttatccaaaggaaatgaagtcaatatatcaaaagagtacctgcacacccatgtttattgaagcactattcacaatagcaaagatgtgaaatcaatggtgaatttatcaatgggtgaatgaataaagtaactgtagtatatacacaatggaatgcaattcagccataaaaaaagagtgaaatcctgtcagttgcagcaacatggatggaaccagaggtcatgttaggtgaaatgagccaggcaaggaaacacaaatatcacatgttgtcactcacatgtgtgagctaaagacgttaatctcatggaggttgagagtagaatgaaaattaccagaggttgggaagaatgtaggggtgggaagatgtagagaggtagattaatgggtacaaatgtacagttatataaaaaaaaaagttctaatgttctatagcacagcaggccaactaaagctaacaattatgtatatttaaaacagctagaagagtggattttaaatgttcccaacacaaggaaatgatacatgcttgaggtgatggattccctaaacaccctgacttgattattccacattctgtgtatgtatcaaatgatcacatgtgccccataaacatataaaatgttatgtattacctttaaaaaatatttttaaaataaactcaacacaatatgggacattttaaaaagtacaaaaatatgaccatgataaaaattggcaaatatttcctttttattaagatccactttgtaagttcaagcagaatgaagcccatacagcatcagaagaagtggctctcctgagagaatcttctccccagttagaaaggcagaaacagaattcctggagaaagtaagactctggagaactgcatagcacctcttcttggggtctggggttacccagatgtagggagggttcaccttctgggaaaaactaaacgttggttcttgttcttttttgttcttattgcaagaccaaaaattgagaaaaccaagagaaagcaccaagccaaagggatatactctcttttattttttagaatatccactaccaaggatgatccacgctgttatgagacgaattgtgtccctccccaaccgaaattcatatgttggagtcctatgttgagaagacagaagtggccatctacaagccaaggagagaggcctcaggaaaaagcaaccctgcagcaccttgacctgcacctgtagcctccagaactgtgagacaatacatatttattattttactcacccagcatgtggtactttgttatggtagccctagcaaattaaaacagaaatattaccttttctactctgtcctatgtatgaacatgagactttttaagaatatgaattacctgggattccaaaacatagagtgagtcaatggaaaatagatgatacagggtcatttccaagcctttgtgggtctcctggccaccacacaaacatggatgtgttcccatttcttttcagtttcacacagtgcaaaagttgtggacatagaatcacaaactgtgtttaatttatttgagacattgagtgagctagttttgccctaattttatagaaagatgatgaacaatcataattactaaaccaaagaggctttttggcaggggatggcaggtactatgttttctcctccttttaaagtgcattttcctaaagagtcttgtctaggagtaaatgtcatcactttgcttttttcctccgcattgatcacttggtcctccctgcatttcagtaaggttgctagaatggaggcatttgtccatgattcacagatgaatcagaggccctatgagtagagagcttctcctgaagtcacacagctcgtgagtggtggagcaatgacaggcacatgactctccaggtccctagtccagttttctgggtgccatgagaattacagcctttggttccttttacatgtagttcatttctgaacctgagaaggagaatgcacctcaggtgactaacagtttttgctcttctgtacttgtctgagaatgaccccaaaagatttttaaaggccaattctttggctaccaaccctattttgcccaggcatggacatggagcaggtgaacactgcctttacctgtgacatgcctgaagattctgagacctacgtgaatcaggtaagctccatacacagagggacacccactctcccacccacttattttctgtatcttttcacacttcacttcttcattcctccctctggctgtcttccctctttggggtcttctagtcctaacctctgtctccttccaggtgactagagcaggctggtttggaacagggcttgtgtcggatgagaattgtgccaggatcctcagtgatgggcagcatcactttaagttcagtgttaggagctacctgctgagacagacgtctcctccacagtgagtgctgatttcatgaaacccttagttcctccctattccttactgtgtcttcaatcccatcatgtaggtcatgggcacttaacgcataatgaacaattgactgcttcatgccccctggccgttgatgctgtgttgggacgttttgctgccctctatgtggggtctgtgccttttctcatattacatctcttccaccacacccaagtccatcctctgaacccaggcagtacaccagcatctgcatgtgtgctgtgtgttcctgccttgctttgtcctttcatgccttattctcactgtgccatgtctccttctcagttgaacagatgcagtaggagactcgctcattctggaatgtgaccatctgcccttcaggagaggacagcagggtgtgggtgaaggagaccctgctgcccccacacctgacagcctccaccaccccctggctttcctcttctgcatcagcaccactcccgaaccatcattcctgatcgtcagaatttttaatgtaactaaacatgaaacacaagtgcatctgcattatgtgtgggtgctctctccctttattgtatttggggtaagattattttagggcatggtccagggtaaattcctgtaaggcctggatgccctgctgtgaggtcaaagggggacggactgcagagccctggctccccaactacctgcctatttccggccctttgttggggtctcttctgctttatctggcctgagagaggctgggatgtttctgatcctggggctcctggtggatggtgcgcagtatttccagggatggagggtgctgtgggcactggtgggaagcttgagtgtctccacccaggctttcttggtgcctcctcatctattccttcaaattctagaccttgagcaccagggcctgggcccctgaccccctcctgcccttccagcagggcctggtccagctccagcaactcctcagcttgggccagctcagctgtgttgggggctcatggccctggtgagggggagtggtggagggagcatcagccagggcagggggctgaggcccttggaacctgtattgcagggtctggctgtaaatgaggaattctacctccctttccctttttctagcccattagcttaaggcctcctgtactgagaagcccagggagccccttgtcttgggcataggcctctggggggcaaatagagatccctggctcagggagtataactggataccttgaacaaggatatggggtcactggaaagagaggaccggctgtccctctccgctaagaaataattaactgttagatgagggggaatttctgttcaagggctctgtggactgtgctgctctggagggggtggggagagagagccctgaggtctgagctggggtgtggttgggaaggagctgagagctcagagctggaactaggcaaggagctgcaggggtgagggtggtgcagggtgggatttagaggatttcccctgactcctgtgctgatccccttcacgtcctccacccccacccttggtgtccgtcaacatgctggggtgacctcatcttcccactgtccctggagctgttctactcttccacgcttgccttggggttttcagagcagcatctttgtgagtcctggagagctagggaccaggagggcaggaggaggtgaagacaacagcaccaagagatcctggaagagaaaggaccatggtagctgaggcagggagcagtctgagttgcctagaagacaccaagagttcgctccctccaggccttggctttgcttcagcacctggtgctgcataggccccacccctgccctgctctgctgcctccacctccctctcagcctggtcccagacagaatccagaccaattcctgtttctgatgtgaaaaatgatcctgccagtttaggcagagcttgctttagagtactggtgcccagccttccacaggtcttgtgtctgtttttcttggcactgggtttcttctcacttattcttctgaattggcaaggcaggaattacatcactagtttgcagatgaggaaactgactcgtatgggctcattcagcactcactcactgggcaagtgtctgtcagggccaactgtgggccagatgtgcccagggctctatagctagctggtggaagggcctggagggttcatattcaggtccacctgacttgaaaactcatattgaccttacttaagtactgattcccgatttacaatccatgccacaaactttattgtcatatctaaagaagttgccacagcagcctttagcaaccaccctcctgatcagccaatagtcaacactgaggcaagaccctcccccagcaaaaagattagcaaaacctccacaccctctctcaggatgttcctgcacctcacagctacagcagcaacctggtctccctgaggacacgaccccctccaaagtcctcccacatgggggagttttcccagggacttgtacccctgggttcagaggtgaggtggggtccttgctcctcactgtggttctcacacctttctccctccctcctccctaaacccctaagctgtcagcagattagggccccattccccatgttgtagccattccctttgtgccccaagccattcctcttaatcctgacccttgtagctcctggttcactgtcaccctctccagcagtgcgtctccttgactcttggtgacttcaacatacgcagatgtggtgggctgagtaatggtccccaaagatgtccaggcttaatcgttggaacatgtgaataggttgcattgcatggcaaaagggacattaatcatgtaatgaagattaaggaccttaaaatagggagagtatcctggactatctgcgtgggcccaatcaaatcacatgagccattaaaagcagagaaactgccctggctggagtcagattctgcagaagaggaaacagaggagaagctggagagaggaggtcagatgttccaagcaggaggactggatgtgccttaggcgccatgtgtgagtacctgagagaaaactctaggagctaagggtggctcttaacaaggaagtggaaatctctgttctatctgcaaggaagtgaattcagacaagaacttgaatgagcttggaagtggattcttccccagtctccaggaaggaatgcaggccttcccgtacattgatcttagccccatgagactgtgtggacttgcaacccacatgactgtgacatgataattaggtgctgtttaaagccacttggtttgtggtaatttttatggcagcaacagacacctatacagcagagaagatgcccttgctccctggactctcagatcctgtaactcctctcctccatgaccttctcctctctctgcctgaatctcatgcccttgtcatcccctaggcctcatcacggccaagaaccccagcccttccatactctcaatctcacacttcccactctctggccatctttccactcatccccttgcaaggtggccacaggctctgatgacacagacactatcattttatcatatgctgtgatgtaatatcaatgaaccactcatttcctatgtgcctgcattccaggcttggagtccaccctgtggtacatcaattccaacaatccttccagcccactgggattcccaattgagtgatcctgccatctactccctgtcactcacccttggtgtcctctcctccctcttctcccattttgaattctacagtaaataatttcaatccctcccttgcctctcccttgcattgtcatactcacctggcaaaactacacagctggtgggttccacctctgtctatgctgcacctgccccatgagctgcaggaggctggacagcagcacacaacatgctgactggtctctttaagattccaaacctcatggggagcccctaccattgacgtggccagcaatcaccctctccctacgtggttcaccctcagcctcctcttggcctgggtgactcctagacaccttctctctgtgctcacacatccaacccttcttccccattcttacctcagctgacaaccttgcctcctacctcactgagaaaactgaacacattagaagacaacttccccgattccaccactgtctgctcatgcatttgcagctgcaccacatgtcaggcattttaccacgggagggattgctgggggttaacaattctgctcccagtcagagccagtccctcttctggtgccccaaacatcatcccttctcatctacttaaagttgtcagttcatcaactagtatctttttttatctttatcatcaactttttccctctctccccactggatcattgtggcagtcatgagaatgcacatcccagcccctcagctacaggaagcagaatcgatgatgaccccagctcttgaagcttgaaatctattgccacatttgctctgatcccacacctgccccctgatcttttccagccaatgattgaggaaagcagggcagaaactaaggcaggaatatttctcctctgaaggctgactgcagccccagggctccctgcctcctttactaaatttcccttagcctgcacagggtctaggatgcttccagctgaacttcctgccctctctccttcactggggctcagagttgcagtgtggtctgatggctctcccagtgttttctgtctctctcctgaatttctctcacaagtatttccctgaataaatccttgcacatttactaccgtattgggctctgctcctcaggggaccctaactaacccaagcggtatgaagggtgacccatgaaaacaggcaaaaatgggaatttgaaataatcttgcccactgcctggcaggccaagaggatgccacccgggttggtgggggacacagaaagtccatggcataaggtgcagctgaggtgctgtggtctcctcagtgctgagctgagaagatgccctggttaggggaagctatggcaggtgaggtgatagaatgccctacacaataatgatgaggttgggggaaacctacaaagacagaggagttgggtggttactgcttggctgcgttgataccctataaaaggatcatgagaatctgcgggttgttaacagctgtcactggctacaggtgacagcctctgcagtgtctcatggagaggcctttatctcctgtagcgaaagggcagatagcgtggaatggcagctgaagacatcattacgagggccacagtgctccagacatgtctgacactcagccaaagcaggcctgttacaggaaagtcagggtcctggtggggaaacctgagattctggaaactggaaccaggatatccgatgggtgccctccaggaccctctgggaatgcagaggaggctcaccattatctaataatggttcccacttcctacgctggaagatgctgcaaaagcctcacccccgtgattctgcgggaatcctactcagcagctttgcaggaattagccgccatttccccacaggagcccaaggagcacttctgggattggaatttgagggcgtttgatcaagaaaccagaatttcaggctggatgaataaaaatcctttggcttggaggcactttctcaaggcatgggtttgtcaaacaccccaggactttgataagtggagctaaacccaccgctggggtgaatccatatagattggaaaaaaagatgcccaactctcaacaaggtagacatgtcttagttgccctggaacatgtaaaggaaggaataacgaggctgagggaagtgggcatggtgaaggcccaccagggccatgctccacaagagggcccagaggacacaaccttccaccagagcctcaggaacatgatggtgaaagggacctgcatcactaagtataggggtgttgtcctctgcaggctgcaggtgatggtaataaagatggtcccagagttgcatttatccatatccctggggagagtgtggccctgaagagacagagaagaagtggtggcagtgacctgaaaaagcagagggcatggttactatggcaacttcagagtagcagccaggaggactcaagttgcagggaatgtggggaaggttaatagagggtggtgtcccagggttaggacaggcagccaacaagggcgctgcttgatatctatgataggaatgaaagaattgaggagcaggagggtgaaggtgtttgacccaatacaaagtcatgatcccatcctcaatgcctagacctcagccaagattcagattcagatctcagtgacagaggaggagtccatatccctaggaggaagaccctgcaaccctgtggaagtatatgctggcacaattccctcaatcatttggcaaaggaacctatagacatttacttgggtggttgtacactggggaaaggaaacacgcagaactggagggattattgacactgggtgtgagctgacattgatgcccagatgcccacagcactcatgtctcccatcacagtggggcttatggaggccagggagtaaacctggacaaattatggcccacaatgggaccactgggccaacagacccaacgctggatatctttcaattccctgagtgcatgattgacactgctgcactgctaagtggagtcacccccacactgggtccctagtctgtggagtaaggactctcattgtgctgaaagccaaacggaaacctctgacactgccctcatcctggccaaatcaaaaaccatagtgtgtcccagggtgggtcttgtggaagacactgaaagtattatggggtcgcaccaacattagagagctgaaggatgtggggtggtgttggggctgtctattgtctctatgtaatccagcaacctgtccctgagggaaactggtaaggcctaaagaatgaatgagattactccaggtctggccaagtaggagttataattgcagcttttatgttgtctggttatcactggtagagcaggttaataaagccccgggcacacagtgtgccgctgtggatttggtgagtgcattcctttccactccaattagaaagtggatatgggctgggcgcagtagctcatgcctgtaatcccagctttgggaggccgaggccggtggattacctgaggtcaggagttctagaccatcctggccaacatggcaaaaccccgtctctattaaaaatacaaaaattagccaggcatcatgtcaggtgcctgtaatcccagctactcggggggccaaggcaggagaatcacttgaacacagaaggcagaggttgcagtgagccgagatcacgccattgcactccagcctaggggacaagagcaagactttgtcaaaaaagaaaggaaggaaggaaggaaggaaggaagaggatatggagtgattcacattcatgtggaatcaacgacacatttatttattgtttgcctcagggctattgtaacacctgtgccctctatagtataggcttaagactgtactggacatactgcatatcctttaggatattaaatcagcacatttcattgacaacttcatgttgactggagtagatgagcagcaggaagaaagtgcactgtagtcctttgcaaaacacacgcaccccacaaggtgaagataaaccttatacagcttcaaaggtgggcactgaagtgaagttttatgggtgaacaagtgccaagtgtttaggggaatgcaggtgtgtcccctccaaggtaaaagaaaaactgttgcatcttgcatcctcaccagaagcaaggaagcacactgcttggtgagcctctttgaattataacaacaccacattccacatctagacattttgctttggcccacagtctaggtgacataggaggatgccagcttcaagtggggcctacacaggaaaggaccctgcagcagatccaggccatggtacaagcagccaccatccctcagacccctggggctggtggtgccagtggtggggaaagacacaggatggagctgaaccaagcaccagtgggagagtcacagtggagggcctgggattctggagtaagatcatgtcatccacagcagagacacatgccccctgttagaagcaacttttagtgttccttgtcctgattcaatagaatgtttgaccacgggataccaagcaactacggggttccaagtgcctgtgtgacccacaaagtcatagatggtacaggcccaacagcattcatcatcaggtgaaaacagtccacctgggttgagcttgaatcccttgctgacacccacagaaaacacccaagtctgaagtggcactgaactaccaaacagacaaatggcagttagccagctttcaccatgggtcagcccaggcctggtaggatgagtgcatgaatggagcaaccacagtggcaggcatgaggctccgtaaggggccagcagcactgacttccccacaccaaggcagatccagctgctgccacctctgaatgtccaactcatcagcaattgaggcccatgatgtgccctagtggggcactatttctttacatgactacccactaagtaacaagttgactacatttagctacttccaacctggaagggccagagtttcatcttcacagggttaggtaccgattctatgggtgggttttcctgtcctgctctcagacacagccagcaccactctctgggtgctgttgacattcctggtctgcaggctaggcagtgctcctagcccattatctgcctgaaggacccactttgcagggaaagtttcagtgtttccacggctgtgggttccactaatcctatcaccatctgcactacccaggagctgccagccacaaggaaggctggacaggtcttctacaggcacaactcagtgccagcctggaggaagcactctgaggggtgggtgccatctttcaggacacagtgcattgtttgaatcagagacgtctctagagttctgtgttctcaataggaagaacatgtgtgtccagaaatcaaaaggcggaagcaggtttggctccatgtccaatctcttagattcactcaatggggtatttcgcatattttatctcccaacactgggctgtgcaggatacgaggttctggtttccaaaggagtgtacccctaaaaggagacaaaagacagcccactgaactacacattactttagtcaccagagaagtttggacagtgtgtgcccagataccacttggtgagaagaagattctcctcctctccaggcccaggtaataaatagatcctcatccccaggagaaggcatggctgtttcacacaagggtagaagtgtgtgtggaaaccagagatccacctgggagccttctggtttcccttgccccattgtaagtgtgagcagaatcatccagcaattcagcctgagaggatttgatttccaagggcccagacccgtcagggcagaaggtttgagtcacacttgtgggcaatctcccaaggccctgctcttgtgttctgacatcctcagtacattggtgctgaggccctcttcccatgggctgttcccaacgactgatgggtcataccagtgacactaaggcaggacattcctaggagacaggggactcctctgatggccaattgtagctcgaggactcctctatggccttgctcagtgaagtcctcagatgatgcaggcctaggctgacaactggactgcaaccttgtgagaggccctgagccagaagcactcagggaaacctctcctggatttctgatcattggaaactgtgggagatgaggaatatttgttgttctgagctgctaagttttacataatttgttatgcatagtaaataactaatacattttcacaagacaggatgcattattacatgttaatttgcatttgctctaaatttatcatcatcattattattatttttgagacagggtctcactctgtcacccaggctggagtgcagtggcatgatcaccatgcactgcagtgtcgacctcctgggctcaagggatcctctgaccttagcctcctgagtagctgggactatagtcatgaaccaccatgccaggctaattttctagtttttttgtagagatgagagtttcaccatgttgcccaggctgatcttgaacttctggagtcaacaagtctgccttcctctgccttccatagtgctaggatggcaggcgtgagccaccacccctgcctaacttaattataagacattaaacatgtaacttagttttaaaaggaaaggagaagttccatggctgaagaggatgtattttattatcgttcacaatgatcactttacttgaacttcaatttccaactgtgtcccaattaaacacaaaaggaagattcatcccttgctagagtgattctatgatggccccaacaaccacctcctggtcattcaccttcccccagttattcaaccaactctaatgtaggtgctgctgtgaaggaatttagcagacataataaaggggctcaattagttgacttcaggctgggtttatgctgcttggactgtcctaatcaggagagtccttgaaaggactgggttcttcctgagcatagagattcacagtgtgagagggattcagcatgaggggtttcctccactgtgggctttgaaaatgaaggggctgtgtaggaaacaacactggtgggcaccaggaattgagtacagccctccctgttctctacattgacagccagcaaggaacagggacctcagtcttaaaactgcaagaaagcacattctgccacctctgtataagcctaaaggaggattcaaaatgaagactcagatttgggaagcctggaacagagattccatctacatcatgcccagatttctgactaaggtactataaacagataaatgggtgttttttggccaggcgtggtggtgcactcctgtaatcctaacatttgaggagctgacacaggaggatcacttgcagccaggagtgtgagaccagcccaggtaatacagtgagacactcgtctctacacttttttttttaattagctgggtgtggtggcacttgtctgcagtcctgtctactctgaagactgaggcaggaggattccttgagcccaggagtttgaggctgcagtgagccatgatcatgtgactgcacttcacgctggatgacagtttttagagactctgtctctaaaaacaaataaatgaatacaataaataaaaacaaataaataaatacaataaatgggtgttgtttaaagccaatgtttgtgataattttttacacagtcttataaaattcatacacaggctcaacagactaatggaatgaactgatgaattgatatatacactagttacataaaataaaatctttctgaactttttcagtgttttgcattttataattatctgtgatgcaatttaatatactcatatttcattcattcagtcaacaaaaattaatttagtccctacaatgaaccaggtatcccctcatatgctcacgtgcctgacattctagaagcttcacaagaccaaggtggagccactggagtgttttaggtggagaaatgacacactttgactcacattagcaggaccactgtggagagaacagtcacgtagcaggtaacgggagagtgccagtgtcacaattcaggagtgacagtgtgatggggactaaggggagaggaggggctgagtgataagagggacggagggaagggctggagaagcagtaggtgaggaaaaggagtagagggatagaattcaaaagcagcacaactcttaggtttgaacactttttttaatggtatttcaatagatccatctacagagcctcgcagggtgttacttgcagttggcctttaataccttaagtgggtctgcttaaaaactaattgtttttatgttaatcaggttttaaaaatactaagtgttcctaagaaatatacacaccacttagatgtggatacttcctaaaaacaggcagtgcatgagcactggtgatggacattgtgactgcatcgagcgcttgcaactttgaggtgaatgaagtctgtactgactcctggttgcaacacataggaacacagtggctactttgtattgaggagatgtcctggactcacagaaactcagggctatggaataaaggtaaatttaaaacaccacaagcgggagtcacagataccttgtttgcaaaagtgaaacttaggagctttgtgagtcctgttgtaatgcttttagacactttatatatcaaggggccaaagtcacatgtttttaccgattagattcctgatcattcaggggttaccaagattctgctacccactgtagttaatacacaaaaagcaaactggtctctatactatctcatgcacccaggcacaacttttccagatttaaagaaaaagaaaaaagaaataaaagaaaaaaacctctgtctctacacctccattcccagggagagctccctctctggcaccaagctccctggggtgagttttctttttgaagagtccaggggaacaggtaagcagcggggaagcagggagtccatttcagggacaggaattcccggatgaaaagtgaaaggagagggacggggcccaagctgagggtttcttcctggtttctcggacagctcctggaccaagactcagggaacattgagacagagcgtttgtcacaggaggagcggggtcagggcgaagtcccagagccccaggcatggctctcagggtctcaggccccgaaggcggtgcatgggctggggaggtgcagcattggggattccccatctccgcagagtttctcttctccctctcccagcctgcgacgggtccttcttcctggacactcacgacgcggacccagttctcactcccactgagtgtcgggtttctagggaagccaatcagcgtcgcgcggccccggttctaaagtccccacgcacccaccgggactcggagtctccccagacgccgacgatggggtcatggcgccccgaaccctcctcctgctgctctcggggaccctggccctggccgagacctgggcgggtgagtgcggggtcaggagggaaacggcctctgccgtgaggagcgaaaggtccacctggctggggcgcaggacccggggagccgcgccgggaggagggtcgggcgggtctcagcccctcctcgcccccaggctcccactccatgaggtatttcagcaccgccgtttcctggccgggccgcggggagcccagcttcattgccgtgggctacgtggacgacacgcagttcgtgcgggtcgacagtgacgccgtgagtctgaggatgaagacgcgggcgcggtgggtggagcaggaggggccggagtattgggacctacagacactgggcgccaaggcccaggcacagactgaccgagtgaacctgcggaccctgctccgctactacaaccagagcgaggcgggtgagtgaccccggcccggggcgcagatcacttactccccgctccatgcctcacggacggccctggtcccctgagtctccgggtccaagatcgaccccgaggctgcgggacctgcagagatcctcgacccgggagagccccaggcgcctttacctggtttcatcttcagttgaggccaaaatctccgcaggttgctaggggccgggccagggctcggtgggcggggctgaccgcgggaactgggccagggtatcacatcctccagggaatgtttggctgcgacctggggcccgacgggcgtctcctccgcgggtatgagcagtatgcctacgacggcaaggattacatcgccctgaacgaggacctgcgctcctggaccgccgcggataccgcggctcagattacccagcgcaagtatgaggcggccaatgtggctgagcaaaggagagcctacctggagggcacctgcatggagtggctccgcagacacctggagaacgggaaggagacgctgcagcgcgcgggtaccaggggccatggggagcctgctcgatctcctgtagatctcccgggctggcctcgcacaaggaggggaagaaaatggaaccaccaccagaatatcgccctccctcctgtcctgacggagaggaatcctcctgggtttccagatcctgtatcagagattgactctgagggcccaccctgctcttcctgggacaattaagggatgaagtctctgagggagtggaggggaagacaatccctggaagactgatccgcggtcccctttcaccccacagcaaccttgggcaccaggacttttcctcccgggccttgttctctgcctcacactcaatgtgtcggagtctgactccagctcctctgagtcccttggcctccactcagatcaggaccagaagtccctgctaccctgctcagagactagaactttccaaggaataggagattatcccaggcgcctgtgtccaggctggtgtctgggctctgtgctcccttccccaccccaggtgtcctattcatcaggatggtcacatgggcgctgctggggtgtcccatgaggaatgcaaagtgcctgagttttccgactcttcctttcagaccccccccaagacacacgtgacccacccccctctctgaacatgaggcataacgaggtcctgggttctgggcttctaccctgcggagatcacattgacctggcagcgggatggggaggaccagacccaggacatggagctcgtggagaccaggcccacaggggatggaaccttccagaagtgggcggttgtggtagtgccttctggagaggaacagagatacacatgccatgtgcagcacaaggggctgcccaagcccctcatcctgagatggggtaaggagagagatgggggcggccatgtctcttagggaaagcaggagcccctctggagacctttagcagggtcggggctgggtcctggaggtcagaaccctcacattcccctcctttcccagagccctctccccagcccaccatccccattgtgggtatcattgctggcctggttctccttggagctgtggtcactggagctgtggtcactgctgtgatgtggaggaagaagagctcaggtggggaaggggtgaggagtcgggtttgagttttcttgtcccactgggggtttcaagctccaggtagaaatgtgttctgcctggttaccgggaagcaccatccacattcatgggcctacccagcctgggccctgtgtgccagcacttactcttttgtaagcacctgtgacaatgaaggacagatttctcaccttgatgattgtagtgatggggatctgaccccagtaatcacaggtcaggggaaggtccctgctgaggacagaccttaggagggcagttggtccaggacccacatctgctttccttgtttttcctgatcctgcccttggtttgcagtcacacatttctggaaacttctcaaggttccaagactaggaggttcctctaggacctcatggccctgctaccttcctggcctctcacaggacgttttcttcccgcagatagaaaaggagggagctactctcaggctgcaagtaagtatgaaggaggctgatccctgagatccttgggatattgtggttgggagcccatgggggagctcacccaccccacaattcctcctctagccacatctcctgtgggatctgaccaggttctgtttttgttctaccccaggcagccaaagtgcccagggctctgatgtgtctctcacggcttgtaaaggtgagaccctggggaggctgatgtgtgtgggttgttggggtaacagtggatatagctgtgctatggggtttctttgacttggatgtattcagcacatgatgggctgttgaaggtgtgacccctcactgtgagtgatatgaatttgttcatgaatattttttctatagtgtgagacagctgccttgtgtgggactgagaggcaagatttgttcatgccttccctttgtgacttcaagaaccctgacttctctttctgcaaaggcatctgaatgtgtctgtgtccctataggcataatgtgaggtggtggggagaccagcccacacccgtgtccaccatgaccctgttccccacactgacctacattccttccccgatcacctttcctgttccagagaagtggtgctgggatgtctccatctctgtctcaacttcatggtgcactgagctgtaacttcttacttccctattaaaattagaatctgagtataaatttacttttttca

SEQ ID NO: 29044 - DNA, 189056 bp, Homo Sapiens
tgaaacaaggcaccagaccgatggggtgagcccacagcagaggcctacagctctgtttagaatgaggaagcagagcaggctgagagaggcagctcagcagagtgcttaggcaagcatagggccacgactccccactgcaggcaacatatctgaggaaagccatttacaataggtgatggtcacattccatcaaatctctggaagggttcatggaggtggggttttcaatcttatttcagcctttcaaaggcctctcagggtttggaaatggaagcaacaatgtctgtgcattgcagagacacaggtgagcccccatttcctgccagttaggaagtcagtgctgagggccttactgtatgtccttggcacatgagatgccagttcctttctgggcagagagcttttggttgtctgaggataacattgaaactttgctttgaaatgcatttcaaaaatatgaactttattcaaatttactttccttttttcattctgaattcttaaggtccaaaagcattgctgaataattctgcttctaaacccccattgcagcacagggcatgaactgtccccagggcaaagaacataaggtagtcttgtgtggaaaacatacaagtaggtatctcagcaaatgctacctactgtatcacagtagcttagaatcacagctgctcactctgggctgaagttctctgatggcttctgcagggtggactggcctccttccccctatatgtgtgtctacggctgacctgtggctttgccgaggctgggaagctgctggtagtgcccatggatgggagccactggttcaccatgtggtcggtggtggagaaactcattctcagggggcatgaggtggttgtagtcaggccagaggtgagttggcaactgggaagatcactgaattgcacagtgaagacttattcaaccttatacaccctggaggatctggaccaggagttcatggcttttgccaatgctcaatgggaagcagaagtacgaagcttattttctctattaatgagttcatccaaatgtttagaatttaatttttcacattgcaggagtttgtttaatgactgaaaattagtagaatacttaaaggagagttcttttgatgcggtgtttctggatcctttagctatgtgtggcttaattgttgccaaatatttctccctcccctctgtggtcttcaccagaggaatactttgtcattatcttgaagaaggtgcacagagccctgcttctctttcctacagccctagatatgtctcaggattttcacatgccatgacttttaaggagagagtatggaaccacatcttcttcttaaaggagcatttattttgcccatattttttcaaaaatgccttaaaagtagcctctgaagttctccaagcacctgtcatggcatatgatctctacagccacacatcaatttggttgttgtgaatggactttgttttggagtatcccaaacctgtgatgcccaatatgatcttcattggtggtatcaactgcaatcagggaaagccagtgcctatggtaagtcgttgctcctttagcacattaaaagtattctggatttgaatatttaaaaagatttcttactgaactgggatttgacatttgtgtttattgcatctaaaatttcttttctatgtaaaaaattattttgtgccttccacatgcttgttagttagcaacttttatataatggcctcattaatatgtatgtctatacagttggttggttaattgttcataatttccactgcattttttttttttttttttttttagaaacacggttttgctatggtgccctggctagactcaaactcctgggctcaagtgatccccctatgtaagccttccaagcaattatgacctttttagtatttttggaaaaatacttaaaaccacaataagaaatgaaactttcattttagctaatcctgtaatacctgctacagtaaaatgctctttgcagttttgtatgcatgtgtttccatttattgaaattactttatatataagcatatatgtaaatgtttacacttattttattaaaatcaaatctatcaggctggacatgttgtctttgccatgattttttacttgccagtaaatcagagacaactttacagatttgatatgttcttttaataattgataaaagtctttactttggatgcaacatagttgcaagctttcccagatgtttttctgctaaagatttggctaacttcttcaaaacaacaataataaacagatgttgtctttctttgaccctgaagaaagtataaagcaaaatgcctttagccacccaaaacagtgttaccatgacgtttggtctcgtccagtctgcttttgatttgactggatcgctttcgtttcttggtagccattgctttgattgtgctttgtcttcagggtcttactggtaaagctatgtttcatctcctgttacaattctttgaagagatgcttcaaggtctggatcccacttgtttataatttccattgaagggtctgttcttgtctgcagatgatctggctgtaacggttttggcacccaacaagtggaaaatttgttcaactgaaatttttgtcagaattgtttaaactgatctgattgaaatttctgttgtgttggctattgtttctgctgttaattgtcagtcctcttcagttagagtatgagcaagattaattgtttccttgtgaattgatgtatggatggtctgctggtgtgggcttcatcttcaccatcatcttgtcccttcttaaaaggaattgcccatttgtaaactgctaattttttggagcattttccccattaactttctgtaaagcatcagtgatttcaccgttcttccctcatgtctcagcataaattttaggctattgcttcaattgtagcagaattcatgttgttttgatggggacttctttccaactgatgtcttatccttcttagtgcctcaaactagatcctactcagacatgttttaacaagttagcataagtttgttttggtgcaaagaaatttgaaatccatgcttaagtttttcataatatgcattttcattaatcgtgtgatgatccctcatctattacttttatagggatgggccacgcatttttgttcattgttctggcttcttacaaggttcagtagactttgtaacacagttgtgtctctcacagattggcagatgtttggtaaaggattgacttttcagccaactcatgggaaagtgaaataatgtaaaaaacaggaagaatacagttttaggcctttcaagtgaggcatggctttcagctcttggcaagaacaggcaaggagatgcaagttttaggactctaagaggctaggcttttcaaagtgcttctctccccttcaccctccttcagttacagcaccaagcaccaccgaggtgttacctgcagcctcactctctacctggttgtgggatcctgccacttccttaacccacactgagttccttgtggttcacagggtcacacagagggctgtagagatacaaaagatatatgtgattttatatcacctatcatatgaagatatatttataaaataggaaacatattaaccacttatcattttatatatttatggttttatgtgtcaaaaatatattgtttcatgtatgtattaaaggataagtatgtataagaggttttatagatgtgtaaaattatatatttatacgtatctttacaaatttaagaataaaggaaggaaaattctcaaagaggaattcagatatcaagcagtgccctttgaccaagagccttggttacaacatacctacaaaagtgaactatcattgaaagacctatggacactggatttctctttccttatttagaagggcagtctgtgtcttggaaaagcatacagtttgttgtatcttgctggacaacaggagtcatagtctgaagtgtctgatgagaaggaagcatcacttgatgcagtgtgcatctgtgcccatgtatgtgcacgtgtgtttgtgtgtgtgcatgcacacatgtgtctgcatgcagtgtctcagatcctacataggggtttttcctgaaggtctccagtagcaaaaactcattgagtctatccaggggaattacatccaatgccgtaattaaatactttaatgaagatggcagatcatcattcaagagaacatcaggataattttaattgaaaaaaagaaaaaaggaatcactcccagggttttttagtttttggtgagttccagcagaattgatgactaggtccagtaggaaggaattcaggattactctgtaccatccagggtgagtgtagctctgaagaactgcgggtgggaagtgacttcacagcaagaaaagatctgggcttcccccattgctctaagatctggttccattgtgagattcaaattaagagtaagctgttaatgggcaagcccaaggtctcccaccaagattattcaattcaacttcttttttttttttaatcaaacatatggcaaggagagactatagtgtgatgaacacctatatatccatctttgtgttacataattttcaatattttattatactgattcatgtatctgctcttttgtttcttttttaaaaaaacttctggctataattttttaatggaaatgctgtacatatcattctatccccaaatacttcactaaatatgaaaaataaggaaattctgttacatagccacaatatcattatcattcctcacagaatcaatacctctttaatattgtctcactcataatctataatgaaatttcccctaattgtctcaaaaatgtcttttacatgcagatcagtagaatggagttgagaatccagaaataaacccatacatccttggccaattgatttttactgtggtgccaagactgttcaaatgggaaagaataatctcttcaacagaggtcactgcaacagctgcatatccacatgcaaaataatgaagttgcacccttatatgcaaaaactaacttgaaatggatcaaatagctaaatagaaaagctagaagtgtaaaagtttagaaggaaacatttgggcaagtattaatgacctggatttctgggatgtgacaccaaaagtatcagaaacaccaacaaaaacaacacagacatatttgacatcaaaataaaaaactttcgtgcatcaagggacactatcacgagagtgaaaagacaactcacatggcttccctcgctaagatgtgcaaacaaacgtatacatgcttgacatggaggctcctgggaggcgatcacaatcctcaatgacctgaagtcccaaaatcttgaatgttaagatcctgaaagatcaatgtcccacaaatataattccagaaaaaataactttaaaaattctttaaaagatatctgtttacattttaaatggggatttatttgaaaaatatataaaaacaggacagaacacttcataggccactttacaccctaaaatatataataataatacatatttttgcaagcttaaaccctcaggtgtactaatgactgtcacataggtgtatcacttgtgagcagatgaatcatattcatagaataacaggtcaaaaaaagaaaagtataaacatatatcattgtggttggtaattgtgtgcactcagctttacagctctgatcatctgacataccttgaaaaatgaacagagacttttcatgaggtcagtcaaaaacctctatgggtcaccaccacatacacagttgctcaaagtgcccaagtcttgagagcctcaccctcacacgtagctgggattacaggcatccaccaccacacctggcaaatttttatagttttagtagaatggggtttagccatgttggccagcttggccttgaactcctgacctcaggtgatccgcccacctcggcctcacaaagtactgtgattacaggcatgagccaccacggccgcctgagaaattttatctttcacaaatacagatatacaaaagggacatctcttcatttattgaggacgttacaacgtttttacatacatgcctaatgcttacacacggttaaccctttgataacgcactttcatggagtcaaatttgtgaccataaaatgaattcgaattctctaaaagtctccacacactttctgcctttggtattggaaatgatgtgcagatgaaatacatatagcatagcaaattgcaaaaagaatgctgacaatgtaatcctgtgaaaaaacctaaaaagaagaaaaagtaaaaggaaaaaactccaaattaacctatgctgtgattgtgatttttgggattttagctgttagagagtttagattttagggagttagacctttgggatttggatccttagggaattgatattttggaattcaacattcagaattatgggttttgggattatgtctttcaggattatgatccaaaccctatagcatcttgtttgttagcataacgtgtacaaattttagatacatctctgcaccccagcagagcatcacgaaattgagtagtttacagcacagcttcttaacctatctgtgactaaggaataacacaaaaagttttctgcaattcattatagatccatgtttttctgtaacatataaaaaaaaaatgctacaaagtgaaatgaaatcagactataaaatgcaaaacaacagaggattgcttggctgacagcaacaccaattgctacaggaatttctaagtatttcctgcagggtctgcacccgtgctgagatgggcgggtaacacaatgagctggaaaccataccttgagcagcactgttttagacccaatccaatggtgctatgtgagtagtgtttaatcagaaataaggctgggtgcagtggctcacgcctgtgagcctgaggtcaggagtttgagatcagcctggccaacatggtgaaaccccgtctctaataaaaatacaaaaatttgccaggtgtggtggcagtcacctgtaatcccagctactcaggaggctgaggcaggagaatcacttgcatctgggaggcggaggttgcagtgagccgagatctcaccactgcactccagcctgggtgagagagcgagactctgactcaataaataaataaataaataaataaaaataaaaactaaacagaatactttctgttttgttaaggtgctaaatacattgtcacaaacactgaataattagtgatcaccagggcaaagtctatcatcagctaccagttttccttataaccttgtgttttgggaacctagcaacccttctgcccactaaagtgataactcatgcaggtttgcccagaatattcccagtttaacactggaagtctcatgtcccgggagactcctcgttccccaaggagcagggacagcaggtcactgtcactggagcactggaagctggccacatcactaggagattcagaaggggcacgacttaaggaggctcatgcttctcttatcttctgctttctgctgtcatttccaatgggtgacaagttccttccacgcagaagccaggccaggagataaagtcatcttgtcctagaaaaactgttaagaaagaagggaaactgtctagtgtgtttcgccaaaagagtttcacagactcttctcttattggggatatgggggtggatgatcactgtcctggtctccctgaagcaaggacacctctctggcctcagggtgcctgtcaggcaagtctctcctgtccctggaggttcacagagccccatccctgcaagagcaatgctaagtggggttggctttgagccccagccattctcttaacaattcttttagttaagtatcagttccctcatccccccactccagcattttttgcctcttgctatgatcagttttctcactttcacttttacacctctgatcactgaaaaattacagaattataagtttggaaaaggagtctatatttcttggaaaaggttacaaccttcaaggtggccatctagctggctgggaagcatgacctctggcaaataccagagacaggcccttgaaaggagaagggatggggtaggagctttatgctgaacaaactgggtaaacatacatattcaccaggttacagaaggagctatgaatatttatgaaggccatcctgactcatgcgtattgaacacacatgcatgttacatatgacccatgttcaccctggggtggagacatcatatttaaatggattacaattaggccctatacatcaaaaggtcttttcagggcacaaaggcactcaaattcacagtctctgtaaattggccagaaccagtctgtgatcaccagtcactggtcttcttaccaggagaaagttactgaaatcagcctcttgtccaacgaaagctgtatttgtggcttatggaacaagggatgggcatcagttagcatctggtggagctgcacttgtttaacattgtttttctctagacctgtgcttatttagctgctagagaaaaagaaaaactctgtggcagtcagaacatagttgattctttaagtgtaggcgcccatgactcaactcttgcttggcgtggcttgaggtcttgtgtgtagtttggtatctgatggccacaaaaagtccattgtatccgtctcatctctattttaacattaaagcgggtcagttgtgtttataccacaaaagggagggagtgtgatgaggcgtgtccaggcttctgttctgtcgtggctgtgactcagttttggtttctctggggtctttctggccaggaggggtccattcacttgttgtgggagacgggcggcacttagtattttcttttccgtttacaccttcctgggcatctgcattaagatgtgcagatacaccagcatgacacatgtatacatatgtaactaacctgcacattgtgcacatgtaccctaaaacttgaagtataataattaaaaaaagatgtgcagataaacacgcatatgcttcatgtggcagctcccttggttaaacattttttttttcctttcctatgagacttcctgaacaagtgagcccaggtggaacctctgcctgtgttaggacctaacctttctgtggctttctggaatccctggtgtcagaggtcaagtgtggattactgctgcttcccctcaccatcttctcctttccttcagtctgtcctgacaatgtgataccccacaggatacactgcctctttggcccactcaagggggcattttggtgatgccctgtggcctgcaggcccccaccagctatcacggtccccatcatcttgccttccctggctcacaggctttattttatgccactcttcatccctcctctgtgcagctcccgttttccttttctctccttcttccttttctctatttccttccccaccaatttctttccctctgtcacttcctcagcgtgatccctgttccagaggtataggatgatatggtttggctgtttccccactcaaatctcctcttgacttctagctcccataattcccacgtgttgtaggagggacccagtgggagataattgaatcatgggggcagttttccccatactgttctcatggtagtgaattcatctcatgagatctgagagttttataagggatttcccctttcccttggctctcattctctctcctgcctgctgccacgtagacatgcctttcgccttcagccttgattgtgaggcctccccacccaagtggaactgtgagtccattaaacctcttttcaaaaatgtaatttatccggtcttgtatctctttatcagcagtgtgaaaacagactaatacagtaaattgatcccagtagagtggtgtgctgctctaaagatacctgaaaatgtggaagcaactttggaactggataacaggcagaggttggaagggtttggagggctcagaaggaaacaggaaaatgtgggaaagttgggaactttctagagacttgttgaatggctttgaccaaaatgctgataatgatatggacaatgggatgagaaacttgttgtgaattggagcaaaggtgactcttgttatgttttagcaaaaagattggcagcattttgcccctgccccagagattggtgggactttgaaattgagggagatgacttaaggtatctggcagaagaaatgtccttttttttctttttttttaagatggagtgtcgctgtgtcgcccaggctggagtgcagtggtgcaatcttggctcactgtaacctccgcctcccaggttcaagcaattctcctgcctcagcctcctgaatagctgggattacaggtgcacaccaccatgcccagctaatttttgtatttttagtagagatgggtttcaccatgttggtcaagctggtctcaaactcctgacctcgtgatctgcctgccttggcctcccaaagtgctgggattacaggcatcagccactgtgcccggccagcaggagaaatttttaagcagcaagatattcaagaggtgacttgggtacagttaaaggcattcagttttaaaagggaaacagacataaaggttcagaaagtttgtagtcaagcaggctgcagaaatttgcataagtaataaggagccaaatgttaatccctaatacaatggggaaaatgtctctagggcacatcagaggtcttcatgtcagccgctcccaccataagcctagatgctcaggaggaaaaaatggtttcctgggctgggcccaggacacccctggtgtgtgtagcctagggacttagtgccctgtgtcccagccactggtgcatctcagtccctggcttcagagggtgcaagtccctggcagcttccacgtggtgttgagcctgcgggtgcacagaggtttggtaaactctgcctagatttcagaggatgtatggaaacacctgaaagtccaggcagaagtttgctgcaggggcggcccctcatggagaacctctgctagggcagtgcagaagcaaaatgtggagttgaagtccccacacagagtccccactggggcagtgcttagtggagctgtgagaagagggccaccatcttgcagactccaaaattggagatccaatgactgcttccacctggaaaagctgtagacacttaacaccagcttgtgaaagcagccgggagggaggctgtactctgcaaagccacaggggcggagctgcccaagaccatggaaacccacctcttgcatcaacatgacctggatgtgagacatggagtcaaaggagatcattatggagctttaaggtttaacgactgccctattggatttctgacttgcatggggcctgtggcccctttgttttggccaatttctcccatttggaatgggagcatttacccaatgcctatactctccttgtatccaggaaataactaacttgcttttgagtttacaggctcataggcaaaagggacttgccttgtctggaatgagactttgaactgtggccttttgagttagtgctgaaatgagttaagatttaggggactgttgggaaggcatgatttgttttcacatatgaggacatgagatttgggaggagccagaggtggaatgatatggtttggctgtgtccccacccaaatctcatctttaatttgagctccctaattctcgtgtgttgtgggagggacccagtgggagataatttaatcaagggggtggttttccccatactgttctcctcgtagtgaataagtctcacgggatctgattttataaggggtttcccctttcacttggctctcattttctctcttgcctgccaccacataagatatgccttttgccttctgccaggattgtgaggcctccccagccatgtggagctgtgagtatctaagcagcaaagtattcaagaggtgacttggtgctgttaaaggcattccgttttaaaagggaagcagacataaaggttcagaaagtttgcagtcaaacaggctgcagaatttgcataagtaataaggagccaaatgttaatccctaatacaatggggaaaatgtctccagggcacatcagaggtcttcatgggagcccctcccaccactggcttagaagcttaggaggaaaaaatggtttcctgggctgggcccaggacacattaaatctctttttaaaaaataatttacccggcctcaagtatgtctttattagcagtgtgaaaacgaactaatacaggagtcatcaagaaaggtcagcttcttcatcaaggttggaggcagtgaaaacaacccgagttccagtcccttctgtgggacctagcttctcctcgctgtccccactttacatccatctgccctgcctgaagacccaccctggggtccttaagttccagcatcagacaccaaggcagtttgcagagatcatccagtcagctaccaccatgcatctggccaatccctcaccatgggtatgcacagcagctctgcttctctcactgaaccctgactgctataggtcggaagtaagggctgtggcaccgtggcaccttgtacactttttgacttgaaatgcaagaggcagaagggacaggagcaagaggagagcctagaccatggcctattacagtttttgtgggaaagacaggcagggcaggagaaagagtttaggactggctggtttggataatctcagtgggctctgagctataaggctgggccctttgctctctctaataattggctggcttggaaagggactccattctcagccagaaagggattttaagatgtggaaacatcataatatacagaaaattaacaaatacatgcaatacaggaagtatgctctttttttttctcatggataaatacctagcaatagaatagctgtgctttatgataggtatatgtttacctttttaagaaactgccaaacaatattctcaagtagctgtgccatcccaccaccaggatatgaacggaccagctcttcctgctcacaagcacctggtgttttagtctgtttgtgttactatgaatgaatacctgagactggctaatgtataaagaagagatgttcagccttcagttctgcaggctgtacaagaagcatggaaccaacatctgcataagacaatagagttagcctatcccttcctggcttaaatcctggtgcccacttctcttccttactaataaatgtcctttgtggcatttttttttctagatagggcacttttgcatgaattaaaaaccagtttgggcagatattctttctcctcgaagcttttcctcatgaattctgggaactcatctgctgcatatggcttctgttatcttgacatttttaaagccaaacctcttcctaaaactagcaaaccattctttgctgccattaaattctccagcttcatatccttcacctttatttagctttgtgttgttatataatgactttgtttttctcaggtcatagtagagaatgtaggtatgcctttcttgtaacaagcctgtgcccacataaaagctgcatttttataataaaattttatttagataagcatgatacagaattaatctttgacaacttatctatggatataatgactctagtttcagtctttttcttctgaaatatgtgagctttccccaacaatctggactgttttcctaccttaatattctacttttgctcttggatttgttgatagggtccagaggacttcccatggggctgtaaagaacttattcctccgtgtggactgtgcacaccgtggtgctgtcattactgttaccaccaagagactccttaaacacttaggatatatgagagtcttcacttggttaaaaaaatctgccagtttctcagaaagacctttctcactattaatctttaacccatggatggaatcctagatatttttatccattaactctttgaatatccttgtttctaccttggcagtggagtctactgagattgaaaagctgcatttttaatatgagataaaaaggtattttggaaaaagtgcaaggtttgaagcctgctggcctcactgcagtgatggcttagtgagttttcttttctttttttaacaatggtccttatctggtttcatttttttttttttaaatgatggccaaccacagctgcagtcctcaacctatggtacatgtcaagcaattcaactttcattataatatcatgaatttctttgcttcatgggagcacttgaggcatcactagtgacactttgtatgggcaccatggtattatttagggtttctgatatgcagcaaacatgacaaacaatgcatgagaactgtgagatcagtgtttactatgatacacaatttactggagggatgaactgcacacatggagatgatcagcctcacgtggcgttctgagtggatacttacaacacttgaactccctgcaatagcaacagggggtggctatgaaattatcgcaatagtacagtaggcacagttaactctatgcacttatgacttaatgctgcaaccttactttttttacttttctgttgactacaaatggtgtcatgtatagtctgtgtttgtgtgtataagttttgataaattttaactatttaaaatagatttgtgtccatattatggtagtaaatgataaaataaactagttactgtatatattttatgcattcctgacacactaaactttttcttaattttttcactattgtaggctatgtggtttatctgcaagtcttttcaatttgttgcaaatctccataacattttctaatatatttattgcaacaaatctgcctataaatggaccaacaccattgaaactcttgatgttcatgaataactgtttatagaaatgaaattaacttttacttgttgtatcctgcagcaacgctaaacttacttatctattcttggaggttgttgtagtttgttggaaattccacatagatgatcacgttgtctgtgaatgagatctttttactttttctttcaaatctggatattttaaatttctttttcttgtttgactgcattgaataaaacaatgttgaatagaagtagtaactagccccccatccttggcatgtgtctgatctgaggagtggagctttcagtctttcaccattaaggatgatgttagctgtgggtttttctaagatgcccctgaatagttttggaaactttccctctttttccttcttttgctgataaatttttttgtcagatatggattttgaactttgtcaaacactttttctgtacctattgagatcattacatggttatacttttttagtttgtttatatggtatgttactttgatttatttttaaagattatttatcattcattatgttgaaatacgcatagcgtacacttatcatgttcaccactttaggtgcacagttcaatattgagtacattcacattgctctgcaaccaacaccaccattcatctgcagaactctcttcatcttcccaaactgaagcttgggacccattaaacaataattgcccattcccctctcctccaagcccttagtgtaaccacccaaggggttctccttgtctgctgcctagacagaactgatttatcaagacaggggaattgcaacagagaaagagtaattcatgtggagctggctgtgcagtagattggagttttattattactcaaatcgatctccctgagcaattcagggagcagagtttttaaggactacttggtgggttgggagaagccagtaagccaggagtgctgatcggtcagggatgaaatcttagggagttgaatctgtcttcttgtgctgagtcagttcctgggtggtggccacagatcagatgagccagtttatctatgtggatgctgccagctgatccatcaagtgctgggtctgcaaaatatctcaagcactgatcttaggagcagtttagggagggtcagaatcttgtagcctccagctgcatcaatcctaaaccatgatatctaatcctgtggctgatgttagtcctacaaatgcagtctagtccccaggcaagaaggaggtctgctttgggaaagggctgttactgtctttgttttataaaactataaactaagtttctcccaaaggtagttcagcctatgcccaggaataacaagcacaacttgaaggttagaggcaagatggagtcacttaagttagatctctttcactgtctcagtcataattttgcaaatgtggtttcattggcaaccaccattcctctttttgattctatcaatttgtctattttggatacctcatacaagtagaatgatatggcagttgtcatttagtgactggcttactttacttagcacaaagttctcaaggtttattcacggtgtagcacgtgtcagaatttcctccctctttaaggctgaattttactcctttgttaccacattttgcttatgcattcatctgcagatgggcacttggggtgagttcacctcttggctgttgtgagttacgcagctatgaacatggtggtacaaccttgattaattttctaaagttaagaccagccttgcatcccagggataaaccccgtgtgcttgtagtttatgatctttttatgtattatatacttaaaatattattgaatttgatttgctaaaatattgttttaaatttttgtttctaagttcatgagggtctgtagtttttctatcttatagtgtctttatctggttttgatattttggtaatgctagtcttttaaaatgaattaggaaattccataggcttttggtttctggactagactgtgaggatttggtattatttcttcctttattgtttagtagaatacattagggaagtcatctgaacttcacttttttggtgggaaagtttaaatttcaaattcaaattcaatttaaaagatattagttacttctatttgggttatttatttcttctagtgagaagattgggagcttgtgcctttaaagaaatatgttcatttcatctgtgttttagactttattggcataaacttgttcatgatattctgttatcattttaatatttgtagaatatatggtgataccacctctctcattactgatattgataatttatttcttctttctttttttctgatcagtctgctagatagagctttatcaagataattgatcttctcaaaaagccagctttggtttctttaattttgtctattgattttctgttttctatttcattgatttctgctctgaagtaagcctccagggaagataaattactcactgtcatttttatttttcaagggcagccatctgcaagtgcctcagttaccaagttaaaaggtgactgagcaaatgtctagtatcagttagggtgtcctggaaggagacattttgttctcctacaagaactatgccctgaggtttgctgcagaatccctcactaaatgttcttcagagtgtaacctgacatgcactgctgagctcacccatgaaggtgttgagaaaacctgcaagatgtgattcagcccaatgcaacaagtattcccatggatttcctctgtgcaaggcatagcatgggtgcagtggaaggaggatgaaaacacaagacataacctcaacatgaagtactactcaggaaactggggcagaccaatacatatattcccgagggaggcacaaggccagtggaataagcccacagcagaggcctacagctctgttcagaatgtggaagcagagcaggcagagagaggcagctcagcagagtacttgggaaagcatagggccagtgactcctcactgcaggcaacatatctgaagaaagccatttacaataggtgacaatcacattctataaaaatccatggaagggtccatggaagcagggttgtcaatctcattatagcatttcagaagctaggaatggaagattaaaagcagcaatgcctatgcattgcagagatgcaggtgagtcacaatttcctgtcaggtaggaggtcaatgctaaggaccttactgtctttccttgggccatgaaatgccaattcctttctgggcagagggcatttggttgtctcaagctaaaatccacattttgctttgcatctgggcaatttacaaaagaaggaggtttattggacttacagttccacatggctggggaggcctcacaatcatggtggaagggaagaaggagcaagtcacatcttacatggacggcaccacccaaagagagctgtgtagggaaactcccctcataataccatcagatctcatgagatttatttgctatcaggagaacagcacgggaaagacctggccccatgattcaattacctccaccaggtccctttcacaatatgtgggaattcaaggtgagatttgggtggggacacagccaaaccatatcagggacaaattccaaaaacattagctttattcaaatttactttcctttttacctttctgagtcgtcaagttctaaaagcactgcttaattttgtttctaaactcacattgcagcacagggcatgatctgccctcaagacaaagaccataagctactctttcctggaaaatgtacaagttggtatctcagcaaatgctactcatgtttcttatccttatgagtaaatcattggcagtatgtgtgattttttttggggggtcaacaggaaaataaacggcctctttttgggggcaggttttgcctgtatttctcctgcctacaaatattataggagcttagaattccagctgctggctcactcttggctgaagttctctgatggctcctgctgggtggaacggcccccttcacctatgtgtgtgtctgctgctgacctgtggctttgcccaggcagggaagctgctggtagtgcccatggatgggagccactggttcaccatgaggtcagtggtggagaaactcattctcaggggcatgaggtggtcgtagtcaggccagaggtgacttggcaactgggaagatcactgaactgcacagtgaagacttactcaacctcatacattctggaggatctggaccgaagttcatggttttcgctgattctcactggaaatcacaagtacaaagtctatatcctctagtgacatgttcatccagtggtattttggacttattttattcaaattgtagaagtttgtttaaggacaaaaaattagtaggatactcaaacgagagttcttttgatgcagtatttctggatccttttaatgcctgtggctttattgttgccaaatatttctccctcccctctgtggtcttcgctaggggaatattttgccactatcttgaagaaggtgcacagtgccctgctcctctttcctatgtccccagaggtctcttagggttctcagatgccatgactttcaaggagagagtgcggaaccacatcctgcactttaaggaacatttatttggccccattttttcaaaaatgccctagaaatagtctctgaaattctccaaacacctgtcaccgtatatgatctttacagccacacatcaatttggttgttgtgaactgactttgttttggactatcccaaagctgtgatgcccaacacagtcttcatcagtggtaccagctgccatcagggaaagccattgcctaaggtaagtcatctctcctttagtgtagtaagaataatctggctttgcatcataaaaaaagattttgcattgtgttaggccattcttgaattgctatagaaaatacctgagactggataatttataaagaaaatgggttcaattggcttatgattttgcaggctgtactagcatggtgccagtatgtgcttgtacagcctgcagaaccatgagccaagtaaaccttctgggggagggctcagggagcttttacttgtggtagaaggcaaagtagaagcagacatgtcacatagcaaaagcaagagcaagagagagtgagaagatgtgccacgtacttaaacaaccaaatcttgtgagtactcactattacaagggcagcatcaactcatgagagatctgccctcgtgacccaaacacctcctaccaggccgcacctccaacactgggaactacatttcaacatgagatttggacgggacaaatatccaaactgtatcatttctcccctgcctactcccccaaatcttatgttcctctcatattgcaaactacaataatgcctttccaatagtcccccaaaatctaactcattacatcacttgctcaaaattccaaagtccaaagtctcatcagagacaaggcaagtctcttccacctatcagcctgtaataaaaaacagttatttacttccaagttacaatggaggtacaggcattgggtgctcccattccaaaagggagaaatcagccaaaagaaaggggctacaggccccatgtgagtttgaaacccagcacggcagtcattaaatcttaaagctccaaaataatctcctttgattccatgtctcacatccaggacacactggtgcaaggggtgggctcccatagccttggacaactatgaccctgtggctttgcaggattcaggcctcatagctgctctcacagattgttgagtgcctgcagcttttccaggagcaaggtgcaagctgccagaaggtataccattctggggtctggaggatggtggtcctctttctcatagctccactaagtgataccttattgtggattctgtgtgggggttccaaccccacatttccactctgccctagtagggatttgttgtgagggctccactcctgtagcaggctttttgcctgcgcacccaggctttcccatgcatcctctgaaatctaggtggagggtgccaagcctccttcactcttgcattctgctcacccacaggcttaacaccacatggaagccatcaaggcttatgacttgcaccatctgaggcagcagcccaagctgtatctggggccctttgagctgaggctagagctagagtggctgggatgtggggagcagtgtcctgaggctgcacagggtagcagggccctgggcctggcccacaaaatcattcagtcctcatagacctcaaggcttgtgatgggaggggctgccttggagatctctgatatgcttttgaggccttagcatttggctcctttttagttatgcacatctctctaacaagtggtggctccatgtcctgcctgaattgctctcctgaaaaagctttttctttctctgccacatgacgaagctgcacattttccaaacttttatgcactgcttcccctttaaatataatttccaacttgaagtcctttctttgttcctgcatctaagtgtaggttgttacaagaagccaggccacatcttgaatgctttgctgcttagaaatttcttctgccggataccctaggtcatcactctcaagttcaaacttccataggtccctaaggcatgaacacagtatagccaagttctttgttaaggcataacaagggtgacctttactccagtttccaataactttctcattttcacatgagacctcatcaacctggtgctcatagcccatatttttatcagcgttttggttacaatcatttaaccagtctctaagaaggtgcaaactttcccttcatcttcctgtcttcttctgagtcctgtaaactcttcaaacctctgcctgttaccaagttccaaagtcacttccatattttcagtatctttatagcaatgtcccactctcagtaccaattttctattggtactattttctgttggtaccaattttctattcttcattgtgtagccatgaagaaatgcttgagactgggtaactggtaaataaaagaggtttaattgatgcaagattttgcaggctgcacaagcacggtgctggcatctgttcatattgtggggaagcctcagggagcacttactcatggcagaaggtgaggcaggagcacatcacatgacaaaagcaggagaaagagagagtcgatgggggtggtctgcacacttaaacaaccatatcttgtgaatactcaccgactactgcaaggacagcaccaagctgtgagggatccaccgctatgatccaaacacctcccatcaggccccacctccaacattgtgtattatatttcaacatgagatttgggtggggacaaatatccaaactataacacttactgaactgtgagttaacattttcatttgtcacatttggaatttttttccagttatgtgaatcagtttgtgccatttcatggacctctcagcaattttttatttgtaggtcatatccagttgcacttaaacatactctttttgggaaaataccaaaaaccacagtgagaaatgaaacttccctttattgctaattctatagaaaatgctcttagtagttttgtgtgcatcattttcattttctgaaattattttatgtatatgcagatatctaatgtatattctcacacctattttgttaaaataaattctagtagcaggctgaacatattgttctttactttgcatttttaatttgccaataaattatagacatctttagaggctgatgcagactgatttgacaagttcttttagtaattgcataaaagtctttactttggatttaatgtagttttttcaaccaattaatgttgagatagatttaggcattttccaaatttgtctttgtgcacattactgtgtaaacactctttaatactttctttacattactatatttccatattcgtagcctctgatgaattcttcatcatgtggatccccagcagctttacttctctcattgaaccctgactgctatagaatggaagtagtggctgtggcaaagtagtaccttgtacactttttgacttgaaatacaggaggcagaagcaataggaatgagggtagaggctagaccatagctctactggagtttctgcaggaaaggcaagatagggcaggagaaacagtttagcattggttggtttgaataatttcagtgggctctgagctctaagggcaggccttttgctatctgtaataattggctgacccagggaggtgcactgcatccctaccagatagggatttttaagatgtgaaaatatcataatatacagaaaattaaacaatacacacaatacaggaagtattttattcttatggataaatacccaacagtggaatagctgtgacttatggtaggtgtatggttacctttttgagaatttgccagacaacatttacaagcggccagaccaaggtgccctcccaccacaagcatatgagaggtccagctgttcacactcaccaacactggatgtcttagtccgtttgcattgcgataaaggaatacctgaggttggttaatttaggaagaatacatgtttatttggcttgtggttcattcagggtacaagaagtatgacaccagcacccacatctggcgagagactcaggctgctgccactcatggcagaaggtgagggtggagggtgctgatcacatggctagagagaagcaagagaaaaaggaggcaggtgccaggctctttttaataatcaggtcttgctgaaatgaatagatgggaagttcactccttactgggagggggcactaggtcattcatcagggatccacccaaacacctcccactaagccccactttcaacattagagatcaaatttcaacacttgatttgggagggacagataactcagctatatcatctgatatggtcagtctttttcattgcaactattttaatgggatatggattaaacctcagttttagtttgatttccctaatcattaattatgttgaacatccttacatgtgcctgtttgccgtctgtgtaccttctttggttactgtcttttgaaatctttgctcatgaaaaaacatagatgtctttttaaaaatagactttttattttacaataaatttagatttaaagcaacggtgcaaaaaacagcactgagaattcccatatatcctttgccagtttcccctattgataaatcttggattactatgcacatttatcacaactcattaaccaacactgacatattatgatgaactaaggtctatgttttcttcagatgtcattaattttcacctaatgtccttgttcttttctgggatcccatccaggataccacatgacatttgctcatcacatttgtttgatctcctctagcctgtgacagtttttcagactttccttggtttttttttttttttttttttttttgagatggagtcttgctctgtcgcccaggctggagtgcagtggcgcagtctcggctcactgcaagttccgcctcctggcttcatgccattctctggcccagcctcccgagtagctgggactacaggcgcccgccactgcgcccggctaattttttttgtatttttagtagagacggggtttcaccatggtctcgatctcctgaccttgtgatccgccggcctcggcctcccaaagtgctgggattacaggcgtgagcaaccgcttccagccttccttagttttgatagcagtttgtttactggcactgcttcttctatggcttctttagtacctggtacagattcaaaagcaccaatctccttcaagtcatcttctgctgattcctctggtgtggtgtctattcgttcttgaatttttcacagatccatatcttgaaagaccatatcccccaacttttgttgctgaattagagatgttgggtttgcaggcaggtagaccactttgaaaccttcagtgttgaactcgtgggttctgggcggctaggggcattgtccaaaatcaaaagaactttcaaagacagtctcttactggcaagacaaagcaatgtagaaccaatccagaagaagtgttcttgtcgaggctttcttgtacaacaaaaaagctggtagtgggtattgatcttttcccttcaaggtgtggaggctagcaggtttatagatgcgggcagtcctatttgtaaatccaatggcatttacacaaagcagtagagttagtttatcccttcttgccctgaatccttgtgtttgcctctcttccttagattagggttacggttagtagcctgcagaaacaatcttgaatagaagcggtaacagcccctcagtccttggcatgatctgaggagtgagcattcagtctttcactattaaagatgatgttagctgtgggttcctccaagatgcccttcattagtttaagatacttccctttttttcccctagtttgttgagaattttttttttatcagaaatggattttggatttttgtcaaacactttttccatacctattgaggtaattatatgcttatacatttttagtttatttatatggtatgttactttaaatgatttataaaaattatttattttatcattaattgtggtgaaatacacatagcataagatatatcatcttcaccactttaggtgcacagttcagtattgagtacattcacgttgctgtgcaaccaacaccaccattcatctccagaactctcttcatcttcccaaactgaaactttggaccccttaaaaaataattctctgctccccccacctctcagcccttgtcaacaagcattcaactcttttattctatgaatttgactattttagatacctcatataagtagaatcataaagcatttgtcgttttgtgactagcttagttcactctgcacaatgtccttaaagttcattcatgttagcatatgtcagaattttcttcctttctaaggctaataatattgcattccgtatatatacaccacatttttgcttgggttgtttccacttacaggctgggctcttgtgagttatgttgctatgaacatagtggtaccatgtcaaaccagccttgcattcctaggataaaccccatttggttatggtgtataattttttttatgtagtaactattttaaaatattacagaatttgacttaataatattttgtttaaaatttttgaatctaaggccatgaaggtctgtaatttttttatctcataatatctttgtctggttttggtactgtgataatgctggtcccataaaatgtattaggaaatcccctaggcttcagtttttgggactagtttgtgaataattggtattatttgttccttcaatgtttgctggattcattagtgatgtcatctgagcttcactttgtttcgtgtgggaaggtttgaattacaaatacaaattcaattcgacagatacaggttagttctattggggttatgtatttattcttgtgaatagtctagcagtttgtctctttaacaaaatgtgcccatttcatctaagttgtagattttttgggcataaatttgttcatgatattctcttagcattttaatatctgtagaatctatggtgataccacctctctcattcctgatattgataatttatttcttctctcttttttttttcagatcaaggtggctagagctttaccaaattaattgatctcaacaaaccagctttggtttcattaattttctcaacaaaccagctttggtttaattaattttgccattttttaaacgcattttccatttcattgatttctattctgaagtaagcctccagggaaggtagatcactgaccgtcatgtttatttttcaaggacagtcatctgcaagtgccccagtcaccaaaagaaaagatgactaagcaaatgtctagtaccagttagggtgtcctgaaaggagccatcttgtactcctacaaggattataccccgaggttgtttgtggaatctctcactaaatgttctttaaggtgttgcctgacacacactgcttagctcgtccatgaaggtatcaagaaaacctgcagaatataattctgtccagtgcaacaaatattacggttgattttctttgtgcaaggctgtatttgtctgtttggattgctgtaaaggatacctgaggctgggtaatttataaagaaaaaaggtttaattggctcacagttttgcagcctttatacgaaacacagtgctagcatctgcttctggtgaggcctcaggaagcttacaatcatgacagaaggtgatggggagctggtgtgtcacatggcaagagcaggagcaagagagagacaggagagatggcacatactttctttttaattttaatttttatttctggggtacatgtggaagatgttcaggtttgttacataggtaaacatatgccctggtgccacatgcattttttttttcctgctcttacacttttctttctttttaaatgctttaagttctgggatatatgtgcagaacattgttacacaggtatacacgtgccatggtggtttgctacacccatcaacctgacatctacattaggtgtttctcctaagctatccctcccctagacccccccaccccccgacaggccctggtgtgcgatgttcccctccctgtgtccatgcgttctcattgttcaactccaacttatgtgtgagagcatgcggtgtttggttttgtgttcctgtgttagtttgctgagaattatggtttccagcttcatccatgtttctgcaaaggacatgaactcatccttttttatggctgcatagtattccatgttgtatatgtgccacattttctttatccagtctatcattgatgggcatttgagttggttccacatccttgctgttgcgaatagtgttgcaataaacacacgtgtgcatgcgtctttatagtagaataatttataagccctttggtatatacccagtaatgggattgctgtgtcaaatgatatttctggttctagatccttgaggaatcgccacactgtgttccacaatggttgaactaatttacactcctaccaacagtgtaaaagtgttcctatttctccacatcctctccagcatctgttctttcctgagttttaatgatcgccattctaactggcatgagatggtatctcattgtggatttgatttgcatttctctaatgaccagtgatgatgagctgtttttgatatgtttgctggtcatataaatgtcttcttttgtgaagtgtctgttcatatcctttgcgcactttttgatggggttgtttttttcttgtaaattggtttaagttccttttagattctggatattagccctttgtcagatggataggttgcaaaacttttctccaattctttaagttgcctgttccatctgatgatagtttcttttgctgtgcagaagctctttggtttaattagatcccatttgtcaattttggcttttggttgccattgcttttggtgttttagttatgaagtctttgcccatgcctatgtcctgaatggttattgcctaggttttcttctagggttttcatggttttaggtcttatgtttaaggctttaatccatcttgagttaatttttgtataaggtgtaaggaaggggtccagattcagttttctacaaatggctagccagttttcccaacaccatttattaaatagggaatcgtttccccatttcttgtttttgtcaggtttgtcaaaggtcagatggttgtagatgtgtggcataatttctgaggcctctgttctgttccattggtctatatatctgtttgggtacaagtaccatgctgttttggttactgtagtcttgtagtatagtttgaagtcaagtagcgtgatgcctccagctttgttctttttgcttaggattgtcttggctatactggctcttttttagttccatatgaactttaaagtagtttttttccaattctgtgaagaaattcaatggtagcttgatggggatagcattgaatgtataaattaccttggacagtatgaccattttcacgatattgattcttcctatccatgagcgtggaatgtttttccatttgtttgtgtcctcccttatttacttgagcagtggtttgtagttttccttgaagaggtccttcccatcccttgtaagttgtattcctaggtattttattctctttgtagcaattgtgaatgggagtttactcatgatttggctctgtttttctgttattggtgtataggaatgcctgtgatttttgcacattgatttttgtatcttgagacttttctgaagttgcttatcagcttaaggagattttgggctgagatgatggggttttctaaatatacaatcatgtcatctgcaaacagagacaatttgacttcctctcttcctatttgaatccctatattgctttctcttgcctgattaccttggccagaacttccaatactatgttgaataggagtggtgagagagggcatccttatcttgtgccagttttcaaagggaatgcttccagcttttgcccattcagtatgatattggctgtgtgtttgtcataaaatactcctattattttgagatatgttcaatcaatacctggtttattgagaggttttagcatgaagggctgttgaattttgttgaaggtcttttctgcatctatgaggataatcatgtgttttttgtcattggttctgtttatgtaatggattacgtttattgatttgcatatgttggactagccttgcattccagagatgaagccaacttcatcatggtggataagcttgttgatgtgttgctggatttggtttggcagtattttattgaggattttcaccattgatgttcatcagggatagtggtctgaacttttttgttgttgttgttgtgtctctgccaggttttggtatcaagatgatgctggcctcataaaatgagttatggaggagtctctgtttttctattgttgggaatagtttcagaaggaatggaaccagctcctttttgtacctctggtagaattaggctgtgaatccatctggtcctgggctttttttggttggtaggctattaattactgcctcaatttcagaacctgttattggtttagtcagggattcgacttcttcctggtttagccttgggagggtgtatgagtccgggaatttatccatttctccaagattttttagtttatttgcatagaggtgtttatagtattctctgatggtagtttgtatttctctcggatcagtggtgatctcccttttatcattttttattgtgtctatttgattcttctctcttttcttctgtattagtctggctagtggtctatctattttgttaatcttttcaaaaaaccagctcctggattcattgattttttgaaaatattttgtgtctctatcttcttcagttctgctctgatcttagttttttcttgtcttctgctagcttttgaatttgtttgctcttgcttctctagttcttttaattgtgatgttagggttttgattttagatctttcctgctttctcctgtgggcatttagtgctataaatttccctctaaacactgctttagccatgtcccagagattctggtacgttgtgtctttgttctcattggtttcaaagagcttatttatttctgccttaatttcattatttacccagtagttattcaggagcaagttgctcagtttccatgcagttgtgtggttatgagtgagtttcttaatcctgagttctaatttgattgctctgtggtctgagagactgttttacttccaattatgtggtcaattttagaataagtgcagtgtggtgatgagaagaatgtatattctgttgatttggggtggagaattctgtagatgtctagtaggtctgcttgatccagagctgagttcaggtcctcaatatccttgctacttttctgtctcattgatctatctaatattgacagtggggtgttaaagtcttccactgttattgtatgggagtctaagtctctttgtaggtctgtaagaacttgctttatgaatctgggtgctcctgtattgggtgcatatgtacttaggatgggtagcacttcttgttgcattgatctctttaccattatgtaatgcccttctttgtcttttttgatctttgttcatttaaagtctattttatcagagactaggattgcaacccctgctttttttttctttccatttgcttggtaaatattcctccctccctttattttgagcctatgtgtgtcttgcacgtgagatgggtctcctgagtgcagcacaccgatgggtcttgactgtttatccaatttgccagtctgtgtcttttaattggggcatttagcccatttacatttagggttaatattgttatgtgtgaatttgatcctgtcattatgatgctagctggttatattgcccactagttgatgcagtttctttatagtgtcaattgtccttacaactgggtatgtttttgcagtggctggtactcatttttcctttccatatttagtgcttccttcaggagctcttgtttaaggcaggcctggtggtgacaaaatctctcagcatttgctggtctgtaaaggattttatttctccttcacttatgaagcttagtttggctggatatgaaattctgggttgaaaattcttttctttaagaatgttgaatattggcccccactgtcttctggcttgtggggtttctgcagagatatctgcttttagtctgatgggttacctttgtgggtaaccagacctttctctctggttgcccttaacattttttccttcattttaaccttaatgaatctgatgattctgtgtcttggggttgcttttctcgaggagtgtctttgtggtgttctctgtttttcctgaatttgaatgttggcctgtcttgctagcctggagaagttctcctggataatatcctaaagagtgtttttggtacatacgtttaaacaaccagatctcctgagaaatcactcactattgggaggacagtgccaagccattcatgagggaaccatgcccatgatccaaacatctcccaccatgcttcaccttcaactctggggattatatttgaccatgatatatggaggggacaaacatacaaattatatcaaaggcatagcatggctactgtgaaaggagggtaaaaacacaaagatgacatcaccactgacctcagggagtgcccagtagactgagggagacaagtacatattttcctgaaggagggcactggattgatggcatgtttagaatgtggaagtagagcggccacagaaaggcagcccggcagagtgctcgcacaaagactgggctagagactccccactgcatgtgatgtatctgaggaaagtcattaaaataggtgatggtcactttccatcaagtccctggtatggtccatggaggcagggttgtcaatgtcatttcggcatttcagaggcctctcagggtttggatatggcagaagacaaccagcaatgattatgcattgcagagatgcaggtgagccccaatttcttgccagctgggaagtcggtgctaaggggccttgctgtctttccttggaacataggataccaatttctttctggacagagagtatttggttggctaaagttaaaatctaaattttgctttgggatgaattccaaaaatattagctttattcaaatttactttcactttatctttctgaatcttcaaggtcctaaagcattgcttagtaattttgtttctaaactcacgttacagcactgggcatgatctgtccaaggcagagactataagctactcttatagtactcttatgagatacatacaagtaggtatctcaaaaaatgatactcatgtattcctgttcttatgagtaaatcattggcagtgagtgtgattttttttttttttatgacaggataaatacacgccctctattggggtcaggttttgtgcctgtagttcttccgcctactgtatcatagcagcttagaatcccagctgctggctcgggctgcagttctctcatggctcgcacagggtggaccagccccattcccctatgtgtttctctgctgctgacctgtggctttgctgaggcagggaagctgctggtagtgcccatggatgggagtcactggttcaccatgcagtcggtggtggagaaacttatcctcagggggcatgaggtggttgtagtcatgccagaggtgagttggcaactgggaaaatcactgaattgcacagtgaagacttactcaacctcatacactctggaggatctggaccgggaattcatggatttcgccgatgctcaatggaaagcacaagtacgaagtttgttttctctatttctgagttcatccaatggtttttttaacttatttttttcgcattgcaggagtttgtttaatgaccgaaaattagtagaatacttaaaggagagttcttttgatgcggtgtttcttgatccttttgatgcctgtggcttaattgttgccaaatatttctccctcccctctgtggtcttcgccaggggaatagcttgccactatcttgaagaaggtgcacagtgccctgctcctctttcctatgtccccagaattctcttagggttctcagatgccatgactttcaaggagagagtacggaaccacatcatgcacttggaggaacatttattttgccagtatttttccaaaaatgccctagaaatagcctctgaaattctccaaacacctgtcacagcatatgatctctacagccacacatcaatttggttgttgcgaacagactttgttttggactatcccaaacccgtgatgcccaatatgatcttcattggtggtatcaactgccatcagggaaagccattgcctatggtaagtcacctctcctttagcacattaggaataatctggctttggaaattaaaaaaagattccttactgaattgtgatttgacattttcatttgttgcatttcaaatttctttccagtttaacagattattttgtgccaatttatgtactcatcagttatcaaattttataaaactgcccttcttgaaggtgtgtgtatataatttaaaaattgtagatcgtattcagcttacatttttgagtaccatgtttagaaaagtaccaaaaaccacagtaagaaattgaactttccttttttgctaattctatgtgaccccctagagcaaatgctcttagcagttttgcatacattcttttcattaaaaaaagtattttaggtgtatatatttaatttaaaaattatagatcatatttagcccacgtttttgagtaccgtgtttagaaaagtaccaaaaaccacagcaagaaatgaaactcccctttttcctaagttttctgacccctagaggaaatgctcttatcagttttgtgtatattcttttcagtataaaaaaagtttcatttatatgcaatatctaatgtaaattctcatacctattttgttaaaataaacttttatgctgtgctggacatattcttctttaccttgcattttttatttgccaataaattgtagattcctttatacaccaatacagacagatttgacaagttcttttcataattgcataaaagtctttactttggatgctatgtagttttttaaaccaattaatattgatatatgtttaggcattttccatttttgcttttatgaataaggctgtgtaaacattctttaataatttccttgtgtgaatatatttctatattcttgcttttatcttagtagactagagtcctacatgtagggttagagggttttcctgaattgagaagattggcatctttttgctattatatcttcctgttcaggaatatgtgtgtctcactatttattcaggtcttgttttatatacataaataaaaattttcactatataagcatttatgtttgttattaacatttattccttggcattttatgatttttgaaactatttttttacagggtaatttttccatttctacaattaactgactattggtaattaaagttttggtttttgcgtatgtatcttgtatccagccacattactaacttttcttattattttgtagtatgcattagatgtacaatatgcaataccatctgcaagtaattcccttctctgatatttatactgcttcttttgctttgctggagcatatacttccaaaacattattgagtaatattgttagagtagccagtttaaatagggatttggtagcttgtgactgaaaaatccttgaaaaataccagaataagattcttggcaaacgcatagttgctaaatccagatgaaacacctggtgtctcatctcattatattattttattagggatggagtatacatttttgtctattgttctggcttcttataaggttcagtagactttgtaacagtcatatctgtcattggcagatggttggtgaaagagtgaccgttcagccatctcacaggaaagtgaaataatgctctttctaaaaagcaggaagactacagttgtaggcctttcaaaattaggcatgactttcagctcacggcaagatcaggtgaagagatgcaagttgcaggactctaagaggttggacgtatcaaagcacttttctcctcattatcctccattaattacagtaccaagcaccacccatgtgttgcctgcaccctacaccctttggccgagtgtgaggctctgccacttcctgaacccacactgagtttattgtggcccaaggggtcacccagaggcctttagagatataaaaaagtatatatgattttatatcacctacgatagggagatatccataaaaaaaggaaacattaaactctacatggtttcagttattttgattataaatcttttatgagatatgaaataaatgtgtttctatatctattaaagaatatatatgtatgaaagtttttatacttgcagaaggttatgtgtattaatgtatatatttatgattatatgcataaagccagcagaattctcacagaggaattcagatctgaaagagggctttctgtcaaagagccttggatatggcccaaccacaaaagtaaaagtcaactgtcatcgaaagaaggatggacactgcgtattgctccttccttgtttcagatgccaggatatgtctgggaaaagcatgcagttggttacatcttgctgggaaacaagattcagagtgtgagtctcatctgcctgatgagaaggaagcattacttagtgatagagtatgtgtttgcacatgtatgtgtttgtgtatgtgcaggtgtgtttgcgtgcagtgtcccagaccctgcacaggggatttcttgaagatctcctgtaacaaaatctccttgagtctatccaggagaattacatccagggatgtaattaaatactttaacaaagatggcagatggccccatctccaacgtcagggatcaaatttcaacgtgagatttggaggggataaacttttaaactttatcttttggtatggtcattgttttacatttcagtattccaatgtgtgtgtgttgattaaagatgtgtaaataattcagcagaacagcgaaatagttttaatgagaaaaagaggaagtcactcctagtctctttgaatttttggtgagttccaacagaattgatgactggttttaggtgaaaagaattcgggcttcgtctataccatccatggtaggttcagctctgcagacctggggatggaatatggttacagagcaagaaaagatctgtgcttcccccattcctctaagtttctggctccagtttaagatccaaattcaaagttagcttttggtggacaagactaaggcctcccactaaaattgtttacttcaagtatttattttcaaagttttccaacctatacaaaggagagacttagtgtcatgaccacccatatatcaatcttaggttaaataattttcactattttgctgaactgattcatctatcccttttttctgtctttttaaagaaaacttttaaagagaaatttgtgtcaatctttttttaaattatactttaagttctagggtacatgtgcacaacgtaaaggtttgttacataggtacacatgtgtcatgttggtttgctgcacccatcaactgatcatttacattaggtatttctcctaatgctatcccttcctcagccccccaccccatgacaggccccagtgtgcgatgttcccctccctgtatccatgagttctcattgttcaactcctacttacgagtgagaatatgcactgtttgattttctgtccttgtgatagtttgctgagaacgatagtttccaacttcatctatgtccctgcaaaggacatgaactcatccttttttatggctgcatagtattccatggtgtatatgtgccacattttcttaatccagtctatcattgatgaacatttcggttggttccaagtctttgctgttgtgaatagtgctgcaataaacatacgtgtgcatgtgtctttatagtaccatgatttataattctttgggtatatacccagtaatgggatcactgggtcaaatggtatttctagttctagatccttgaggaattgccacactgtcttccacaatggttgaactaatttacactcccaccaacagggtaaaagcgttcctatttctccacatcctctccagcatctgttctttcctgagtttttaatgatcgccattctaattggcatgagatgatatctcattgtggttttgatttgcatttctgtgatgaccagtgatgatgagcattttttcatatgtctgttggctgcataaatgtcttcttttgagaagtgcctgttcatatcctttgcccacttttgatggggttgttttattcttgtaaatttttttgagttctttgtagattctggatatgagccctttgtcaggtggatagattgcaaaaatgttctcccatttcataggttgccttttcactctgatgatagtttcttttgctgtgcagaagctctttggtttaattagatcccatttgtcaattttggcttttgttgccattgcttttggtgttttagtcatgaagtctttgcccatgcctatgtcctgaatggtattgcctaggttttcttctagggtttttatggttttaggtcttacatttaaatctttaatccatcttgagttaatttttctataaggtgtaagaagggatccagtttcagctttctacatatggctagccagttttcccagcaccatttattaaataaggaatattttccccatttcttgtttttgtcaggtttgtcaaagatcagaaggttgtagatatgtggtgttattcctgagacctctgttctgttccattggtctatatatctgtctgggtaccaatacgatgctgttttggttactgtagccttgtgatttagtttgaagtcaggtagcatgatgcctccagctttgttctttttgcttaggattgtcttggctatatgggctcttttttagttccatatgaaatttaaagtagttttttccaattctgtgaagaaagtcaatggtggcttgatggggatagcattgaatctataaattaccttgggcagtatggccatttttgtgatattgattcttcctatccatgagcatggaatgttcttccatttctttgtgtcctcttttattttgttgaacagtggtttgtagttctccttgaagaggtcttcgcatcctttgtaagttggattcctaggtgttttattctctttgtagtaattgtgaatgccatctagtcattttaaaaagaaattcttggcatgtcattccatcaccgaatacttaattaaatataaaaaataagaaacatttgttacatagccacaatatcattatcatatctatgacagtaaaaattttttaatattatctcatttccagttcataattaaatttcccccattttcttgaacaacatctttccatgtagatcaatggaatagaatggagaattcagaaataaacccatacgttcttggccaattgacaagatgtcaaattttgataagggtgtcaagatcattcaaatgggaaagaatagtctcttcaacagaagacccaccctggggtccttaatctccagcatcagactccaagaccatttgcagagatcatccagacagctcccatcatgcctctgatgaatccttcaccatgtgcatccacaggggtcctgcaaatattttctcacagtccgttgagtgacttttcttacaaatactttattttagaataaatagaggtttatagcaaggttgcaacaaatagttcagagaattcttatctaccctgtacccggtttcccccattgttaaatgttatgtttctatggcacatccatcacaactcattcaccaatatgacacattatgatgagctaaagtctgtttccttcagatttcattgatttttacttaatatccctgttcttttatgggatcccattgataccacctgaaatgtagtcatcatgtctccttagtctcctccagcctgtgacagtttctcagactttccttgtttttggtgacttgggcagttttgagcagtcctggtcaggtgtcctgtagaatgttcctctagaatgtcagtgtgtgtttgcctgacatttttatcatggttaaactggggttataggtttttagtaggaagatgcggaggtcttttcttgttttcttgcatgtgaatattcaactgtagaaaagagtggcctttcctccaatgcacttcttgtacctttgtaaaaacttggctgttcatacatctgtgcatgtatttctagactttgtattctgctccattgaaatatttgtgaaatatttgattactatagctgtgtaataatcttgaaatgaggtagtgttacctatttttttcaaattgtttttgctattgtaggtctgctacattaccacatggattttagaataagtttgttagtttgattttgattgggattgtattgaatttatagatcaactggggagaaacaacatcttagcaattttgaattttccaattcattaacatatctatgttaagtgcctcatcagtgttctgtagttttcagtgtacagtctttcataatttttgtcagatatattcctaagtatttcatgtttttgatgctatttaagtgatatttttattccaatttttaattgttcattgctagtatagttgacccctgaacaatgtgggaatgaaggggaccaacccgtgtgaagtagaaaatccacacagatcttttgattctcgaaaaacataactactaacaaccatttaccaaaagccttaccaatagtataaacagtcaattaacacatattttggatgttattagtattatatcctgtattattacaataaagcaaactagagaaaggaaaatgttatttaaaaacataacatatgaaaaaatgcccaacatcactaatcatcagagaaatgaaagtcaaaaccacaatgagatatcatctcacaccagttagaatggctgttattaaaaagtcaagaaacaatagatgcttgtgaagctgctgagaaaaaggaccacttgtacactgttggtggtgggaacgcaaattagatcatcccctgtgggaagtagtttggagatttgacaaagaagttaaaacagaactgtcattcgacccagcaatctcattacattactggatatatatattaaaaaaatcattttaccaagaaacacatgcactggtatgttcattgcagctctattcagaatagaaaaggcatgaaatcaacctaggtgcctgtcaatagtggattggatgaagaaaatgtggtacatatacaccatggaatatgcagtcataaaaaaagaatgaaatcatgtcctttgtaacaacatggatgcagctggaggtcattatcctaagggaatatatacaggcacagaacaccaaataccatgtgttctcacttagaagtgggagctaaatagtgggtactcatgggcataaagatggcaacaatagacactatggactactaaaggggagaggaagggatgcaggagttgaaaaactattgggtaatatgctcagtacttgggtgatgggagcaatcatgccccaaacatcagcatcacacaatatactcaggtaacctgcacatgtactcctgaatctaaaataaaagttgagtatgtataagaggaagtcattcatcataaaggtctccatcctcatcatcttccattgagtgggctgtggaggaggaggagtagatgttggtcttactgtcttagggtggcagaagcagaagaggtagaggaggtggaagtggaggcaggagaggcaggtgcacttggtgtaaatttatggaaatacatcataattactgtctgtttttttctctttgatgtatttaaaaatgcttttatacagtactaatccttcttccccatttgctttagtttcagtgcccataagggttcatgttgtaatagaagtcaatagcagtcttaaataactggaagcctttccatgaggcttgtattgtgtaaggccattttttttttctggcactgcttcttctacatcttctttctcatcaagtagtgattggaaagcactaatctctatcaggtcatctattaattcctcgagtgtggtgtctattgactcttgaatttctccaagattcatattttgaaacactttatcccccaccttatgttgctgtatccataatccctttcatgacttccttgattggctctgtcttaaatcctgtgaagtcattcgcaacatctggtcacagttttctccagaagaaatgaattgtttggggcttggtggctttcacagctctgtctataacaacaatggcatcttcaatggtgtaatccttctggactttcatgacattctctatccagattctctttcctagtattgacaatcttttccatagaaaactgtgtgtaatgagttctaaagttccttatgacccctgattgagagactgaattagagatgttgggtttggaagcaggtagaccactttgacaccttcagtgttgaactcatggattctgggtggctagcattgtccaatatcaaaagaattttaaaagacagtcccttactggcaatgcattttctgccttcagggacaaagcgttgatggaaccaatccagaaaaagtgttcttgttgtctaggccttcttgttgtacaaccaaaaaactgtcagtgggtgttgatcttgtcccctcaaggcttaaggtttggcagttctacacatgaggtcagtcctgagtgtaaacttgactgcatttacacaaaacagtagagttagcctatcccttcctgccttgcattctggtgcttggtttacttccttgctaataaatgtcttttgtgtcatcttgtttttgtttttgtttttttccagaatagggcactgtcatctgtattaaaaccctgttcaggcagatatgctttcccctcaataattatcttcatggcatctgggaactcatttgtctccttttgcttggcagaggctgcttctcctgttatcttgacaattttaaagctgaacccctttctaaaactagcaaaccatcctttgctgccattaaattttccagttttagattcttcacctctcttttgctttaagttgtcatataatgactttgcattttctcaaatcacattggcatctataaatacgcctttcttatagcaatgctacacccacgttaaagctgcattttcaatatgagacaaaaacgtatttcagaaaaaaatgcaaggtttggctcctgctggcatagctgcagcaatgtcttcatgaatctcccttccttccttcctttcttccttccttccttccttccttccttccttccttccttccttccttccttccttctttctttctttcttttccactggtccttatctagcttcatttattttgaaatggcaggcattcaccacggtagagctcagcctatggtcccaatcaagcaattcgacttttttggttatgtcatgatttctttttgcttcttgggagtaattccagcatcattaggggcactctgtagtcccatgactgtattcaagatttacaatattgcaccaaacatgatgaaaaatacagtagagccatgagagatcactttttactctgacatgcaatttattggagagatgaaatgctcaaacagagagtataaatgttatatcacatgcacttaagccacacttcagctcactggaatagcaacaggaggtagctacaaaattattacagtagtgtagtatatactataggtaattttatgcagttaagatttaatgctgcctctatatgtttgtatttctttcctgtgctaatgatgcaatgtacactttggaaatgtttgtgtgtggtttaataaattttttattgatttgtgcatattttaaagtaataaataataacatggtatctgcacatggtttctgcagtcatggcatagctttaaaaatttttagatatttctagtttatgtggtttatatatatattttttcaaactgttagaaatttcttaaaatttttgcaatatatttatttttaaaaatctgcatataagtggatccacacagctcaaaaccctactgttcaatgtcaactgtatatagaaagaagattagtttttaagtattgtatcttgcaaccatgctaaacttacgtatttgttctaggagatttttgtagtttgttattattcctacatagataaacttattgtctgtgaatgagaccttttttattttttctttacaatctggacactttttacttctatttcctccctgactgcactggctggaacctgaagaacaatgttgagtagaagtggggagggcccctgtcctcggcatgtgtttgccttgaggagtggagcattcagtctttcaccatcaaggatgatattaactgtgggtgcctccaagatgtccttcattagtttaagatacttccctttattttccgagtttgttgagaattttttatcacaaatcgattttggatttttgtcaaacactttttccatacctattgagataattatatgcttatacttttttagtttatttatatggtatgttactttaattgatttataaaattatttatttaatcattaattgtggtgaaaacacatagcataaaatatatcatcttcatcactttaggtgcacagttcagtattgagtacgttcacattgctgtgcaaccaacaccaccattcatctctagaactcgcttcatcttcccaaactgaaactttggacccattaaaaaagaatactccattcccccctcctctcagcccttgccaaccagcattccactcttttattctacgtatctgactattttagatacttcatataagtagaatcatacagcatttgtcattttgtgattagcttagttcactctgcacaatgcccttaagtttcattcatgttagcatatgtcagaattttcttcctttctaagggtgaataatatttcatgctgtatacatacaccacatttttgcttgggttgtttccacttcttgtctgttgtgagttatgctgctatgaacatggtggcacaaccttgattaattttctaatgtcaaaccagccttgcattcctaggataaaccccacttggttatggtgtctaatctttttgtgtagtacctattttaaaatattacagactttgacttgccaatattttgtttaaaatttttgcatctaagctcatgagggtctgtaattttcctatcttttaatgtctttttctggttttggtactgtgataatgctggtctcataaaatgaattaggaaatcccctaggcttcagtttttgggactagtttgtgaataattggtattatttattcttcaatgtttgctggattcatcagtgttgtcatctgagcttcactttgttttgtgtgggaaggtttgaattacaaatacaaattcaatttaaaagatacaggttacttctattggggttatgcatttattcttgtgacaagtctggcagtttgtgtctttaacaaaatgtgtccattctatctaagttgtagacttttttttggcataaacttgttcatgttattctcttaacattttaacatctgtagaatctatggtgataccacctctctcattcctaatattgataatttctttcttctctctttttttttcagatcaaggtggctagagctttaccaaattaattgatctcaacaaatcagctttggtttcattaattttctcaacaaaccagctttggtttcattaattttgcctgttttttaaatgcattttccatttcattgatttctgttctgaagtaagcctccaggggaggtagatcactgaccatcatgtttatttttcaaggacagtcatctgcaagtgccccagtcaccaaaagaaaaggtgactaagcaaatgtctagtaccagttagggtgtcccgaaaggagccatcttgtgctcctacaaggattataccccgaggttgtctgcagaatctctcactaaatgttccttaaggtgttgcctgacacacactgcttagctcatccatgaaggtatcaagaaaacctgcagaatataattctgtccagtgcaacaaatattctggttgattttctttgtgcagggctgcatttgtctgtttggattgctgtaaaggatacctgaggctgggtaatttataaagaaaagaggtttaattggctcacagtttggcagactttatatgaaacatggtgctagcatctgcttctggtgaggcctcaggaagcttacaatcatgacagaaggtgatggagagctggcatgtcacatggcaagagcaggagcaagagagagacaggggagatggcacatacttttttattttaatttttatttttatttctggggtacatgtggaagatgttcaggtttgttacataggtaaacatatgccatggtagcacatacttttttttttttcctgctctaaaactctttttttttttttatactttaagttctaggatacatgtgcagaacatgcaggtttgttacataggtatacacgtgccatggtggtttgctgcacccatcattccttcatctacattaggtatttctcctaatgctttccctcccctaggccctcaccccccgacaggccctggtgtgtgatgttcccctccctgtgtccatgtgttctcattgtccaactcctacttgcaactccaactccaacatgcagtgttttgttctctgttcttgtgttagtttgctaagaatgatagtttccagcttcatccatgtccctgcaaaagacatgaatgcatcctttttaatggctgcatagtattccatggtgtatatgtgccacattttctttatccaggctatcattgatgggcatttgagttggttccaagtctttgctattgtgaatagtgctgcaataaaatacatgtgcatgtgctttataatagaatgatttataatcctttgggtatatacctagtaatgggattgctgggtcaaatggtatttctggttctagatccttgatgaatcgccacactgtcttccacaatggttgaactaatttacactcccaccaacagcataaaagcgttcctatttctccacatcctctccagcatacgttctttcctgagttttaatgattgccattctaactggcatgagatggtatctcattgtggttttgatttgcatttctctaatgaccagtgatgatcggctttttttgatatgcttgttggttgtataaatgtcttcttttgtgaagtgtctgttcatatccttcgaccgctttttgatggggtttttttttcttgtaaattggtttaagttccttgtagattcaggatattagccctttgtcagatggatagattgcaaaatttttctcccattctgtaagttgcctgttcagtctgatgatagtttcttttgctgtgcagaagctgtttagtttaattagatcccatttctcaattttggcttttggttgtcattgcttttggtgttttagttatgaagtctttgcccatgcctatttcctgaatggtattgcctaggtttttttctagagttttcatggttttaggtcttatgtttaagtctttaatccatcttgagttaatttttgtataaggtgtaaggaaggggtccagattcagttttctacatatggctagccagttttcccaacaccatttattacataggaaatccttgccccatttcttgtttttgtcaggtttgtcaaaggtcagatggttgtagatgtgtggcataatttctgaggcctctgttcagttccattggtctatatatctgtttgggtacaagtaccatgctgtttttgttactgtagccttgtagtataatttgaagtcaggtagcatgatgcctccagctttgttctttttgcttaggattgtcttggatatacaggctattttttagctccgtatgaactttaaagtagttttttcctattctgtgaagaaagtcaatggtagcttgatgtggatagcattcaatctataaattaccttcagcagtacggccattttcacaatattgattcttcctatccatgagcatggaatgattttccatttgtttgtgtcctctcttatttacttgagcagtggtttgtagttctccttgaagaggtctttcccatcccttgtaagttgtattcctaggtattttattctttttgtagcaattgtgaatgggagtttacaatttggctctctgtttttccattattggtgtataggaatgcttgtgatttttgcatattgattttgtaacctgagacttttctgaagttgcttatcagcttaaggagtttttggactgagatgatggggttttctaaatatacaatcatgtcatctgcaaacagagacaatttgactttctctcttcctatttgaataccctgtatttctttctcttgcttgattgccctggccagaacttccaatactatgttgaataggagtggtgagagagggcatccttatcttgtgccagttttcaaagggaatgcttccagcttttgcccattcagtatgatattggctgtcggtttgtcataaataacttttattattttgagatacgttccatcaataactagttcatcaagaatttttggcatgaagtgctgttgaattttattgatgtaatcatgtggtttttgtcattggttctgtttatgtgatggattatgtttattgatttgtgtatgttggaccagccttgcatcccagggatgaagccgacttgatcatggtggataagctttttgatgtactactggactcagtttgccagtactttattgaggatatttgccatcgatgttcatcagagatattggcctgaaatttttttggttgttgtgtctctgccacatcctggtatcaggatgatgctggcctcataaaatgagttatggaggagtccctctttttctattgtttggaatagtttcagaaggaatgataccaggccctctttgtacctctggtagagttcggctgtgaactcatctggtcctgggtgtttttggtgggtaggctattaattactgcctcaatttcaaaacctgttattggtctattcaggaattctgcttcttcctggtttagtcttgggaggatatacgtgtccaggaatttatccatttctcctagaatgtctagtttatttgtgtagaggtgttgatagtattctctgatggtagtttgtatttctgtgggctcagtggttatctcccctttatcattttttattgtgtctattgattcttctctcttttcttctttattagtctggctagtggtctatctattttgttaatcttttcaaaaaaccagctcctggattcattgattttttgaagggttttttgtgtctctatctccttcagttctgctctgatcttagttttttcttgtcttctgctagcttttgaatttgtttgctcttgcttctctagttcttttaattgtgatgttatggttttgattttagatctttcctgctttctcctgtgggcatttagtgctataaatttccctctgaacatagatttagctgtgtcccagagattctggtaggttgtgtctttgttctcattggtttcaaagaacttatttatttctgccttaatttcattatttacccagtagtaatgcatgagcaggttgttcagtttccatgtagttgtgcagttttgagtgagtttcttaatcccgagttctaatttgattgcactgtgatctaagagactgtttgttatgatttctgttcttttgcattttctgaggagtgttttgcttccaattatgtggtcaattttagaataagtgcaatgtggtgctgagaagaatatatattctgttgatttgggttggagagttctatacatgtgtattaggtttgcttggtccagaactgagttcaagtcctgaatttccttgtgaattttctgtctcgttgatctgtctaatattgacaatggagtgttaaagtctcccactattattgtatgggagcctaagtctctttgtaggtctctaagaacttgctttatgggtgctcctgtattgggcgcatatatatttaggatggttagctcttcttgttacattgatccctttaccattatataatgcccttctttgtcttttttgatctctgttgatttaaagtctgtttttatcagagactagattgcaacccctgattttttttgctttccatatgcttggtaaatattcctctatccctttattttgagcctatatgtctttacacgtgaaatgggtcttctgaatgcagcacactgatgggtcttgactgtttatccaatttgccagtctgtgtcttttaattggggcatttagcccatttacatttaagattaatattgttatgtgtgaacttgatcctgtcattatgatgctagctgtttattttgcctactagttgatgcagtttctttatagtgtcaattgtcctgacaattgggtatgtttgtgcagtggctggtaccggttttttctttccatatttagtgcttccttcaggagctcttgtaaggcaggcctggtggtgacaaaatctctcagcatttgcttgtctgtaaaggattttatttctctttcacttatgaagcttagtttggctggatatgaaattctggattgaaaattctttcctttaggaatgttgagttttggtccccactgtcttctggtttgttgggtctctaaagagaggtctgctgttagtctgatgaacttcttttcgtgtgtaacaggacctttctctctggctgcccttaacatttttccttcatttcaacgttggtgaatctgatgattatgtgtcttggagttgcttttctcgaggagtatctttatggtgttctctgtgtttcctgaatttgaatgttggcctgtcttgctaggctggggaagttctcctgaataatatcctgaagagggtttttggcattttttaaaaaattatactttaagagatctgggatacatgtactgtcgtatacttttaaacaatcaaatctcatgagaaatcactcacaattgggagggcagtgccaagccattcatgagggatccatgcccatgacccaaacacctcccaccatgcttcatctccaacactggggattatatttgaccatgatatatggaggggacaaacatacaaactacgtcaaaggcaaagcatggctactgtgaaagaagggtaaaaacacagagatggcatcacctctgacttccaggagtcctcagcagactgagggagacaagtacatattttcctgaaagaggtcactggagtgatggtgtgtttagaatatagaagtagagcagtcacagagaggcagcccagcagagtgttcgcacaaggactgggccagcaactccccactgcatgcaacgtatctgaggaaagtcattaaaataggtgatggtcactttccatcaagtccctggtatggtccatggaggcagggttgtcaatctcattttggcatttcagaggcctctcagggtttggatatggaagaagacaaccagcaatgattatgcattgcagagatgcaggtgagccccagtttcttgccagttgggaggtcagtgctaagagccttgctgtctttccctggaacatgagatgccaatttctttctggacagagagtatttggttggctaaagtcaaaatctaaattttgctttgggataaattccaaaaatattagcattattcaaatttactttcactttatctttccgaatcttcaaggtccaaaagcattgctgaataattctgtttctaaactcacttgcagcgtgctctccctccaaggcgaagaccataatctactcttgtctggaaatcatacaagtaggtatctcagcaaatgatactcgtgtgttatcgttcttatgagtaaatcattggcagtgagtgtgatttttttttttttatgaaaggataaatacacgccctctattggggtcaggttttgtgcctgtacttcttccgcctactgtatcatagcagcttagaatcccagctgctggctcgggctgcagttctctcatggctcgcgcagggtggaccagccccgttcctttatgtgtgtgtctactgctgacctgtggctttgccgaggcagggaagctgctggtagtgcccatggatgggagtcactggttcaccatgcagtcggtggtggagaaacttatcctcagggggcatgaggtggttgtagtcatgccagaggtgagttggcaactggaaagatcactgaattgcacagtgaagacttactcaacctcgtacactctggaagatcagaaccgggaattcatggttttcgcccatgctcaatggaaagcacaggcacaaagtatattttctctattaatgagttcatccagtggttttcttgacttatttttttcgcattgcaggagtttgtttaatgaccgaaaattagtagaatacttaaaggagagttcttttgatgcagtgtttctggatccttttgatacctgtggcttaattgttgctaaatatttctccctcccctctgtggtcttcaccaggggaatattttgccaccatcttgaagaaggtgcacagtgccctgctcctctttcctatgtccccaatgatctcttagggttctcagatgccatgactttcaaggagagagtatggaaccacatcgtgcacttggaggaccatttattttgccagtatctttttagaaatgccctagaaatagcctctgaaattctccaaacccctgtcacggcatatgatctctacagtcacacatcaatttggttgttgcgaacggactttgttttggactatcccaaacccgtgatgcccaacatgatcttcattggtggtatcaactgtcatcagggaaagccattgcctatggtaagtcacctctcctttagcacattaagaataatctggctttggaaattaaaaaaggattccttactgaactgtgatttgacattttcgtttgttgcatttcaaatttctttccagtttaacaaattattttgtgcgaattcatgtactcatcaattatcaaattttataaaactgcccttcttgaaagtatatgtaataatttaaaaattatagatcatattcaggctacattttaaaatacgatgtttagaaaagtaccaaaaaccacagcaagaaatgaaacttccgttttttgttaattctatgtgaccccgtagttgaaatgctcttaagttttgtgtacattcttttcattgaaaaaaagtattttaggcatatgcaatatctcatgtaagttcccatacctatttagtaaaaataaaatctagtattgggctgaacatattcttctttatcttgcatttttcacttgccaataaattatgggtacctttatagagcaatacagacagatttgacaagttcttttaataattgcataaaattctttactttggatacaatgtagttttttaaccaattaatattgatatatatatagccattttccactctttccttttgtgaataaggctgtgtaaacactcttcaatactttccttgcgtgaatatatttctatattcttgcttttatcttagtagactagagtcctacacgtagggttacagggttttcctgaattgagaagactggcatctttttgctattaagtcttcctgttcaggaacatatatgtctcactatttattcagatcttgttttatatacataaataaaaattttcactatataagcattttatgtttgtttttaacatttattccttggcattttattactttagaaactattttgtacagggcaatgtttccatttctacatttaactgattactggtaattaaaattttggtttttgcatatgtatcttgtatccagccacatcactaacttttcttattattttgtagtatgcattagatgtacaatatacaataccatctgcaagtaattcccttgtctgatatttgtactgcttcttttgctttgctggagcatatacttccaaaatattattgagtaatattgttagagtagccagtttaaatagggattcggttgcttgtgactgaaaaatccttgaaaaataccagaataagattcttggcaaacgcatagttgctaaatccagatgaaacacctggtgtctcatctcattatattattttattaggggtggagtacacatttttatgtattgttctggtttcttacaagattcagtagactttgtaacacagttatatctgtcattggcagatggttggtgaaagagtgaccgttcagccatctcataggaaagtgaaataatgctctttctaaaaagcaggaagactacagttgtaggcctttcaaaattaggcatgactttcagctcatggcaagaccaggcgaggagatgcaagttgcaggactctaagaggttggacttatcaaagcacttttctcctcgttatcctccattaattacagtaccaagcaccacccatgtgttgcctacaccccacagccttcggccgagttgaggatctgccacttcctgaacccacgctgagtttattgtggctcacagggtcacctagaggcctttaaagatataaaaacctatatatgattttatatcacctgtgatagagggatatctataaaaaatgaaacattaaactatatatggtttcatttattttgattgtaaatatcttttatgagatatgaaataaatgtgtttctatatctattaaagaatatacacatgtatgaaagtttttatagtttgcagagggttatgtatattaatgtatatttttatgattatacctgtaaaggcagcagaattctcacagaggaattcgatctcaaagagggctttctgtcaaagagccttggatatggcccaaccacaaaagtaaaagtaaattgtcatcaaaagaacgatgaacactgcatattgctctttccttgtttcagatgccaggatgtgtctgggaaaagcatgcagttggttacatcttgctgggaaacaggattcagagtctgagtctcatctgtctgatgagaaggaagcattacttgatgatagagtatgtgtttgcacatgtatgtgtttgtgtatgtgcaggtgtgtttgcgtgcagtgtcccagaccctgcacaggggatttcttgaagatctcctgtaacaaaatctccttgagtctatccaggagaattacagccagggatgtaattaaatactttaacaatgatggcagatggccccatctccaatttcaacatgggatttggaggggacaaacttttaaactatatcaattggtatggtcattcttttacatttcagtattctaatgtgtgtgtgttgattagtgatgtgtaaataattcagcagaacattgaaatagttttaatgagaaaaagaggaagtcactcttagtctctttgaatttttggtgagttccaacagaattgatgactggttttaggggaaaagaattcaggcttcatctataccatccatggtaggtgcagctctgcagacctggggataggatgtggttacagagcaagaaaagatctgtgctttccccattgctctaagattctggctatagtccaagatccaaattcaaagttaacttttggttgacaagactaaggcctcccactaaaattgtttacttcaagtatttattttcaaagttttcaaacatacaaaatgaaaagactatagtgtaatgtgcacctgtatatcaatccttaggctaaataattttcagtgttttgctgtattaattcatctatccccttattctgaccttttaaagaaactttttggctgtcatttttttagtggaaattcttggcttgtcattccatcattgaatattttattaaatataaaaaataagtaaaatttgttacacggccacaatatcgttatcacacctaacacaataataatactttaatattatctcatttctagcccataattaatttacctccaattgcctcatacaacatctttttatgttgatctatggaacagagaattcagaaataaacccatacatccttggtcaattgagtaagttccaaattttatgagggtgtcaagaccattcaaatgggagagaacagtctcttttttaggctgcaaatgctgttcttccatagtccaacagtgaccctccccaatttaggggccaacccagggatctaggtccatgtaacctcctgataggccaacaatcttaggtagggccaactctatacccttggtcagtaggaagcagttggaagatgagaccttcactcacatgccaaagatttgtcattgttgctatgtcaggggggaaatgtggagccctaattagggaaaaagagctaggctggcaggaccaggggaaagcaaaaaagaaaaagcagatgaactataagtctccctttcttcatggtctaggacacatagccctcctgcaaaaataacataatcttcctgcacccagcgatcaccagaccctcagctgatagaaaaatgcaagttatctcactgcaaccttggcattatcaatactgcatctagctctctgcagcacaagcaccatcctataaaatcctcagcaagcctttgtctccttgcagccagctcttctcttgctgactatcttgcaacatattttcctactttctctaataaatctgcctttctttacctacaagtatcttggtaaattctttttacctcccatgccacaccagtctcagagagttgccacccatgacagttaccataaggcttgcaaatactatcttataaaccttattttaacctgataacaacttaacactatttgcataaacaaacacacagcaagaagaaaactaatagaaactagtcttaactttgctccctactttttaactctttgtgattttcatttatatcttgttgtactgcctatatcttaaaaagttgtttagttattatttttgatttgttcattgtttagtctttatatgtaggataacagtagtttgcacacacagttacaatgttataatattctgtgtatttctgtgtacttactattaccagtgagttttgtaccttcagatgatttcttcttgctcatgagcttccttttctttctgattgaagtactccctgtagcatttcttgtaggatcggtctggaattgataaaattcctcaacttttgtcttggaaagtctttatttctccttcctgtttgaaggatattttcaccagatatactattctggggtaaaaggtttttttttcttcagcactttaaatatgtcatgccactctctcctggcctgtaagggttccactgaaaaggctgctgccagatgtattggaactccattgtttgttatttatctcttctcttgctgcttttagaatcttttctttatccttgacctttgggagtttgattattaaatgccttgaggtagttttctttgggttaaatgtgcttggtgttctctagccttctcatacttgaatataggtatctttctctaggtttggaaagttttctgttattatccctttgaataaactttctactcctatctctttctctacctccactttatgggcaataactattagatttgcccctttgaggctattttctagatcctataagcatgcttcattgttgtttattcttttttcttttgtctcctctgaccatgtattttcaaatggcctgtcttcaagctcagtaattatttcttgtgtttggtccattctgctattaaaggactttgatgcattcttcattatgccgattgcatttttcagctccagaatttctgcttgattctttctaatgatttcaatctctttgttaaatttatatgctggaattctgaattcctcctctgtgttatttggaatttctttgagtttcctcaacacagctattttgaattctctgtctgaaaggtcgcttatatctgtttctccagcgttagtccctggcaccttatttaattcatttgatgaggtcatggttttcctgaatggcgttgatgctagcagacattcttcagtgtctgggcattgaagagttaggtgtttattgtagtcttcattgtctgggcttatttgtagccgtccttcttggaaaggctttccagatatttgaaaggacttaggtgttgtaatctaagctgtttctgctttagggggcaccccaagcctagtaacgctgtggttcttgcagacttgtagatgtattgccttgatggtcttggacaagatccaagatacttctctggattccagcacatactcttgctttcttcccttacttcctcccaaaaatacagagtctctctctctctctcactctctctctctctctctgtctctctctctgttctgagccacctcaagctgggggtggagtgacacaagcatccttgtggccatcaccactatgactgtgctggatcagacctgaaaccagcacagctctgggtctcacccaaggcctgctgtaaccacctcctggctactgcctatgtttgctcaacgcccttgggctttacaatcagcaggtgatacagccagccagacctgcatccctcccttcagaatggcaaggtcccccaggccctgggtgggtccagaagtgccatctaggagtcagggactagagtcaaaaaccttagcattccacctggtattttattgtattgcagctgagctggcactcaaaccacaagatgcagtccttcccattcttccctcttatttgcaaagacagaggagcctcaccttgtagccactgccacccctggccatggacagtactgccagacttctgctggtgttcccttaaggcccaaggtcttaagtcaacttgtggtgaatgctgcctggcctgagacttgcccttcaaggcagtgggctcccctctatcccaggggagctccagaaatgctgtccgagtcaagtcctggaatcagggaccccaaaagccctcttgatgctctatccccctgcagcagtgttggtacctaagttataaggcaaagtcccctttacctttccttgtgctttcctcaagcagaatgagttttgctccatagccatcacagctgggaatgtgctgaatctcacctagagccagtaagtctcagaggctcaccaaggcccttgacgtagtacgaggtttcactgctggtattcaggttccaaggtctcttcagttagcaggcgatgaacgctggcaggactgggccctttcttttaaggcagcaggttcccttctagcccagggtgtgttcagaaatgtcatctggaagctagggcctggcacaggggcctcatgattctgaccagtgccctatcctgctgtggctgagctggtctcctaaatgcaagacaaagtcctccccacttttccctctcctctcctcaagtagaaggaaagggtctcttttggagccgcaagctgtgcatcctgggattaggggaggagtgatgtcggtactcccttggctgcttcagctagtgtttcagtatgtcatactcccctttacccagttcactgtctctgggcctagtacagccctagaactcacctaagagttgcaatctttatggactagactgcctttcaagtttacttgaggccaagaccattttggccctcggtggtgaggtctgtgggcattcaagttcagacctctgagatcagcaatttccctcagcctagggctggtttaaatgctccctcaatgctgggcacggtggctcatgcctgtaatcccagcacttagggaggctgaggtgggtggatcacttgaggccaggagtttgagaccagcctggccaacatggcgaaacccaatctgtactgaaaatacaaaaattagccaggtgtggtggtgcatgccggtaatcccagctactcaggaagcagagattcgcttgaacctcggaggcagaggctgcagtgagccaagatcataccactgcactccagcctagatgacagagtgagactccatctcaaaaaataagaataaataaataaataaataaataaacgctctctcagtgggtgggtgtcagctgagtttggtctgggtttcctttctgctctaacagaatagcactgatttcagtgcctcccaattgtctcccaccagggctcagggattctctttatgccacaccgccactgtgggttcagggggttgggtgacataggagatgcagaacttttttttttctatttcttcagtgtctctgagttatataaaatgaaaaccaggtactatgagtgctcacctgagttttggttcttatgaaggtggtttttcctgtgtagatagttgctaacttggtgtcttctctgtccagattcttttccagtattgacaatcctttacatagaaaactgtgtgtaatgagttctaaaggttcttatgacccctgattgagaagctgaattagagatattgggtttgggagcaggtagaccactttgacacctttagggttctgggtggctagggacattgtccaatatcaaaagaactttaaaaaacaatcccttactggcaatgcattttctgccttcagggacaaagcatcgatgaaagcaatccagaaaaattgttcttgttgactaggcttcttgagagacttattcactatcaagagaacagcatgggaaagacctgcccccatgattcaattttcccaccaggatcctcccacaacagtgggaattgtgggagttacaattcaagatgagatttaggtggggacacagccaaaccatatgattccaccctggtccctcccaaatctcatgtcctcacatttcaaaaccaatcatgccctcccaacagtcccgcaaagtctcagcattaactcaaaagtccacagttcaacgtctcatctgagacaaggcaagtcccttccacctatgggcctgtaaaatcaaaagcaagttagttacttcctagacacaatgagggtacaggtattgggtaaatacaccattccaactgggaaaaattggccaataagggggctacaggccccatgcatgtcagaaatccggcagggcagtcaaatcttaaagctccaaaatgatctcctttgactccatgtctcacatccaggtcttgctgatgtaagaggtgagttcccatggtcttaggcagctccacccctgtggctttgcagggtacagcctcccttccagctgctttcacagagtggcattgagtgtctgtggcttttccaggtgcacagtgcaaactattggtggacctaccattctgaggtggagggatggtggccctcttctcacagttccactaggcagtcccccagttgttgctctgtttgggggcttcaaccccaaatttcccttctgcactgttctagcagaggttctctgtgagggtcctgcccctgcagcaaacttctttctggacatccaggcatatccatacagcctctgaaatctaggcagaggttcccaaacctcaattcttgacttctgtgcacccacagtctcaaccccacatggaagctgccaaggctcggcacttgcaccttctgaagccatggtgtgagctgtactttggctccttttggacacagctggagcagttgggatgcaagacaccaagtccctaggctgcacacagcagggggccctgggcctgtcacacaaaaccattgtttcctcctaggcctccaggcctgtgatgggagggactgctgtgaagacctctgacatgccctggagacattttccccatggttttggggattaacattcggctcctcattacttatggaaatttctgcagccggcttaaatttctcctcagaaaatgggattttcttttctatcacattttcaggctgcaaattttccaaacctttatgctctgtttcccttttaaaactgaatgcctttaacagcacccaaatcacctcttgaatgctttgctttttaaaaatttctcacaccagttaccctaaatcatctttctaaggttcaaagttccacaaatcactaggtcaggggcaaaatgctgccagtctctttgctaaaacataacaagagtcacctttcctccagttcccaacgagttcctcatctccatttgaaaccacctcagtctggactttattgtccatattgctatcagcattttgggcaaagctattcaacaaatctctagggagttccaaactttcctacattttcctgtcttcttctgagccctccaaactttgccaacctctgcctgttacccagttctaaagtcccttccacgttttcaggtatcttttcagtagcaatccactctactggtaccaattgactgtattagtctgttttcatgctgctgataaagacatgcctgagactaaggaatttacaaaagacagaggtttaattgacttagagttccacatggctggggaggcctcacaatcatggcaaaagtcaagaaggagaaagtcacatcctccatggatggcagcaggcaaagaaagagagcttgtgcaggaaaacttccatttttaaaaccaccagatctcgtgagacttacttactactatgagaacatcacgggaaacgcccagccccatgattcaattatctccctccaggttccttccatgacacgtggaaattgtgggagttccaattcaagatgagctttgggtggggacacagccaaaccatatcattattgaatttgatttgctgaaatattgttttacattttcgtatctaaggtcatgaggatctgtagtttttgtatcttgtcacatctttatctggttttggtattgtggtaatgttggtctcacagaatgaattagggcatttcacatccttctgttttccggactagattgtgagaaattggtattatttcttccttcagtgtttggtagaatttatcagtgaagtcatcagaactttaccgttttgtttgtgggaacatttgaagtcaaaattcaatttgaatttaaaaggtacagattatgtcatttgtgttattaatttcttcttgtgtaaagtctgacagcttgtgtcttttaagaaatttgtccattccatctaagttgtagattttattggcatgaacttgttcatgtttcttattgttttaatacctgtagaatttatggtgatactactgctctcattcctgatattggtaatttatatcttctgtcttttttcctaatcagtctgggtagagatttatcaagttaattgatttgccccaaaagctagctttggtgtcattggttttctccattgtttttctatttcctatttcattgatttctacactgaagttagcctccagggaaggtagatcactcactgcccatggatgggagccactggttcaccatgtggtcggtggtggagaaactcattctcagggggcatgaggtggttgtagtcaggccagaggtgagttggcaactgggaagatcactgaattgcacagtgaagacttcttcaaccttatacaccctggaggatctggaccaggagttcatggcttttgccaatgctcaatgggaagcagaagtacgacgcttattttctctattaatgagttcatccaaatgtttagaatttaatttttcacattgcaggagtttgtttaatgactgaaaattagtagaatacttaaaggagagttcttttgatgcggtgtttctggatcctttagatatgtgtggcttaattgttgccaaatatttctccctcctctcggtggtcttcgccagaggaatactttgacattaccttgaagaaggtgcacagtgccctgcttctctttcctacagtcctagatatgtctcagggttttcggatgctgtgactttttattattattattatttttatttatttatttatttttgagacggagtcttgctctgtcacccaggctggagtgcagtggcgtgatctcggctcactgcaaactgcacctcccgggttcacgccattcctctgcctcagcctcccaagtagctgggactacaggtgcctgccaccacgcctggctaattttttttttgtatttttagtggagacggggtttcaccgtgttagccaggatggtctcgatctcctaacctcgtgatccgcccgccttggcctcccaaagtgctggaattacaggggtgagccaccacacccagcctggatgccatgacttttaaggagagagtaaggaaccacatcttctacttagaggagcatttattttgcccatattttttcaaaaatgccttaaacatagcctctgaaattctccaaacacctgtcatggcatatgatctctacagccacacatcaatttggttgctgcgaatggactttgttttggagtatcccaaacctgtgatgcccaatatgatcttcattggtggtatcaactgcaatcagggaaagccagtgcctatggtaagtcattgctcctttagcacattaaaagtattctggatttgaatatttaaaaagattccttacggaactgggatttgacatttgtgtttgttgcatctaaaatttcttttctgtgtaaaaaattattttgtgccatccacgtgtttgttggttagcaacttttatataatggcctcgttaatatgtatgtgtatacgattggttaattgctcataatttccactgcatttttaaaattttgaaacagagtattgctatggtgccctggctagactcaaactcctgggctcaagtgatcctcctatctaagccttccaagcaattatgacttttttagtatttttggaaaagtatttaaaagcacaataagaaatgaaaatttcatttttaactaacctgtactacctgctgcagtaaaatgttctttgcagttttgtatgcatgtgtttccatctgttgaaattatatataagcatatatgtaaatatttatacttattttatgaaaatcaaatcaactatcaggctggacatgttgttctttactatgcgtttttacttgccagtaaaccagagacatcttcacagatttgacatgttcttttaataattgcataaaagtctttactttggatgcaacatagacacaagctttcccaggtgtttttctgctaaagatttggctaacttcttcaaaacaacaatgataagcagatgttatctttctttgaccctgaagaaagtataaagcagaatgcccttagccacccaaaaaactgttaccatgatgtttggtcttgtccagtctgcttttgatttgactggatcactttcatctcttggtagccattgctttgcttgtgctttgtcttcattatcatactggtaaatctatgtttcatcttctgttacaatctttgaagagatacttcaaggttttttgtttgtttgtttgttttgagacagagtttcactcttgttgtcgaggctggggtgcaatggtgcgatcttggctcaccacaacctctgcctcctgggttcaagcgattcacctgcctcagcctcctgagtagctgggattataggcacatgccaccacacccagctaattttgtaattttagtagaggcagggtttctccatgttggtcaggctggtctcgaactcctgacctcaggtgatctgcctgcctcggcctcccaaagtgctgggattacaggtgtgagccaccgtacctggccaaggtctggatcccacttgtttataatttccattgaagggtttgttcttgtctgcagctgatctggctgcaatgattttggcacccaacaagtagaaaatttgttcaactgaaatttttgtcagaattgtgtaaactgtcctgactgagatatctattgtgttggctattgtttctgctgttaattgtcagtcttcttcagttagagcatgagcaagatgaattgtttccttgcaaattggtatggatggtctgctggtgtaggctttatttgcaaccttgtcctgtcccttcttaaaaggaattactcatttgtaaactgcaaatttcttttgaccatttttcccattaacttttttttaaagcatcagtgatttcaccattcttccactcatatctcagcataaattttatgctattgcttcaattgctgcagaattcatgttgttttgatgggggcttttttccaactgatgtcctatccttcttagtgcctcaaactagatcctattcagacatgttttaacaagttagtaaaagtttgtttggcacaaagaaatttgaaatccatgcttaagtttttcataatatgaattttcatgaattgtttgatgatccctcatctattacttttttagcaatggaccatgcaattttggctatgttctggcttcttacaaggttcagtagactttgtaacacagttgtatgtctcacacatcggcagctgtttggtaaaggattgacttttagccaactcatgggaaaatgaaataatgtaaaaaacaggaagactacagttttagacctttcaagtgaggcatggctttcagctcttggcaagaacaggcgaggagatgcaagcctctacaaggctagacttttcaaagtgcttctctcccctttaccctccttcagttacagcaccaagcaccacccaggtattacctgcagcctcaccctctacccagttgtgggatcctgccacttcctgaacccacactgagttccttgtggctcacagggtcacccagagggcttccgagatacggaaagctatgtgtgattttatatcacctatcatgttaagatatgtataaaataggaaacatattggccatatatcattttatatatttttggttttacatgtctaaaaaatacatgtttttttgtatgtattaaaggataggtatgtataagaggttttatagaagtggaaagttatattttttgcatatctttatgaattataataaaggaaggaaaattctcaaagaggaattcagatatcaaagagtgccctttgacaaagagccttggttacaacatacctacaaaagtgaactgtcattgaaagacctatggacactggatttctctttccttatttagaagggcaggctgtgtcttggaaaagcatacagtttgttgtatcttgctggacaacaggagtcatagtctgaagtgtctgatgagaaggaagcatcacttgatggagtgtgcatctgtgcctgtgtgtgtccacgcgtgtttgtgtgtgtgcatgcacacatgtgtcagcatgcagtgtctcagatcctacataggggtttttcctgaaggtctccagtagcaaaaactcattgagtctatccaggggaattacatccaatgctgtaattaaatactttaaccaagatagcagatcatcattcaagagaacatcaagatagttttaattaagaaaaaaaaaaggaatcactgccaggcttttttagtttttggtgagttccagcagaattgatgactaggtccagtaggaaggaattcaggattactctttaccatccagggtgagtgtagctctggagaactggggatgggaggtgactgcacagcaagaaaagatctgggcttcccccattgctctaagatctggttccattgtgagattcaaattaagagtaagctgttaatgggcaagtccaaggcctctcaccaggattatttatttcaacttttttttgtcaaagttttcaaatgtatagcaaggagagactacagtgtaatgagcacccatatatccatctttgtgttacataattttcaatattttattatactgattcatgtatctgctcttttgttctttttttaaaaataaattttggctataattttttaatggaaatgctggagatatcattctatccccaaatacttcactaaatgtaagaaataaggaaaaaaggaaaatttgttacatagccacaatatcattatcattcctcacaaaatcaataactctttaatattgtctcactcataatgcataatgaaatttcccctaattgtctcaaaaatgtcttgtacatgcagatcagtagaacggagttgagaatccagatataaacccatacatccttggccaattgatttttactgtggtgccaagactgttcaaatgggaaagaataatctcttcaacagaggtcgctgagacagctgcatatccacatgcaaaagaatgaagatgcacccttatatgcaaaaactaacttgaaatggatcaaatagctaaatagaaaagctagaagtgtaaaagtttagaaggaaacatttggggaagtatttatgacccagatttggaaatggtttctgtgatgtgacacacacattgttgtgtatgagaaacaacaacaacaaaaaacacagacatcaaaataaaacacttttgtgtgtcaaggacactatcgagagagtgaaaagtgaacccacatggcctctctaagatgtgcaagtaaacatgtacgtgcctgacatggaggctcctgggaggcaaccacagtcccaaaagacctgaaatttcaaaatcctgaatgttaagagcctgagagatcaacgtcctacaaatgtaattccagaaaaaataactttaaaaattatttatttgaaagataatctgtttacgttttaaaaggggatttatttgaaaaacatataaaaacacgacagaccacttcataggccactttacaccataaaataggtaataataacatacaggtatctttgcaagcgtaaaccctcaggtgtactaatgaccttcatataggtgtatcaattgtgagaagatgaatcatattcttaaagtaataggttaaaaaaggaaaagtatcaatatttattactgtggttggtaatcttgtgcactcaggtttgcagctttgatcatctgaaataccatgaaaaatgacctgagacttatcatgaggtcagtcagaaacctctatgggtcaccaccgcatacacagttgcttaaagtgcccaagtcttgagaaattttgttttgttttgtttttttgagacagagtctcgctgtgttgcctatgctggagtgcagtggtgcgatctcagcttactgcaacatctgctgcccgagttcaagcgattctcctgcctcagcctcctgggtagctggaattacagatgcccaccaccacagtcagcaaatttttgtatttttagtagacatggggttttgccatgttggccaggttggtcttgaactcctgacttcagatgatctgcccttctcagcctcccaaagtcctgggattacaggcatgggccaccacgcccggccaagaaatgttatctttcacagatgcagatgtacaaaagggacatctcttcattattgaggacatttcaacatttgtacgtacatgcctaatgcttacacacttactcttgtgctaatgcacttccatggagtcaaatttgtgagcataaaatgaattagaattctccataagtctatacacagtctctgccttcagtattggaaatgatatgaagatgaaatacatagcatagcaaattgtaaaaataatgctgacaatttaaccttgtgaaaaaacctaaaaagaagaaaaagtaaaagaaaaaaaggaaaaaaacctccaaattaacctattctgtgattgtgatttttgggattttagctgttagagagtttagatttcagggagttagaccttagggatttggatccttagggaatcaatatttcagaattcaaccttcaggattatgtgttttggggttatgtctttcaggattgtgatccaaaccctatagcatcttgtttcttagcataacctgtactaatcgtagatatatctctgtactccagcagagcatcataaaattaagtagtttacagcagagagtctcaacctatcagtgattaaggaatagaaaaaaacgttttctgcagttgattatatattcataattgtttgtaatatataacaaaaatgaaaagctagaaagtgaaatgaaataaaccacagccctataaaatgcaaaactactgatgattgcttggcgacatagcaacaccaattgctacaggaatttctaagcatttcctgcagggtctgcacccatgctgaggtggttaggtaacacaacgagctgcaaaccacatcttgaacagactgttttagacccagtccagtggctctatgtgagtagtgtttaatcagaaataaggcccagcacagtggctcacgcctgtaatccctgcacttagggaaactgaggtgggcggatcacctgaggtcaggagttcgagatcagtctggccaacatggcaaaaccccgtctctactaaaaatacaaaaattagcacagtgtatggcgggcatctgtaatcatagctactcgagtctgaggcagaagaatcacttgaacctggaagatggaggttgcagtgagccgagatcataccactgcactccagcctgggcaacagagcaagattctctctcaaaaaaaagaaagaaagaaagaaaaagtaaacagaatactaaagaaagaaagaaagaaaaagtgaacagaatactttctgttttgttaatgtgctaattacatggtcacaaacagtgactaatttgtgatcaccagggcaaagtctattatcagctacctgttttccttgtaaccttgtgttttgggaacctagcaactctactccccactaagtgacaacccatgcaggtttgcccagattattcccagtttaacactggaagtctcacgtcctgggagactcttcattccccaaggagcagggacagcaggtcactgtcactggagcactggaagctggccacatcattagcagattcagaaggggcacgacttaaggaggctcatgcttctcttgtcttctgccttaggctgtcatttccaatgggtgacaagttccttccatgcagaagccaggccaggagataaagtcatcttgtcctagaaaaactgttagaaagaagggaaactgtctagtgtgtttcgccaaaagagtttcacagactcttctcttgtaggggatatgggggtgggtgatcactgtcctggtctccctgaagcaaggacgcctctctggcctcagggtgcctgtcaggcaagtctctcctgtccctggaggttcacagagccccatccctgcaagagcaatgctaagtggggttggctttgagccccagccattctcttaacaattcttttagttaagtatcagttcccccatcccctcactccagcattttttgcctcttgctatgatcagttttctcactttcacttttacacctctgatcactgaaaaattacagaattataagtttggaaaaggagtctatatttcttggaaaaggttacaaccttcaaggtggccatctagctggctgggaagcatgacctctggcaaataccagagacaggcccttgaaaggagaagggatggggtaggagctttatgctgaacaaacagggtaaacatacatattcaccaggttacagaaggagctatgaatatttatgaaggccatcctgactcatgcgtattgaacacacatgcatgttacatatgacccgtgttcaccctggggtggagacatcatatttaaatggattacaattaggccctatacatcaaaaggtctcttcagggcacaaaggcactcaaattcacagtctccgtaaactggccagaaccagtctgtgatcaccagtcactggtcttcttaccaggagaaagttactgaaatcagcctcttgtccaatgaaagcagtatttgtggcttatggaacaaggaatggacgtcagttagtcagtgtccggtggaggtgcacttgtttaacattgtttttctctagacctgtgcttatttagctgctagagaaaaagaaaaactctgtggcagttggaacatagtttattctttaagtgtaggcgcccatgactcaactcttgcctggcgtggtttgaggtcttgtgtgtagttttgtatctgattgccacaaaaagtccactgagtccatctcatctctattttaacactaaagtgggtcagttgtgtttaaaccacaaaagggagggagtgtgacgaggcgtgtccagccttctgtcccgtcgtggctgtgactcagttttgaaggtttctttggggtcccgctggccaggagggttcgattcacttgttgtgggagacgggcggcacttagtattttcttttcagtttacacgttcctgggcatccctattaagatgtgcagataaacacgcacatgcttcatgtggcatctcccttagttaaacatcttttttttttttcctttcctgtgagtcttcctgaaacaggtgagcccaggtggagcctccgcctgcgttaggacctaacctttctacgtctttatgaaatccctggtgtcagttactgctgcttcccctcaccagcttctttcctttggtctaccctaagaatgtgatacccaacacaatacaccgtctctttggcccactcaagacattctggtgatgccctgtggcctgctggcccccactagctatcaaggtcccccatcatctcacctttcctggctcatgggctttattttatgccactcttcatgctcagaagcacctggcggtttagtttttttgtgttgctctaaaggaatacctggggctgggtaatgtataaggaagagataatatctggccctcagttctgcaggctgtataagaatcatggtaccaacatctgtttctggcaaaagacttgggctacttccactcatggcagaaggtgaatgtggaaggtgctgatcacaaggtgagaaagaagcaagagaaaaaggaggggttgccaggatctttttaacaatcagttcttgcaggagcaataggacaggaactcacccattatcgggaaaaacatactaggtcatttgtgagagatccatccctgtaacccagatacctcccactaagccccacctccaacattagggattaaatttcaacacttgacttgagggagtcagatatctaaactatatcatttgatatggtcagtctttttgattgcagctattctaatgggtatgtaaattaaattgcaattttaatttgattttcctatttaaatatgatgttgagcatctttatgtgtgactgtttgccatctgtatatgttctttggtaaatgttcaggtctatgccactttttaagaaattgggttttctcttcattattgaggtttaaaagttatttatatattctggatatttatactttatcagtttctgggcttttttccatgaaactttttattttagaagaaatttagatttatgcaaggttgcaagaactagcacagagaattttcatatcctgtgcctagtttcctcctcttttttttttttttttttgagacaaagtgtcactctgtcacccaggctggagtgcagtggggcaatcttggctcactgcaacctctgcctcctgggttcaaatgattcttgtgcctcagcctcctgagtagctgggattacaggtgcacaccaccatgcccagctaatttttgtatttttagtagacacagggtttcaccatgttgaccaggctggcctcaaactcctgacctcaagagacccacggaccttggcctcccaaagtgctgggattacaggtgtgagcaatggcacccatcctcccctatggttaaatgttacgttactatagcatattatcacaactcattaaccaacatttgatacattatgatgaactaaagtctgtgttctctgcagatgtcattaatttttacctaatgtcctttttcatttctaggatcccatcctggataccaaatgacatttagcccatcacgcccccttcatctcctgtaccgtgtgacagtttttcagactttccttgttttcgatgactttgacagttttgagcagttctggtcggatgttctgtagaatgtttctcagtcttggtttgtctgatgttttgatcatggttagactggggttataggttttaggaagtaagaccacaaaggtaatgtcttttcttgctttcttgactatggatagccaactcttgaaaagagtagtcttttctccactgaattgtctttgcacttttgtaaaaacttggttgttcatactgctaaacatctatttctggactttctactctgttccattgatccagttgtgaaatatgtgataattatagctttgtaatgtcttgaaatgagtagtattagctctctaatttttttcaaagttgtttttgctattgtaggttttctacatttctgtatgaattttagagtcagtttgccaatttgcacaaaaaaaagcctgttgggattttggttgaaatcatatttaagttacagttcaactggggagaaacagcatcctaacaattttgagttttccaattcttgaacatatctctatattcagatctctcctcagtgttttagttttcagtgtagtctttcacatctttgatcagatttatccctaagtatttcatgtttttgatgttaagtggtattttcattcaatttgcaattgttcattgctagtacagttgacccttgaacaatgtggagattagggataccaacctcgcaggtagtctaaaatccacatatcattttgacccccataacttaactattaatagcctactgtatagcagaagccttaccaataacgtaaatagccaatgaacacatatttgatatgctttatgtgttatatactgtattattgtaataaagtcagctagataaaagaaaatgttattaagaaaattttaaggtttgagaaaaaattttagggttgagaaaaaatgtattaagtattcattaagtgggagtggatcatcataaagatcttccttttgattgtcctccactgagtaggctgaggaggaagaggaggggttggtcttgctttttcagggatggcagatgaggaagaggtggaggaggtggaaagggaggcaggagaggcaggcgcactcgatttaacttaatggaaatacatcataattactgtctgacatttttgctctttcagttctttaaaaatgcttgatatagtatgaattcttcttcaccatttgctttagtttcagtgcccatatcatagaagggtacaatttgcaaaagaagtcaaaagcagtcttcaataatcggaatccttctgcgagattgtctaatgtcaatttattttctgacactgcttcttctgtatcttcttcctcattgtctggtactgattcaaaagcactcatctcatcaagtcatcttctgttaattcctcaggtgtggtgtctattagcttttaagtatctccaagatctctgtcttcaaactctttatgcccaccttgtttttcttgcctgccatatccacaatttctttcatgagtcccttgattggctctgttttaagtcctgtgaagtcacgcacaacatctggacacagttttctgcagcgataatgtattgtttagggcttgatggctttcacagctttttctatacaacaaggacatcttccacagtgtaatccttctagattttcatgatgttcgccccgctgacattctcttccatagtgttgacaatcctttccatagaaaaccatgtgtaatgagccttaaagtgccttgtaaccccttgttctaatggctgaattagagatgatgtttgaggacatggagaccactttggctccttttgtgttgaattcatggggttctggatggctagaggcattgtccaatatcaaaagtaatttaaaagacagtcctttagtggcaaggtatttctgatttcagagacaaagcgttggttttcatggaaccagtttggaaaaagtgtttctgttgtactggccttcttgttctacaacaaaaagactgggagctggcgtttattttttcccttaaaggctcaaggattagcagctttatagataaggttattcttaatcataaattggactgtatttgcataagacgacagagttagtctatctcttcctggcttaaatcctcgtgcccgcttctcttccttacttataaatgtcttttgtggcattttttttctctagaatagggcacttttgcatgaattaaaaactggctcaggcagatattcattctcctcaatgcttctcttcatggggtctgggaagtcacctgctacctcttgtttggcagaagttgcttctgttatcttgagatttttaaagtcaaacctctttctaaaactagcaaaccatcctttgctgccattaaattctccagctttatatccttcagttttatttagctttatgttgtcatataatgactttgtttttctcaggtcatattagagtatataggtatgcctttcttataaccatcctacacccacataaaagctgcattttttataataaaattttatgtagataatcatgatacagaattactctttgacaaattatctatggatgtaatgactctagtttcagactttttttttctgaaatatgtgagcgttccccaacagtctggtctattttcctaccttaattttctacttttggtcttgaatttgttgatagggcacagaggacttcccatgaggctgtaaagaacttatttctctgtgtgggctgtgcacaccatggtgctgtcattaccattaccaccaggagactccttaaacacttaggatatatgatagttttcacttggttaaaaaatctgccagtttctcagtaagacctttctcactattaatctttaacccacagatggaatcctagttctttttatccattaactctttgaatatccttctttctaccttggcagtggagtccattgagattgaaaagctgcatttttaatatgagataaaaagatattttggaaaaagtgcaaggtttgaagcctgctggcatcactgcagtgaagacttactgaattttctttctttctttctttctttctttctttctttctttctttctttctttctttctttttaaacaaaggtccttatctggattcttttttttttttttaatgatcgccaaccacagctgcagtcctcaacctatggtacatatcaagcaattcaacttttcttgtaatatcatgaatttctctgcttcatgggagcacttgaggcatcactagcgacactttgtatgggtcctatggtattatttagagtttctgatatgcaccaaacatgacaaacaatgcatgagaactgtgagatcagtgtttactgtgatacacaatttactggagggatgaactgtacacatggagatgatcagcctcacacggcgtactgagtggatacttgcaacacttgaactccctgcaatagcaacagggggtggctatgaaattatcacaatagtacagtaggcacagttaactctatgcagttatgacttaatgctgcaaacttacctttgttacttttctcttgactacaaatggtgtcatgtatagtctgtaagtgtttgtgtgcataagttttgataaattttaactatttaaaatagatttgtgtctataatatggtagtaaatgataaaatagactcgttgctatatatattttaggcattcctgacatactcaagtttttcttaattttttcactattgtaggctatgtggcttatctgcaagtttttcaatttgttgcaaatctccataacattttctaatatatttattgcaacaaatctgcccataaatggaccaacaccgttgaaactcttaatgttcatgagtaaccatttatataaatgaaattaacttttacttattgtatcctgcaaccatgctaaacttacttatttgttcttggaggttgttgtagagtttgttggaatttccccatagatgatcatgttgactgtgaatgagatccttttacttttcagatctggatattttaaatttctttttcttgtttgactgcattgaatagaacaatgttgaatggaagtagtaattagcccccattcttggcatgtgtctgatctgaggagtggagcattcagtctttcaccattaaggatgatgttagctgtgggtttttccaagatgcccttcattagctttggaaacttctcttcttttcctagtttgctgagagtttttttttttttttgtcagatatgaattttggactctgtcaaacactttttctgtaactattaagattgctacatggttatacagttttagtttatttatatggtatgttacttagatttatttttaaagcttatttattttatcattaattatggtgaaatacacatagcataaaccttgtcatcttcaccactttaggtgcacagttcagtatccagtgtattcacattgctgtgcaaccaacaccaccattcatctgcagaactctcttcatcttcccaaactgaagcttgggacccattaaacaataattgcccattcccctctcctccaagccctggtgtaaccacccgggggattcaccttgcctgctgcctagacagagtcaatataacaagacaggggaattgcaatagagaaagagtaattaatgcagaactagccgtgtggtagaccggagttttattattactcaaatcagtctccccaagcaatttggggaacagtttttaaggaatacttggtgggttgggggaatccagtaatccaggagtgctgattggtcagggatgaaatcttaggcagttgaagctgtcttcttgcactgaatcagttcctgggtgggggccacaagagcagatgagccagtttattgatctgggtggtgccagctgatccatcaaggacagggtctgcaaaatgtctcaagcactgatcttaggagtggtttagggagggtcagaatctcgtaacctccatctgcatgaatcctaaaccataatttctaatcttgtggctaatgctagtcctacaaagggaatctagtcccctggcaagaaggaggtctgctttgagaaagggctgttattgtctttgttttaaacaactataaaataagtttctcccaaagttggttcagtctatgtccaggaatgaacaaggacagcttggaggttagaagcaagatggagtcagttaagttagatctttttcactgtctcaggcataattttgcaaaggcggtttcatttgcaaccaccattcctctttttgattctatgaatttctctattttagatacctcatacaagtagaatgatataacttccaactttaagtcatttctttgtccttgcatctaagtgtaggtagttacaagcagccaggccacatctggaatactttactgcttagaaatttcttctgccagataccctaggtcatcactctcaagtttaaagttccacagattcctagagcatggactcaatgcagccaagttctttgttaaggcatagcaagggtgacctttgctcaagttccaaataacttcctcattttcacatgagacctcattagcctggccctcactgctgatttttctatcagtattttggtcacaagcatttaaccagtctctaagaaggtccaagctttccttcatcttcctgtcttcttctgagccctccaaactcttcaaacgtctgcctgctaccaagttccaaagttgcttccaaattttcagtatctttatagcaacatctcagtaccaattttctattagtactattttctgttggtaccaattttctacccttcattacgttgccataaaggaatgcctgagactgggtaatttataaataaaagaggtttaattggctcaagattttgcaggctgtacaagcatggcgctgccatctgttcatattctggggaagcctcagggagtgtttactcatggtagaagatgaagcaggagcatgtcacatgacaaaagcaggatcaagagagagttggtgggggaggtccacacacttgaccatatcttgtgaatactcactgactattgcaaggacaacacaaagccatgagggatccacccccatgatccaaacacctcccaccaggccccacctccaacattgggtatcatatttcaacatgagatttgggtggggacaaatatccaagctataacactgaactgtgatttgacattttcatttgtctcatttggaatttttttccagtttcatgaatccttttgtgccacttcatggacctctcagttaacaaattttataattgtagatcatatccaagttgcatttaaagatactctttttgggaaaataccaaaaaccacagtgagaaatgaaacttcccttttttgccaattctatagaaaatgctcttagtagttttgtgtgcatcattttcattttttgaaattattttatgcatatgcagatatctaatgcatattctcacacctattttgttaaaatgtagtaccaggctggacatattgttctttactttgcatttttcatttgccaataaattatagacatctttagaggccaatacagactgatttgacaagttctttcagtaatgacatgaaagtctttactttggatttaatgtagttttttcaaccaattaatattgatatagatttaggcattttccaaatttgtctttttgcacattagtatgtaaacactctttaatactttctttacattactatatttccatattcgtagcctctgatgaattcttcatcatgtgcatccccagcagctttacttctctcattgaaccctgactgctatagaatggaagtagtggctgtggcaaagtagtgccttgtacactttttgacttgaaatacaggaggcagaagcaataggaatgagggtagaggctagaccatagctctactggagtttctgcaggaaaggcaaggtagggcaggagaaacagtttagcattggttggtttgaataatttcagtgggctctgaggtctaagggcaggccctttgctatctgtaataattggctgacccagggaggtgcactgcatccctaccagatagggatttttaagatgcaaaaatataataatatacagaaaatttaaaaatacacacaatacaggaagtattttattcttatggataaatacccaacagtggagtagttgtgatctatggtaggtgtatggttacctttttaagaatttgccagacaatatttacaagcggccagaccaaggtgccctcccaccacctgcatatgagaggtccagctgttcatactcaccaacactggatgtcttagtccgtttgcattgcgataaaggaatacctgaggttggttaatttataaagaaaacatgtttatttggctggtggttcattcaggcgatacaagaagcatggcaccagcatccgcatctggcgagagactcaggctacttccactcatggcagaaggtgagggtggagggtgctgatcacatggctagagagaagcaagagaaaaaggaggcaggtgccaggcttttttttaataatcagttcttgctgaaactaatagatgggaagttcactcattactgggagggggcactaggtcattcatcagggatccactcaaacacctcctgctaagccccactttcaacattagagatcaaatttcaacacttgatttgggagggacagataattcagctatatcatttgatatgctcaatctttttcattgcagctattttaacgggatgtggattaaacctcagttttagtttgattaccctaatcattagttatcttgaacgtctttacatgtgcctgtttgccatctgtgtaccttcttgggttattctctgttcaaatctttgctcattaaaaaacattttttaaaattgaattttaaagattatttatattctggatatttatcctttaccagtctgtagatgttttttttaaagtaaactctttttgtttgtttgtttttatttttttatttttattttttattattgtactttaagttttagagtacatgtgcacaatgtgcaggttagttacatatgtatacatgtgccatgttggtgtgctgcacccattaactcgtcatttaaccttaggtatctctcctaatgctatccctcccccctcccccaatcccacaacaggccctggtgtgtgatgttcaccttcctgtgtccatgtgttctcattgttcaattcctacctatgagtgagaacatgcggtgtttggtttcttgtccttgtggtagtttgctgagaatgatggtttccagcttcatcaatgtccctacaatggacatgaactcatcattttttatggctgcatagtattccatggtgtgtatgtgccacattttcttaatccagtctatcattgttggacatttgggttggttccaagtctttgctattgtgaatagtgctgcaataaacatacgtgtgcatgtgtctttatagcagcatgttttacaatcctttgggtatatacccagtaatgggatggctgggtcaaatagtatttctagttctagatccctgaggaatagccacactgacttccacaatggttgaactagtttacagtcccacaaaaacaagaaatggggaaaggattccctatttaataaatggtgctgggaaaactggctagccatttgtagaaagctgaaactggatcccttccttacaccttatacaaaaattaattcaagatggattaaagacttaaatgttagaccttaaaccataaaaaccctagaagaaaacctaggcattaccattcaggacataggcatgggcaaggacttcatgtctaaaacaccaaaagcagtggcaacaaaagccaaaattgacaaatgggatctcattaaactaaagagcttctgcacagcaaaagaaactaccatcagagtgaacaggcaacttacagaatgggagaaaattttggaatctactcatctgacaaagggctaatatccagaatctacaatgaactcagacaaatttacaagaaaaaatcaaacagccccatcaaaaagtgggtgaaggatatgaacagacccttctcaaaagaagacatttatgcagccaaaagacacatgaaaaaatgctcatcatcactggccatctgagaaatgcaaatcaaaaccacaatgagataccatctcacacaagttagaatggcaatcattaaaaagtcaggaaacaacaggtgctgtagaggatgtggagaaataggaacacttttacactgttggtgggactgtaaactttttattttacaataaatttagatttaaagcaagggtgcaaaaaattgcactaagaattcccatatatcttttgccagtttcccctattgctaaatgttagtttactgtgcacatttttttttattatactttaagttctagggtacatgtgcacaacatgcaggtttgttacatatgtatacatgtgccgtgttggtttgctgcacccattaactcgtcatttacattaggtatttttcctaatgctatccctcccccatacccccacctctcgacaggccccggtgtgcgatattccccgccctgtgtccaagtgttctcattgtttaaatcccacctatgagtgagaacatgcaatgtttggttttccgtccttgcgatagtttgctcagaatgatggtttccagcttcatccatgtcgctacaaaggacatgaactcatccttttttatggctgcatagtattccatggtgtatatgtgccacattttcttaatccagtctaccactgatggacatttgggttgcttccaagtctttgcttttgtgaatagtgccccaataaacatacgtgtgcatgtgtctttatagtaccatgatttataatcctttggatacatacccagtaatgggatggctgggtcaaatggtatttctagttctagatccttgaggaattgccacactgtcttccacaatggttgaactagtttacactcccaccaacagggtaaaagcgttcctatttctccacatcttctctagcacctatgtacatttatcacaactcattaatcaacactgacacattatgttgaaccaaagtctatgttttctttagatgtcattaatttttacctaatgtccttgttcttttctgggatcccatccaggataccgcatgacatttactcatcacatttgtttcatctcctctagcctgtgacagtttttcagagtttccttggttttgattactttgtcagttttgagcaattctggtgaggtattctgtagaatgttcctcagtttgagtttgtctgatgttttgattatggtaacacaggggttataggtttttaggaggaagaccacaaggtaatgtgttttcccgctttcttgcgaatggatacccaactgttgaagagtcatcttttccccacagaattgcctgtgcacctttgaaaaaacttggttgctcatacttctatttctgggtattctattctgttccaatgatctttttgtgaaatatttgattactatagatttgtaataagtcttgaaattaggtaataattgctctccatttttttttctattttttaaaagttatttttgctattgtaggtcttttacatttccctatgaattttagaatcagtttgccaatttgtacaaaaagatagcctgctggaatttagattggggttgtattaaatttatagatcaactaaggaaaaataacattttaacaattttgagttttctgattcatgaacatatctatttattcaggtctctcaccaatgttttgttgttttcagtgtacaatctttcacatcttttgtcagatttatctgttagtattttttatttttgatgctatttaggtgctgttttcattccaattttcaattgttcattgctagtacatttgacccttgaagaatgtgaggattgaggtaccaacccccgagcagtaaaaaattagcatagaaaggttttgtgggtttctttttgttttttatttttgagacagagtcgtgctgttttgcccgggctggagtataatggcgtgatctcagctcaatgcaacctccgcttcccgggttcaagtgattctcctgcctcagcctccagagtagctgggattacaggcatgcaccaccacctgcagctaattttttgcatttttagtagagatagggtttcaccatgttggccaggctggtctccaactcctggcctcccgtgatacgcccaccttgacctcccaaagtgctgggactacaggtgtgagccaccacgcccagcacacatagaatttttgactccctaaaaatttaactattaatagcctactgtgcactagaagccttaccaataacagaaacagttgcttaacacatatttggcatgttatatgtgttatatactgtattatcataatgaagtcagctagagaaaagaaaatgttattaagaaaatcttaaggaagagaaaattaagtattcattaagtggaagtggatcatgataaaggtcttcctcttgattgtcctccattgagtaggctgagaaggaggaagaggtgggttggttttgctgtttcaggggtggcagagggggaagaagtggaggaagaaggaggagagacaggtacacttggtgtaactttacagaattacatcataattattatttgacttttttgcctttgcaattctttgaaaatgcttttttacagtactagtccttcttccccatttgctttagtttcagtgcccattcatggaagggtttgtgttgtaaaataagtcaaaagtagtcttaataattggaagcctttgccaaactgtttaataggaatttgttttctggcatggcttcttctatgtcttctttagtatctggtactgattcaaaagcactcatctccatcaagtcatcttctgttgattcctctggtgtggtgtctattcattcttgaatttctcacagattcatatcttgaaagaccatatcccccaccttttgttgctgaattagagatgttgggtttgcaggcaagtagaccactttgacaccttcagtgttgaactcatgggttctgggtggctaggggcattgtccaaaaatcaaaagaactttgaaagaccgtctcttactggcaagatattacctgacttcagggacaaagtaatgatagaaccaatccagaaaaagtgttcttgccgaggccttcttgtacaacaaaaaaactggcagtgggtattgatcttttccctttaaggcttggaggctagcaggcttatggatgggggcagtcctatttgtaaacccaaacatacaaacatacaaactatgtcaaaggcatagcatgggtactgtgaaaggagggtgaaaacacaaagttgacatcacctctgacctcaaggagtgctcagcagactgagagagacaagtacatattttcctgaaggagggcactggagtgatggcgtgtttagaatgtgcaagttgagcggtcactgagaggcagctcagcagagtgctctcgcaaggattgggcgggcaacttcccactgcgtgcgatgtatcttaggaaagccatttaaaataggagacggttactttccatcaagtccctggtatggtccatggaagcagggttgtcagtctcatttcagcattttagaggcttctcagggtttggaaatggaagaagagaagcagcaatatgtatgcattgcagagacacaggcgagccccaatttaggaggttaggaggtcagtgctaagggccttgttttctttgcttagagcatgagttgccatcttctctggacagagagtatttggttgcctaaaggtaaaatctaaattttgctctgggacaaattccaaaaaaaattagctttaatcaaatttacttttactttatctttctgaaccttcaaggtccaaaagcattggttaataattctgcttctaaacttaacattgcagcacagggcatgttctgcccccaaggcaaagaccataagctactgttgtctggaaaacatacaaatagatatctcagcaaaagctactcatatattcttgttcttttgggtaaatcattgtcagtgactgattttttttttatgaaaggataaaaacacgccctctattggggtcaggttttgtgctggtatttctcccacctactgtatcataggagcttagattcccagctgcttgctctcagctgcagttctctgatggcttgcacagggtggaccagcccccttcctctatgtgtgtgtctgctgctgacctgtggctttgccgaggcagggaagctactggtagtgcccatggatgggagccactggttcaccatgaggtcggtggtggagaaactcattctcagggggcatgaggtggttgtagtcatgccagaggtgagttggcaactgggaagatcactgaattgcacagtgaagacttattcaacttcatataccctggaggatctggaccgggagttcaaggcttttgcccatgctcaatggaaagcacaagtacgaagtatatattctctattaatgggttcatacaatgacatttttgacttatttttttcaaattgcaggagtttgtttaaagacaaaaaattagtagaatacttaaaggagagttcttttgatgcagtgtttctcgatccttttgataactgtggcttaattgttgccaaatatttctccctcccctccgtggtcttcgccaggggaatactttgccactatcttgaagaaggtgcacagtgccctgctcctctttcctatgtccccagaattctcttagggttctcagatgccatgactttcaaggagagagtacggaaccacatcatgcacttggaggaacatttattatgccaccgttttttcaaaaatgccctagaaatagcctctgaaattctccaaacacctgttacggagtatgatctctacagccacacatcaatttggttgttgcgaacggactttgttttggactatcccaaacccgtgatgcccaacatgatcttcattggtggtatcaactgccatcagggaaagccgttgcctatggtaagttatctctcctttagcaccttaagaatacttcacctttggaaattaaaaaaggattctttactgaactgtgatttgacattttcatttgtttcatttcaaatttctttccagtttaacaaattattttgtgccaatgcgtgtactcgtcagtagcaaattttataaaactgcccttcttgaagatatgtatttataacttataaaattgtggaacatattcagcctacatttttaagtaccatgtttagaaaagtaccaaaaaccacagtaagaaatgaaacttcccttttttgttaattctatatgcccgccccagaggaaatggtcttagttttgtgaacattcttttaatgtttttaaaaaagtactttaggtatatacaatatctaatgtaaattctcacacctattttgttaaaataaaatctagtattgggctggacatattcttcttttctttgcatttttcacttgccaataaattataaatacctttatagaccaatacagacagatttgacaagttctattaataattgcataaaatactttactttggatgcaatgtagtttttaaccaattaatattgatatagatttaggcattttgcattttttgtctttatgaatagggccgtgtaaacactctttaatactttccttacatgaatatatttccatattcttgcttttatcttagttgactagagccctacatgtagggttacaggatttccatgaattgagaaggattggcatttttttgctattgtgtcttcctgttcaggaatatgtatgtctcactatttattcagatcttgttttatatacataaataaaatttttcactatataagcattttctgtttcttattaacatttattcctcagcatttcattatttttgaaactattgggtacaggacaatttttccatttctacatgtaactgactatgggtaattaaggttttgttttttgcatatgtatcttgtatccagccacattactaacttatcttattattttgtagtatacagtagatgtacaatatacaatgtcaactgcaaagaattcccttctctgatatttataccacttattttgctttgctggagcttatacttccaaagcactattgagtaatattgtgagagtagccagtttaaattttaaatagggattcaatcacttgtgattgaaaagtccatgacaaataccagaataacattcttagcaaatgtgtagttggctgaatccagattaaacacctaatgtctaatctcagtatattattttggagggatggagtatacaatttatctattgttctggctccttacaaggttcagtagacttggtaacacagtcatattctctcacatattggcagatgtttggtgaaagagtgactgttcagccaactcatgggaaagtgaaataatgctctttctaaaaagcaggaggactacagttgtaggcctttcaaaattaggcatgactttcggatcttcacaagactaggctaggagatgcaaatggcagaaatctaagaggttagacttgtctaagcacttttctcccctttaccctccataaattatagtatcctccattaattgtagtaacaggcaccacttatgtgttgcctgcaccccacaacctttggctgagggtaaggccctgccacttcctgaacccacactgaatttattgtgcctcacagcgtcacccagaggcctttagagatataaaaacctatatatgattttatatcacctatgatagagggttatctataaaatatgaaacatcaaactatatatggtttcatttattttgattataaatatcttttatgagatatgaaataaatgtgtttatgtgtctattaaagaatatggatgtatgaaagtttttatacttgtggaagattacatatattaatgtatgtatttatgactatacgtgtaaagccagcggagttctcacagaggaattcagaactcaaagaaggctttccggcaaagagccttggatatggcccaaccacagaagtaaattgtcattgacagaaggatggacacttcatattgctccttccttgtttcagatgccaggatgtgtctgggaaaagcatgcagttggttacatcttgctgggaaacaggattcagagtctgtgtcttatctgtctgatgagaaggaagcattacttgatgatggagtatgtgtttgcacatgtatgtgtttgtgtatgtgcaggtgtgtttgtgtgcagtgtcccagaccctgcataggggattttcttgaaggtctcctgtaacaaaatctccttgaggctatccaggggaattacatccagggatgtaattaaatactttaacaaggatggcagatggccccgtcttcaatgtcagggatcaaatttcaacgtgagatttggaggggacaaacttctaaactatatcattccgtgtggtcattcttttacattccagcgttctaatgtgtgtgtgttgattaatgatgtgtaaataattcagcagaacattgaaatagttttaatggcaaaaagaggaggtccctagtctttttgaatttttgatgagttccaacagaattaatgactggttttaggtgaaaagaattcaggctttgtctataccatccatggcaggtgcggctctgggggtgggatatggttacagataaataagagatctgtgcttccccccttgctgtaagattctggctatagtccaagatccaaattcaaagttagcttttggtggacaagactaaggcctcccactaaaattatttacttcaagtttttattttcaaagttttcaaacatacacaatggagagactcagtgtaatgagcacccacttatccattcttaggttaaataattttcactattttgctctactaattcatctatccctttattctatctttttaaagaaaacttttaaaaataaatttgtatgtttttaaaaagaaattcttggcatgtcattccatcactgaacaattcatttaatataaaaaataagaaaaatttgttacatagccacaatatcattatcatatctaagacaataaaaattctttaatattatctcatttacagtccataataaaatttccccggattgtctcacacaacatctttccatacagatcaatggaatagaatggagaattcagaaataaacccatacatatacatccttggccaattgactaggtgccaaagtttgacaagtgtgtcaagatcattcaaatgggaaagaatagtcttttcaacagaagacccaccctggggtccttgagctccagcgtcagactccaaaaccatttgtggaaatcatccagccacctcccaccatgcctctgatgaatccttcaccgatggattcatcagaagcatggttgatgatgaattcactgatgaatcacccctgtgtgcatccacaggggtcctgcaaatattttctcacagtctgttgagtgacttttcttacaaatacttcattgtagaataaatataggattatagcaaggttacaacaaatagtttagagaattttcatctaccctgtgtccagtttccaccattgttaaatctcatgtttctatggcacatccatcacaactcattcaccaatattgacgcataatgatgagctaaaagctaaagtctgtttccttcagatttcattaatttttacttaatttccctgttcttttatgggatcccagtgataccacctgaaatgtagtcatcatgtctcctttgtctcctccagcctgtgacggtttctcagactctccttgtttttagtgacttgggcagtttcgagcagtcctagtcaggtgtcctgtagaatgttcctctagaatgtcagtgtgtgttttgcctgatgttttcatcgtggtaaaactgggtttatagacttttggtaggaagacacagaggtcttttcttgttttcttgcgtgtgaatattcaactgtagaaaaacagaaccttttctccactgcattgcctttgtacctttgtaaaaacttggttgttcatacatctgtgcacgtatttctagactttgtattctgttctgttgatctatttgtgaaatatttgattactatagctgtgtaataatctataaatgaggtagtgttacctctaattttttttttcaaattgcttttgctattggaggtcttttgcattaccatatgcattttaaaataagttcattaatgtgtgcaaaaatcctgctaggattttgattgggattgtattttatttatagatcaactggggagaaacaacatcttagcaattttgagttttccaattcattaacatatctttttatttaggtccgtcatcagtgctctgtagttttcaatgtacagtctttcacatcctttgtcagatatatccctaagtatatcatgtttttgatgctatttaagtggtatttttaatccagttttcaagtgttcattgctagtatagttgacccctgaacaatgtgggaatgaaggggaccaacccgtgtgtagtagaaaatccgcatagaacttttgattctccaaaaacttaactactaatagccaactgtttaccaaaagccttgccaataccataaacagtcaattaacacatagtttgtatgttattagtattatatcctgtattatgacaatgcagctagctagagaaaagaaaatgttattaaaaaacgtaacatatgaaaaaatgctcaacatcactagttaccagaaaaatgaagatgaaaaccacaataagatatcatctcacaccagttagaatggctgttattaaaaagtcaagaaataatagatgctggtgaggctgctgagaaaagggaacacttgtaccctcttggtgggaatgcaaattagttcatcccctgtgggaagtagtttggagattttgcaaagaacttaaaacagaactgtcattcgacccagcaatcccattactagatatatgtaaaaaaaatcgttttaccaagaaacacatgcactggtatgttcattgcagctctattcagaatagaaaagacatgaaatcaacctaggtgcccgtcaacagtggcttagatgaagaaaatgtggaacacatactccatggaatatgcagccataaaaaaagaatgaaatcatgtcctttgtaacaacatggatgcagctggaggtcattaccctaagggaatatatacaggcacagaacaccaaataccattgttttcacttagaaatgggagctaaatagtgggtacttttgggcataaagatggcaacaatagacactatggactcctaaaagggagaggaaaggctgcaagagttgaaaaactattgggtactatgctcagtacttgggtgatgggagcaatcatgccccaaacatcagcatcacacaatatactcaggtaacctgcacatgtactcctgaatctaaaataaaagttgagtatgtataagaggaagtcattcatcataaaggtctccatcctcatcatcttccattgagtgggctgtggaggaggaggagtagatgttgattttgctgtctcagggtggcagaggcagaagaggtagaggaggtggaagtggaggcaggagaggcaggtgcacttggtgtaaccttatggaaatacatcataattactgtctgtttttttctctttgatgtatttaaaaatgcttttatacagtactaatccttcttccccatttgctttagtttcagtgcccataagggttcatgtcttaatagaagtcaatagcagtcttaaataattggaagcatttctatgaggcttgtattgtgtaaggccaattttttttctggcactgcttcttctacatcttctttctcatcaagtactgattggaaagcactcatctctatcaggtcatctattgattccctgagtgtggcatctattggctcttgaatttctccaagagtcatattttgaaataccttatccccaacattttgttgctgtatccataatcccttcatgacttccttgattggctctgtcataaatcctgtgaagtcatgtgcaacatctggtcacagttttctccagaagaaatgtactgtttggggcttggtggctttcaaagctctttctataataacagtggcatcttcagtggtgtaatccttctggactttcatgacattctctatccagattctcttccatagtattgacaaccttttccatagaaaactgtgtgtaatgagttctaaatttccttaagacacctgattgagagactgaattagagatgttgggtttggaagcacgtagaccattttgacaccttcagtgttgaacttgtgggttctgggtggctagggaatggtccaatatcgaaagaactttaaaagacagtcccttgctggcaatgcattttctgccttcacggacaaagccttgatggaaccaatccagaaaacgcgttcttattgttgagtccttctttttgtacaacaataaaactgtcagtgagtgttgatcttttcctttcaaggcttgaggtttggcagttctactgatgagggcagtcctgactgtaaacttgactgcatttacacaaaacagtagagttagcctatcccttcctgccttacattctggtgcttggttttcttccttgccaataaatgtcttttgtgtcatctttttttttgtttgtttgtttttgttttttccagaatagggcactgtcatctgtattaaaaccctgttcaggcagatatcctttgtcctcaatgcttttcttcatggcatctgggaactcatctgcctccttttgcttggcagaggctggttctcctgttatctggacaattttaaagccaaacctctttgtaaaactagcaaaccatcctttgttgccattaaattctccagttttagattcttcacctctcttttgctttaagttgtcataaaatgactttaatttttctcaaatcacattggcatctataaataagcctttcttatagcaatcctacacccacattaaagttgcattttcaatatgagacaaaaatgtatttcacaaaaagatgcgaggtttggctcctgctggcatagctgcagcaatgtcttcatgaatcttttcttctcttttctttctttctctctctctcttttttctttttctctttctttcttttgcaatggtccttatctatcttcattgattttgaaatggcaggcaatcatagcggcagagctcaatctacggtacctatcaagtaattcaagtttttttggtaatgtcatgatttttctttgcttcttgggagtacttgcagcatcattagttgcactttatagtcccatggtggtattcaaggtttaaaaaattacactaaacatgatgaaaaatacagtagaaccataagagatcattttttactctgacatgcaatttactagagagaagaaacgcgcagagggtataaacgtcatatcacatgcatttaggccacactttagctccctgcaatagcaacaggaggtagcaacaaaattattatagtagtgtagtatgtactagaggaaagtgactaagcaaatgtctagtaccagttagggtgtcctggaaggaaccatcttgtgcttctacaagaattatgccctgaggttggctgttgaatccctcacgaaatgctcctcagtgtgttgcctaacacacactgctgagctcacccattaaaatctgcatgatggaattcagcccaatgcaatgagaattcccatggacttcctctgtgcaaggcaaagcatgggtgctgtggaaggaggatgaaaacaggtagaagatgtaatctcatcctcaaggggtgctcggtagaatggaggaaacaatacatagattcctgaagatgagcaccaaagtgattggggtgggcccatagcaaaggcctgcagctctgttcagaatgcagaagcagagtgggcagagagagacagctcattagagtgcttgggcaagcatagggacggcgactcaccactgcagacaatgtatctgaggaaagccatttaaaataggtgacagtcacattccatcaaatttctggaagggtccatggaggcagggttgtcaatctcattacagcatttcagaggcctcagaagatttggaaatgaaaaaagacaagcagcacttgtggctcacctgtgtcacaattgtggctcacctgtgtctctgcaatgcgcaagtgagctgtgtattgcagagacacaggtgagccgcaatttcctcccagttaggaggtcaacgctaagacccttgctctctttccgtcgaacatgagatgccaatttctttctgggcagaggacaaaataaaaattgtctataaactttggccaggtgtagtggctcacgcctgtaatcccagcattttgggaggccgagatgggcagattgcctgagctcaggagttcgagaccagcctgggcaacatggtgaaaccccgtctccactaaaatacaaaaagttagctgggcatggcagcgtgcgcctgtaatcccagctactgaggctgaggcaggagaatcgtttgaacccaggaagtggaggttgcagtgagcctagatcttaccactgcactccagcctggatgacacagtgagactccatctcaaaaaaaaaaaaaaaaaaaaaaaattgcaaatttttctttgtgacaaattccaaaattattagcttcgttcaaatttactttcctttttatctttcaatgtcgtcaaggccaaaagcattgcttaataattttgtttctaaactcatattgcagcacagggcatgatctgtccccaaggcaaagatgatgagttactcttttcttgaaaacatataagcaggtatctcagcaaaggctactcatgtattattatgagtaaatcattggcagtgaatgtgaatttttttttaaatgaatgaataagtacacgccttcttttgagggcaggttctatctgtacttcttccacttactatattataggagcttagaatcccagctgctggctctgggctgaagttctctgatggctcgtgcagggtggactggcctccttcccctatatgtgtgtctactgctgacctgtggctttgccaaggcagggaagctgctggtagtgcccatggatgggagccactggttcaccatgcagtcggtggtggagaaactcatcctcagggggcatgaggtggtcgtagtcatgccagaggtgagttggcaactgggaagatcactgaattgcacagtgaagacttactcaacctcatacactctggaggatcaggaccgggagttcatggtttttgccgatgctcgctggacggcaccattgcgaagtgcattttctctattaacaagttcatccaatggtatttttgacttatttttttcaaattgcaggagtttgtttaatgaccgaaaattagtagaatacttaaaggagagttgttttgatgcagtgtttctcgatccttttgatgcctgtggcttaattgttgccaaatatttctccctcccctctgtggtcttcgccaggggaatattttgccactatcttgaagaaggtgcacagtgccctgctcctctttcctatgtccccagacttctcttagggttctcagacgccatgactttcaaggagagagtatggaaccacatcatgcacttggaggaacatttattttgcccctattttttcaaaaatgtcttagaaatagcctctgaaattctccaaacccctgtcacggcatatgatctctacagccacacatcaatttggttgttgcgaactgactttgttttggagtatcccaaacccgtgatgcccaatatgatcttcattggtggtatcaactgtcatcagggaaagccagtgcctatggtaagttatctcccctttagcacattaagaataatctggctttggaaattaaaagatttcttacagaatcataatttatcatttacatttgtcccatttggaatttctttctggtttaaggaattcttttgtaccaattcacttaattgttgggtagcaaattgtataaagcagctcttgttgatatgtaagtgtatacaattgatataattgtagatcatatctaggctgcaatctaaatgctatttttggaaaaatacaaaaaaaccacagtaagaaatgaaacttccctttttttgctaattctacactacccccagaggaaaatattcttagcagttttgtgtgaattgttttcaatttttttgaaattatactatgtatatgcatatatttagggtaaattgtcacttctattttatcaatataaaatctactatcatgctggctatgtttttttatgttagatttttctcttgtcaataagttaaagatatctttacaggtcaatgcatacagatttgacatgttcttttaataattgcatggtagtctttactttggatgcaatgtagttttccaaccaattaagattgatagagatttaagtgttttccacttttggggtttatgagcaataataagaattcttgtatactttctttacattatatatattttcatatttttgcttttatctcagtagggtatcatcctatgagtatggttgcttggttttcactaaatgagtgagattggccttcttttgctattacatcttcctactcaagaatatgaatccctcattatttattcggattctgttttatttccataaataaaattttgcactttataaaagtatttcatctttcttattaacctttattcctctgcatttcattatttttgaaaccattatgtgcaaggcaattttcccatttctcttttgaattcactatgcataattaatgtactgctttgagttttacacatttatcttgtatgtagtcatattactaaactctcgtattagtatgtaaggtgtattaagtatgcaatatcatctgcaaattattccctcccctggtatttatacctcttattttggcggagcatatagttccaaaatattattaatattgttggtctagccagcttaaattaggatttggtcacttgcaattgaaaaagtcgtgacaaatacaagagtaagattcttggcaaatgcatagttgctaaatccaggtgaaacacctggtgtctgatctaagtatattattttgttagggatggagtatacatttttatctattgttctggcttcttacaaagttcagtagactttgtaacacagtcacattctctctcatattggcagatgtttggtgaaagagtgactgttcaaccaactcatgggaaaatgcaaccaagcgctttctaaaaatcagggagactacagttgtaggcctttcaaatgaaacatgactttcagctcttggcaagaccaggcgaggagatgcaagttgtaggacgctaagaggatagacttgtcaaagtgtctctcccctgtttaccctccatcaattacagcaccagccatcactcaggtattgcctgcagcctcaccctctagccaagtgtgtggcctgccactttctgaacccatgctgagtttgttgtggctcaaagggtcacccaaagggatttagagatgtagaaattatatatgattctataccacctataatggtatatgatagagagatctataaaatatgaaacattgagccatatatagttttacatattttggttatttgtatatcttcagtggtgtataaaatatatgcatttatatgcctttaaggaatatacatatgataggatttatagatgtggaaggttatgtattaatgtatatatttataaatagaaaataaatataattatcaaagaagaattcagatcataaagagtgccctttggcaaagagccctggatatggctcaaccacaaaagtaaattgtcatagaaaaatttatggacactgtatagtgttcctttcttgtttcatatgggcagggtgtgtcttggaaaagtatacagttttttgtaccttgttagacaacaggattcatagtctgcatttcatctgtctgatgaaaagaaagcattgcttgatgatgcagtgtgtgtgtatgtggtgtttgtgcacgtatgtgtctgtatgtgcaggtgtgtttgtgtgcaatgtcttaagctctgcacaggagattttttttctgaaaggtttcctataacaaaatcttattgagtctatccaggtgaattacatccagggatgtaattaaatactttaacaaggatggtagatcatcattcaggagaacattaaaacggttttgttttgtatttttaatagagacggggtttcaccatgttggccaggctggtctctgactcctgacctcaagtgatccgcccgcctccgcctttcaaagtgttgagattacaggtgtgaaccaccacacccggacttaaagtggttttaatgagaaaaaaagaaaatcacttccacttttcttgacttgttggtgaattacagcagaattgatggttgaatccagttataaagaattcgagctgaatctacaccatctagggccagtgcagctctggagaactgggactgggatgtggttacagcaagaaaagatctatgctttccccattgctctcgcattctgtttttgatccaaattcaaatttacctgttactgggcaagcccaaggcctccctccaagattatttatttcaactttttatcatcaaagttttcgaacatataccaaggagaggctatggcataatgtgtacccatatagccattcttaagttaaataattttcaatatcttgctgtactgcttcgtctttctccattttttcttccattttaaagaaaaattttgactttttgttttaaagaaaatcttggcatgttgtctcatcacgaaatacttcactaaatataaaaaataaggaaaatttgtttcatagacacaatacctaagacaatcaataattctttaatattatctcattttcaatccatcattaaatttatcctgattgtctcaaaaaagtcttttatatgtagatcaatggaatagaatttaaagtccagaaataatcctgtacatcctttgccttgattttcatcatggtgccaagagcattgaaatggcaaagaatagtgtcttcagcagagggttctgggacaactgcatatccaagtccaagagaatgaagttgcacccttaccttgtatcatatataaaaattaacttgaaatggatcaaagacctaaatagaaaatctaaaactgtaaaactcttagaagaaaaaattagaaaaatatttgtgaccttggatttggaaatggtttctgagatttttttttttcttgtaccaaaagtacaagaaactaaaacaagaaaaacaagagataaatctgactttatcaaaatgtttttatacaaaagcttttgtatatcaaaggatactatcaagagaatgaaaagacaactcgtgtgggcgcccttattaaggtgtgcagataaacacacgcatgcttgacatggaggctctcccatgaaacatcctattttttcctttcctatgaaactttctgaacaggtgagcccaggtggagcctccacctgcgttagaacctaacctttccgtggctttctgaaatccctggtttcagaagttagtgtggattactgctgctttctttgactgtctctctctctccttcaatctatcttgataatgtgatatcaaacatgatacactacctctttggcccactcaggatattctggtggtgccctctggcctgcaccctcccaccggctatgaaggtcaacctcttgccttccctagcctcactggctttattttatgcaacactccaactctcctctttccacctcccctgttacttttccctacctattttattcctcttttctatctccttccccacctatgtctttcctttctgtcactttttctgcatgattcctgccccagaggggtcaacaagaaagggcatcccactggctgactcatgcagggaagctgtcagtaattaattagcaaggcagggaagttgtaccccaagtcttggtttcaacactagaggactttaggaggtggttcaatgtagtgtttgagcacgcggaccctggagtcctccaagcctgatttcataagtacttcagctgtgacacttgcgtaaacttgggtaaaaactcagcgttatctagattaaatatgataatacatgcagatgactggcatgtggatatgaatcagcaatacccgtaattgggtgggtgatatgcattttccagcacaattatctccaacctccacaagattaatgatcttaaccatgcattcagactctcttcagaacaacatggtgagatatcaatgttgtcttcttgatgcaagtttcccttgaatgatttaaacttcagatgggtggactgtctccttagggagaatttgcaaattaaatataataaaagctaacatatattggaggcttaccgtgtaccaggtgctaccctaagtatttacatggaagctggcattattggcagacctatttttcagatgatgaaactgaggcacagaggggttgagtgacttgcccaaggttatgcctcaagtaagtgggggagccagaattcaagaccatacattctttgtaaaaaaaaaaaaaaaaaaaaaaaaggaaagaaaaaaaggctgagtgtggtggctcacacatgtaatcacagcactttaggaggccaaggcaggaagatcacttaagcccaggagtttgagaccagcctggacaacatagggagacactgtctctacaaaaaatgttttaaaaattagctgggcctggtggcatatgcctgtggtcccagctactcaggaggctgaggtgggaggatctcctgtaaacccaggaggttaaggctgcagtaagccatgactattccactccactccagcctgggtgatagactaagaccttgtctcaaaataaataaatcaataaatacatgaataaataaaatttaaaaattgatatgtaattcatgtatcgtaaaattcagtggttttctgtgtgctcccagatacaatcaaccatcaccaatatctaattccagatcattttcctcactccaaaaagaaaccccatgcccactggcagtcactccttatttctcccccttcttctacccctcagcactaatttactttctgtctgtatggatttgcctattctgggcatttcatggaaatggaagcctttatgaccggcttctttcacttagttttgtggcttatccatgttgtagcatgaatcagtatttcattcctttacatggccgaatattccattgtatggatttaccgcattttttttatccattcatcagttggtggacatttgggttgtttcccattttcagccatgaaaaataatgttgttgtgaacatttgtatacgataaaccctgatgttctaattttcgagcccatgtgcctaacctctatacctgactgcctccctgtgttgacaggaaacttcttgggaaatgtcctatctccatccttttgggaatgtcacatgcagtgaaatgcgcctagagtgggtttgacttacatcacatggtctctaatccctcagcaaacatgagttcatcttgttttggttggtgttacagaataacaccctcagcaaacatgagttcgtcttgtttttgttggtgttacagaataacatgcagctggctcttttttaaaaaatttaatattaaacgtccttcattgaacaaatatctgttgagagtctttgagtgactgggatatggccataatcaaatgaacatggctttgccattctaatggagaggaaggcattgattagctacaaactgtgaaacatactttgaaagaaaaggatgtaaagagagctgatcatagggggccttgcaggataaggagtggcaatcttgggagaagttggggggatggtgtgccaagcagggaagatggcaggtgcagcatgaagccaaatgtttggaatcatagcatgttctttcccttcatccctatgtcccagggtctctttacttcataaacatggccaagtggaaatcctactttatgtctcttctgtataatccctttgtcatggcttaacttagtggcctgtgcccctccccactgctcctggaaccacaacccacattgttacaagcccctgaaggaagttataaacaccttatcttctactaggacaggtgcccctggaactgtctggctgggcaagccatacttacctgcacttccctattccatctgtgagtgattcagacttgactattgttatcatactaaactaaactggggttcactcacccagcacagtaagaccaaacatctacactgagatttgcaatgggagaaaggaaggcatttatgtgcagggcacaaagcaaggagtgttaggaggcttatacttgagacccaatctctctaatggcttgcaagtaaaggtttttaagagcaaggatacattttaggaaaacagaagttacaagaagaaatcgcaaatcaatacgcagaggttacacattggtttggtcatgagaagtgagggcttgcaggtcataggtgaattcagagattttctgatttgcaattagctaaggaagagaagcttggtttaaaattcggggttagcagaaaagaatgtttgctcttgctcatgagtgtgacttcctccaagaacaaagaatggctgtcagagttcagtcgttatttccccttatctgaggtctgcctgccaaagaatccatttggtgggagtccaggtttctgaaaaacaactcggggacatatgttatgatgtgatctgtagtttctataggaaaccaaacatctctggactctaactttcttggatattgttttaggctactattaccttcttgcttatcaagtgccttatttatttctcagggccaggtaggtgcctggaatttccttcgaaagaacccaagattttcctttatttccatgcttggaggaacccacaggcccctaaaagggattctcacttcatctcaccattttggaccttcctcaagatctgggcccagagcattctgacttctgcagccccacctcacagcctatcaaatagattaaattgctcctgcatcttatgtcacatatgtctttgtaacttggtgagctaatctgtagtggattcattgacatgtagttatgtttttatagccatttcataaaatattcataaattcaatgtttgccattttagtattctagattcagcaaatttcttattttaagtctcaaacattttgcaggtcctttgaaatcttgcaggtgggtcctggctccattacttatgggtcgtaggtcatacaagggtctgaaagagttagcaccttagaagcaaacctctccatagggtccacgtttccagaccttcctattcccaacatgaaattaccttcatgcacatctttgggtctctcctctattcaaaatgccagctatcctccatttactttttgggaaatctgctcttgccaacagagatttgttttatcttaggatctacttctttcaccccactggaatatgtcccaagcctgagtcattcagcctgcagcaatccctgagaaaaaaaaaaaatcggcctttgcctggacactcaagtgatacctgaggacaccttgactcctacagcaccaaccagggcaggcctgggtctccagcggagctactctttagggatcgtcattatgacgaacagacatgccagattcctctggctagtgtccagtgcagacatacacacacacacacatacacacacacacacacacacacaccattcttagtacagtcaaagctcacaggagaaagaaaaatgttttctaataccttcttaatttgcaagaaggtgttaggaattcaagggatggtatgcatagtgatgttagtttcatttcttcagctccttcctccaactcatgttctgtagggacttctgggactaagaacaggacccacatatgagcaacaggattttcagagcaaggctgtggttggaagggctcagaccaacgtccacagcagagtggaggtctagtataaagaatgtgaagtttgtagcatctcttgatcccgctattcctacatgcttgcttaagccattcttcctctagatgaactgttctttgaaggaaacctgcctaatgtctgcctgctcaagaaggtggacctgagctctgttccctttgcaaccttcctggagtcttattgctatctagatgaactcaaagcaagatgctgccgcccccatgactttgatcattgtaagctgccaatcctcttgggaggctgctcccagcttggactgagctgagtcttcgcatgccttgaacaatgaatttgcatcctggttatgttccccatgggggccagccctgtccttggagtggcccctctaatcatgttgctcaggcttcttctcccttcctgggccccagaacacctccggtgccaaacttgtgggtgggaacaggaactcgcgtgccagccaggtgtgcatgactagctctgggcaagtctgttctagtaattcaaggtaccacctctcactgggacagcctagtttctacacaggtcttgctctgggaccgccctcagcagtgtggttagcaggcagggccagtgtgaccctccctttctgggcctcagttgagaaacctgaagctcaggagaggagtcactcccctggcagatgggtggctgggccagaagcagataccaggctttctgactcctgctctaggattctcaccacgtactggctagacttatacttctcaaatcttaatttcctaaaggcaagtaacagtttgaatgttgttatattgtgatgtataataagaaatatatgtttgtctttgtttcctggacacagctcctgaaaccataagtggtgggagcgataaacgtgaacaaagaatcttttgttattcaaaacagatccctttcgatcacacctaagtttatgtaaaggagatgtaaagtctctaaggatgagggctagttgccagggaacaaaacccttgcgattagagggaagaaaggagagagagattgaagattgatttgatcaccgatgggcaacaatctaatcaatcatgcctactatgtatggaagcctacataaaaactcagaagggcagggttcagagagctttcaggttgctgaaggtgtggagggtggggcacccagagatggcagatggggctccatggccatacccccatatcttgttctttgtactttttcctctggctattcatccgtattgtttgcaatatcctttgtaataaaccaaacctagtaaataaactgttttcttcagttctgtgagccattctagcaaatgattgactccaagaaagagggtgtgtgaacctctgatttttgccaagtcagacagaagttgtgggtaacctggggacctactacttgcaattggtgtctgaagtgagggcagtcttgtaggactgagcccttaacctgtggggtccgtgctaactcagaattcagttcagaatggaattgaattgtaggatacccagctggtgttagagaataggtccgtgtgcaagaaaaattcccgcacatcatggacataacagacaacgtcaatgatgaggaatccagcaagttcgggatagagaattggcagggggtcctcaggggtctctccaagtcatcttcaaagtgttgctataacttttcagagagggagaagcagacttgtggagctgaagagaaacacccagaagctcaggtgaaagctgacacggccatagttggttcatattaaccatgtgattaaaatggttaaatattaatttgggttcttacatatcaaagggtaaaattcagagcaagggagaggtagacaggacctgtgaaaagcagtggttagtttagggaaaatacctaggagccctgtgatttggagagtgaaaactctttattaccgttgttactttaactctttccaggatggcctgcctccttcgctcatttcagagaatttctgcaggggttttcttcttagcactttggggcatggttgtaggtgacaagctgctggtggtccctcaggacggaagccactggcttagtatgaaggatatagttgaggttctcagtgaccggggtcatgagattgtagtggtggtgcctgaagttaatttgcttttgaaagaatccaaatactacacaagaaaaatctatccagtgccgtatgaccaagaagagctgaagaaccgttaccaatcatttggaaacaatcactttgctgagcgatcattcctaactgctcctcagacagagtacaggaataacatgattgttattggcctgtacttcatcaactgccagagcctcctgcaggacagggacaccctgaacttctttaaggagagcaagtttgatgctcttttcacagacccagccttaccctgtggggtgatcctggctgagtatttgggcctaccatctgtgtacctcttcaggggttttccgtgttccctggagcatacattcagcagaagcccagaccctgtgtcctacattcccaggtgctacacaaagttttcagaccacatgactttttcccaacgagtggccaacttccttgttaatttgttggagccctatctattttattgtctgttttcaaagtatgaagaactcgcatcagctgtcctcaagagagatgtggatataatcaccttatatcagaaggtctctgtttggctgttaagatatgactttgtgcttgaatatcctaggccggtcatgcccaacatggtcttcattggaggtatcaactgtaagaagaggaaagacttgtctcaggttggtgggtttatttcttttggactgccttgtttcttccaggctctgtcctccctcactcatttggctccttgagccgactgtcccttggaggatttcctggagaaacggtggggggaagtgatacccggctcggagcagcgggaacacataggagacctgaggctgaagtgatacagaggcattcggatgaagacagggctcatgcttggcaagagtaggagatttgcttagttggataatctgggacagtcacatactcattgaatgagccttagaaatgtcccagttcaaacagaggtgaaggcttgactaagggaacaggtccaggttaaaatccattttcccaactctgtcccatgctttgtctctggaccttgagccagggaccagcgaactacagcctgtgagcccaatctgcccaaaggcctgttttttgtttttttttttccttttatgttgagacctgtttttatatggcccagagctaagaatggtttttgtagttttaaaacaatttaacaatgaagaatatgtgccacagaagtatttggtctgcaaagcctacacatttactgactggccttttcagcaaaaggggtatggcctctgacctaagacaagtgtttacagatgccctcctgacatgtaggaaaagggcccagagttactttggaaaataaaaatctgtgagttttaaatttcaatgtaaatatttacaactttgaagggcttcaggcaactccctctatcttttatgcctcaattttcttttccagttccttttttatcagagagaaagcctcaaacaggtcccaaagacccttacctctcttctttacacctgctgatttctctgttaacaatttgaacagttggcagtagccactgtgaaaaggcaagggtgaggggatggggataactgaaatggttccagggattctggggcatgaaataaaaacatagaatgtcaggattcttttaattgggacataatatagttgtacacatttggggggttcatgtgatattttgatacacgtatacaatgtgcgatgatcaaatcagggtaattgagatatccatcaccttgaacatttattccttccttatgttgggaacattcccattcttcatttctagctattttgaactgcagtatacattcttgttaaccatagtcaccctactgtgctatcgcactttggacttactcattctatctaatggtgtttttgtgcccattaaccaacccttttcttttcttttttttttttttgagacagagtctcactctgtcatcaggctggagtgcagtggtgcgatctcagcccactgcaacctccacctcctgggttcaagcgattctcctgcctcagcctcctgagtagctgggactataggcatgtgccaccattcccagctaatttttgcatttttagtagaggcggggtttcaccacgttggccaggatggtctcaatctcttgacctcgtggtccgcccaccccagcctcccaaagtgctgggattacaggcgtgagctaccgcgcccggccttcttcttcttcttttttttttgatcaacgtgctttattggccctttagatgtttttctcttttctatcaaagtttttggagtattacaaattttatttcttttttctttttcttttttaaattttaaccaaccattttcacccccccttccctacttaccctttccaccttctggtaattaccaatgaactctctacctccatgagacccacttttttagctccacatataaatgagaacatgtggtatttgtctttctgtgcctagattatttcacctaacataatgacttccagttacatttatgttgctgcacatgacaggtcttcatccttttttatggctgaataattttccattctgtatatgtactatctgtgagtggaaaacaaaaccaacaaaaaactcaaagggtttttcctgttttctcactcaacaacaaacaacgcagaaaacttcagtgaacaaatgtgtggggttttttttctccacacaccaagcaagcaggcaattctgccagataccagctgggtgtcctctaattcagttctgaagatgtccacctgaagatagcatcaggtcccacagacatggggctcagtccctaatttacatttgaagaatgtaaattagtacagccactatgaagaacagtatggagagtcttcaaaacaaaacaaaacaaaaagaactagaactgccccaatatatcccattgctgggtatatatccaaaagaaaaaaatatatattgaagagctatctgcactcccatgtttattatagcactattcacagtagccaaaatatggaatcaacctaagcacacatcagtgaatgaatggataaagaaaacgtaggactgtaatatcgtgaaatatatatttggtcttcatcctcatttccttatacagatctttcacttccttccttaaatttattcctaggtattatatattctttgtacgttttgtaaatggggttgatttccttttcagttttttctctgttggcatttataaatgctactgatttttgtaagttgatcttgtatactgcaactttaccgaatttgcttgtcagttctaacagcttttgggtggaatgtttaaatttttctgaatatattatgtcatctgagaacaagaataatttgacttcttcctttccaacttggatgccctttctttctttctttctcttgcttaattgctttggataggacttccagtactatgaagaataacagtgctgacagtcagcatctttgtcttattccagattttagaggaacagttttcagttttacccttttcagtatgatgttagctgtggatttatcatatatggattttattgttttgaggtatgttccttctgtagccagtttattgagagtgtgtatcataaagggacgttgaattttgttgaatgttttttcagcatctacaacatatgagttctgtcctaaattctgtcaatgtattcatatcaatatatcaataaatgcatcaggattaattatctttttaacatattattggatttggtttgctggtgtttcgttgagatttttgcatctatgttcgtcagagatatgggcccgcagttttctttttttttgttgtgtccttgtctggttttggtatcagggtaacactggtctcacaggatgagtttggaagtattctctcctcttcatttttctgtaatagtttgagtggaactggtattaattcttttaaaaatggttggtagaattcagcagtgaatccatctggtcctgggcttttctttgatgagagactttttattactgcttcaatcttgttacttatattggtttgttgaggttttctatttcttcttcattcaatcttggtagattgtttgtgtttggaaatgtatccatttcctctaggttttctaatttgttggcatatagagttcacaataatcgctaatgatcctttgtatttctgtggtgtcagttgctgtgtttcctttttcatttctgattttatctgagtgttttctctttttcttagtctagctcaaggtttgccaattttgtttatctttttttttttttaaaaaactttttgtttcattggtctttgcattgtttatttagcctcaatttaatttattttttccctgatctttattatttctttccttctacaaagtttgagtttggtttacttttgcttttttagttccttgaggtgcattcttaggttgtttattcaaaatatttctgctttttggatgtaggcatttattgttaaaaacttctctcttagttctggttttgctatagcccatagattttgatacattgtgtttccattttcattcgtttcaagtaatttttaaattttctttttaatttcaagaaaatctaattaagaagttagtaagcaaaagttatgcatttatttaatgatttcttaccattgattgaatcaaatctattgactccttctcctagaagtctagggtattggaaaaaagtaaatgaaagctatttattcttattacaaagaaatatttggtgtaagaaggaaaaaatatcatttctgcacattggtaccaattatcttattttttcaaaaagttgtactcagttatattgagaaactgggctctaatgaatgtactttttgagccctgtgaccctgtatctggtgcttgaccttgtttgtgtctcaactgtattcccagcatgtcgtcctagagaacattctgtattatgatatgtaattatcaacatgcacttttaattattaggaattaaattaaagtgatcaaaatagaatttcttttgtccaataatcaaaccatttcaacactatgaaaaaaaatgtgtctttggacagatggaaatgtctggaaccagatagaggtgtcagttgcaaaacatgaatgtgctgaatgccatgaaattgttcactttagcgtggtgaattttatgtgacttcatcgcaataaattatttaagaaaagaagatatatcacagatcatagaaaatgaagccctgatttatagcttaaaaatgcagtcctcattaggcaaatcacataatcggcaatacataaagtaaacagaacacgagtggccaacaaaactttaagaacatgtttaatttcagaaataatccaagaaattcggattaataaacagtggaattcaattttgcctaacaggttagtaagcatgctttataggtaactattggcccaactataaaacaaatacatttctaaaaaaaatgtgcaaagccttttgaaaaccatagcttggtgaccattttttacataatgctatgattcagaaagaaagagtatcctttctcatggtaacctctgggctcccagcctcgccttgtggaagagtaaggcaggatcacttccctcttattcccatgttggtgtgactttgcgactttgaccaaagccttacctgcctcctctgcccaaggagggacgtggccgtctcagagggctgcttggtttctgtccaagctggcccttggggaagccctttggccacccaggtggtgattcctgctgtaagaacatgagaggctgagccaccaggcagtcccagatgtcctgaaacaacttatcccagccctgcccagggccttctctctagccctgtgcacctcatcacctgccccaaaacagttctacttatgtcagattctcatgggtgccttgcaacctttctgtctgtctctctgatcctcacttcttcttcagaatctcatgctgttgcatgaaaaaaaaacaaaaacgaacttttgtttttaggcccctttcctcttcctataggggcttgaatccaggccagatgctgggacactcttatgctgtcctttttgctattttgttgagtttcatccaccctagggctaacctcttttcttattggtatggctagatttcaaatatctcaattttagaagagaatttagctttgcatttcattattagaagggtcattggagtgttttccttagaacaaaggaggtcagaagtaaatcctagtctcttctacttgtaatacaaagaactgttcaagccttccgaaggacagggccattcacatcatagagccaggtcatggccagagctctggctctaggacatcctttcttcccagcctggtctatagaaaggaatagaatgcaagctcaggcctagagcctagctaggcctgaatacaggctgaaactttctcgctgagaggtgataaaaacaatgaatgtggttttcttgcagcattttttacggagcgttttcccagaaaactagaccccagttcctcaggactagttctgttcccaagtttcctcctctcatattctggagtcatctaaatagtagttctcaaatagaactaatttttcccctaggacagatatgtctgaagacatttttggtgttgcaattggagaggcgaaatagtcagtaggatatacgtagaggccaaggatgctgttgaaagttgtacaatgtgtgaaaaatacccgtcccccaactcccaacaaagaattactctggctcaaaatgtcacgagtgctgaaattgagaaactctgatctaaatcaattccaagtgaatccagtggtgtctacccagcaaggcccccagcctggaggtgtggagggcagcaaggatcctgtgcccaccctctgagctgtttgtctccctataggggtctttacaaggaatgctcattcaggctgaaatctcagcctttgttggctgagctgtgggttcattctaggcaactcagtagaacaaaagccccaaaatgccaagtcattcttaataggcactttttaaaatacgtgacttaggccaatgtctacaatgcctttaaaattctgcctctctttcaaaaccctgtgcttatctttatggctgattatctggggcatttccaggcatgtggaacattttggcagcagtgtttctgttaatagataattatctaaagagtagctgaatgctagaatgattcagctaaaaaaagtattcaacatgagtacataaaagcctagaaacttgactgtctagtaatttagataactctaggagaatgagaataaggggttataaaaatataactttattatgatgcaatttattatgatacaattcactctttttttgggggggttccagtaagatttaatgactttaagtgtttacatatttctacttttcagcacaaattcgtgataatatataaactacactttgaatgtttttttctttttttaaaaattttattattattatactttaagttttagggtacatgtgcacaacgtacaggtttgttacatatgtatacatgtgccatgttggtgtgctgcacccattaactcgtcatttagcattaggtatatctcctaatgctatccctccctcctccccccaccccacaacagtccccggtgtgtgacgttcctcttcctgtgtctgtgtgtgattgttcaattcccacctatgagtgagaacatgcggtgtttgattttttgtccttgcgatagtttgctgagaatgatggtttccagtttcatccatgtccctacaaaggacatgaactcataattttttatggctgcatagtattccatggtgtatatgtgccacattttcttaatccagtctatcattgagggacatttaggttggttccaagtctttgctattgtgaatagtgccgttataaacatacatgtgcatgtgtctttatagcagcattatttataatcctttgggtatatacccagtaatgagatggctgggtcaaatggtatttctagttctagatccttgaggaatcgccacactgtcttccacaatggttgaactagtttacagtcccaccaacagtgtaaaagttcttagagatctacaaagagacttagactcccacacaataatagtgggagactttaacaccccactgtcaacattagacagatcaacgagacagaaagttaacaaggatacccaggaattgaactcagctctgcaccaagcggacctaatagacatctacagaactctccaccccaaatcaacagaatatacattcttttcagcaccacaccacacctactccaaaattgaccacatagttggaagtaaagcactcctcagcaaacgtaaaagaacagaaattatagcaaactgtctctcagaccacagtgcaatcaaactagaactcagaattaagaaaatcactcaaaaccgctcaactacatggaaactgaacaacctgctcctgaataactactgggtacataacgaaatgaaggcagaaataaaggtgttctttgaaatcaacgagaacaaagacacaacataccagaatctctgggacacattcaaagcagtgtgtagagggaaatttatagcactaaatgcccacaagagaaagcagaaaagatctaaaattgacaccctaacatcacaattaaaagaactagaaaagcaagagcaaacacattcaaaagctagtaaaaggcaagaaataactaagatcagagcagaactgaaggaaatagagacacaaaaaaaaacccttcaaaaaattaacaattcactaattttaatggtttttggtatagtcacagatttgtacaaccatcaccatagtcaaccttagaacattttcagtcactcccaaagataccttatatctattatcagtcactcttctttctctccttcctccagcccctggcagccattaatcaactttctgtccttatgaatttgcctatttctatggattccattcacaaaatacatgaatagctttttccctttagcataaagagttttgtatattgatcttgtacttcaacatttctgaacttgtttatttgttctaatagtttttttttagtggatttcgtaggattttctacattccagatcatgttatctacaaatagagatagcgttacttcttcctttctaataaggataacatttatttcttttgcttatctaattgccctggcttgaacctctagtaccgtgttgaatagaagtggaaagaggagattcttatcttgttcctgatcttaggtggggaagtattcagtcttttagcagattaggtcttaactggagattttttgagtagatgccccccacattatgagattgaggaaattttcatctattcctagctcgttgagtattcttatcatacctgaggtgtttggttttgtcaaatgctttttctgtgtctattgaaatgaacatggttttctttttggtcccctattctagtgatatgtgttaattgatttgcaggtgtaaacgaaccttgtattcctagaataatcccacttgattgtgttgtataatccttttacatgttactgaatttggtttgacagcattttattgaggacttttgcatcatatccataagagatattggaagtcttattttcttgcggagccttggtctgtgtttgctatctgaatattactggccttgtagaagaaactggggaatgttctcttctattttttgggaacagtctgtcaagaattggtattcattctttacatatttgatagaattcactagtgaagctgtctgggcctaggcttttcttgcaggaggttttaaaattactaatttaatctttttacctgttatggctttatttagattttgtatttcttcttgattcaatttcagtagtttgtttctttctaggaatttgtcaattttatctaagttatctaattccttggcataaaatggcccagagtgttcccttataatactttctgtttctgtaaggttggtagtaacattccctctttcatttcatatttttagcaattttgagtcttctctcttttttctttgttaatctaactttaggtttatcaattttgtctatattttcaaataaacaattttggttttgtttatttttctctattgcttctctatttctatgtcgttaatttcccctctattctttattattttctgccttcttgctttgtgtttagtttagcttcctggtggagtgacacttatcattacacaatttcccactttattgctagtaatattttttgttttaaggtctatattatcttgcttcatgatactgtgtcattaaaaaagtctattttatctgatattagtataaccaatctgcatttcttttggttgctgtttcatgatatattttttttccaccatttaactttgtaaaatttaagttttaaatataaacttttttttgtttttaaatctcaaatgtatcttctgcagacaagatattattagtccttgtttttaatgcagtctgataatctctgtcttttaattgagttgtttaatccattcacatttaatactattattgatgtagatggaattatgtctaccatcatttttttcttttcttttttttttgagacaaaatctcattctgttacccagactggagtgcagtggtgtgatcttggcccactgcaacctccgcctcctgggttcaagcagttctcccacctcagccgcccgagcagctggaactacaggtgtgcaccaacatgcctggctaatttttgtattttttatagagacagagttttgccatgttggtcagtctggtctcaaactccttacctcaagtgatccacccgcctcagcctttcaaagtactgggattacaggtgtgagccactgtgcctggccccattttactttttatgctctatatctctcatgtatttatttgttcctctgttctgcctttattgctttttttttttttttgcattgagtgaatattttctagtgcaacatgtaaaatcctttaatgtttttctttccactatttaaaaagttgtgttctgagcggttgttctagggcttagcacatcgattttaacttaccagtatctacttcagatttataccaacttaattccagttaaatattgaaatgtcattcctatatagctctatttcctttctcccctttttatgatattattgttatacgtggtacatctatatatgttacaaactaaacaatacatggtgataatattactttatataaatacacatgctttcaagaatcagagagaagaaagaagagcaagtatgtatttatagagtttgttatattaacctttttgcttatcatttttggttcttttcctttgttcttatggatctgagttaccttatggtatcatttcttagcccaatttgcctttgctcccaactgcctcccttgtgctattattgtcaaatatattacgcttccatatgttatagtcccaacaatataattatatatatgtatattgctttttaggattgcttttaaaatcagttaagagaatagggccgggcacggtggctcactcctgtaatcccagcactttggaaggctgaggcaggtggatcacctgagaccagcctagatcaagaccagcctggccaacatggtgaaaccccatctctacttaaaatacagaaattagccgggtatggtggcaggcgcctgtaatcccagctactcgggaggctgaggcaggagaattgcttgaacccgggaggcggaggttgcagagagccaagatcgtgccattgcacgccagcctgggggacaagagcgagacttcgtctgaaaaaaaaaaaaagagagagagagagagaataaaggggaagtatgcattggtactgccttttataactacatgattactattatcagtgctttttttctgtatgaattcagattattctatggggtcacttgctttcaacctgaagaacttcctttagtatttcttgtaagttgagtttttcagcaacacattctctcaatttttgtcttattacatggggttttgcttttattttgtttgtgcctttaaaatgatactcatcagagacttgtcttcagaggtggctcataacttatccttcagaattgcacatattttttagcagacacacatgaggcaaatttaatgataataaatacctttttaagaatcagggtggggagattaccttcagctgtgaagagcagctggtgatattgcttgtggcaagggatagaaatggtttatggatctgggaaaggctctgaagagagaagaaactgagttgacagttctaggaagttgaaggtcttctcataaattatagttgtgagataatattcacaacgactggtataaaaattcaccagtatattgttatcttttaataccctgagcaggtaggtcggtaacagatcagctgcatactttgagtgtcttagtgcaaaatgccccttgttcaaaaattattaagaatttcaggccgagcacagtggctggagctgaagtgggaagctgaggcaggcagatcacttgaggccaggagttcaagactgccctggccaaaatagtgaaactccttctctactaaaaagacaaaaaattagctgggtgtggaggtgcatgcctgtggttccggctactcaggaggctgaggtgtgagaatcacttgcacttggacctgggaggcagaggttgcagtgagccgagatcacgccactgcatgccagcctgggtgacagagctagattctgtcttaaaaaaaaaccaagaatttcaggacactgacagcaaagtattaaacaaagcatgagaaccttctaaatgtggaatgtggtgtgtctgcccaggctgctcctccacaaagctggcccaggcaggggcaaatgtgcagctgggagagtgagagaaccagggcagctggattgcccaacctcaggggtggggcccagtgccaggtactatgtagatagtgccttttggaactattcaagctggtgaccctgaaaaaacattcttccaatttaggccattgtacaaaagcagaggccaagtacatttaccactcaaacttcacgtggtctttcagccacagacttggtcaaagcaaatgaccattgaggtttcaccataggctgggtacatgagggtgtccaggctggtgtgatgctgaggattttacagcggcttagaaacacagctttttttctaggtgtttctcaaaccttagggtaagagtggagatgggaggtggacctaagtatgtgataagaagactagagaaatgagtgtttctactgtgtctgtgccccatcactgtaggtctgatttctactccccaccccactccttcttgtcactgaaaagtcatggaattctggaatctcagggttgacagtgactgtgaagcagagtgccgtacactggtatccatctctgggagagaaataccatgcaccaattaggttgggttgccaatcccagggcaggactctaaacacctcagcagtctttactaagattcctagacctggcacttcccagctctggttggaggcattttacaatcctagctgccagagtatgagtctggtgagatggaatgcttgtgcaagtcaggcaaagaaacttgattcttcacagataggcagtaagaatcaacaggaacctaggatccatggtcagccagcccccaaggtagaggaagctgctcaggtggacagagtcccatctgcatgtgctccactttgcatggcagctgagggacccccaaaatactctgcattaggctttctatcccggaggtcactgcagtttatcagcacccagacatccatcctgggtgcctgccctccgttctattccctttccatcttttctctgacttttgtgatgattatttctcttgtgtttttcttcatcagcatttattttaagttccagggcacacatgcaggatgtgcaggtttgttacatagctaaacatgtgccatggtggtttgctgcccagatcaacccatcacctaggtattaagctcagcatccatgagctattctttttgatgttctctctccctcgactatttctttgcttttctttacaattttgccacctaaatttgcatctgtaaataatacagatgattttacctgtttcggtacttaacataaatagaattttactgtttttctttgtcttgccttttttttttttttggttcaaccttatgtttgagagattcatgatgtgtgtttttacaagttgtagtttgtggattgtcagtactgaatatatcccattgtatgaatacaccacaattttatttatccattctactgttgatgggctttgggttgtatctagcttttcactactgtgaacaatgttacaacgaacattcttttacattctgaaacacatgtgagtgggtttttagagtatatacctaggggtggagctgctgcgttggagggcgtgcatatcattaatttaataagatgtaactatttttcagagtggttgtacatatccctgattgctaaggcattagttatgtacatgactgattatattgagggttttaaaatatacttatcagtcatttggatttcctcttttgcccattcaagtctattgcccactgggttgtctactcgaattatgtatgcattctggatactagttctttggcagttatagatattgcaaatatcttcccccactctgcatcttgctttttacttttattcaaacgaattagaataaacatcttagtatatgactcactgtgctcctgtgtgggagtttccacaggggagttgccggaaaatggacttactgtgtcgtgcacattttaaatgtcattaggcattaacaatttattcttcccttagcaatgtataagtgtacactttccttcatatccttgccacatgtattatcatcaaatgctttcagtttttgacaatccaataggtaaaaaatatctcaaggttatttgaattttcatttcccttattaattcttcatttaaacgtcttttgtgtgtgtgtgtttactttcatcaagttgtttcaccagtgaagataagaactggtatttaccttctgcatttaatagaattgatgcaactggctgagcgtggtggctcatgcttataatcccagcactttgcggggccgaagcaggaggatagcttgagcccaggagtttgagaccagcctaggcagcatagtgagattccttcactacagaaagtaaaaacctagctggacatggtagcgtgtgcctgtagacctaactactcggaaggctgaggtgggaggattatttgagcccaggagttcaaggttccagtgagctatgtttgcatcattgcacctcagcctgggcaacagagcaagaccctgaccaactccccacccccccccaaatcaatgcaacctgtgatcactttatttgggcaacttccccaaattcttgactcagtgaatttgttgcagggcttttcttttttaatctcttttattggttcacatactagaacaatctcaggggctatctggttaggtattgcttgctacagagccaaactatgtcaccagaacccatttatatgtttccatttcttgtctctgtttcctcggccgtggcatccttctcagtgtcataatacccaagcagcaggggcttcagcctgagttcttttcccaggattcctagttaaagttcttctgcctcattggctctaatgaagtcacatgcccatctctgaactaatcatggtggccaaggggatgagacgtgctgattggttgaggcctaggtcacatgttctatcctgagctgggagtggatcctcaccagaagtacatttgagagtttgggggaggggtggccgctgggatgagataggaaataacttgtccacgctgtgaattacccttcaattaatgatattttctatttagatgtcagattttttgttactagtttgtcatataaacctattactatatagatttttctgtgtcctaatctaaatttcttttaataatctatgggtgaacactcaataagaatgtcctccagaaaggatgacctgccgacttttaaagcaatcattttggggcttataagtatttagtatttgaagtctctgcctcttgctctcttttaggaattctttttcctactgtgatatatgtaagtacttataaatttaaacttaaaattcaaaaaatataccaggatgtgaaagaaacattattaaatataggtgttttgctgtgagtgtttcttggaataggtagggctttgtatagtaggttttggtcttttggtcagcttgggaaaattttgttcttttttaattgaatgatatgttttcaattgatactactaaaataaacattattggagtattatttacatgcaataaagtgcaccgttttaatgatacatttctgagttgtaatgattttatttagctgtgcagccatcaccacattcaagacacggagcactccattacccagtaacttcccttctgtcctatctcagtcacctaatacctcccctcaccttaggcaaccctggatggtttctgttgctggataacagaattgtcttttctagagtttcatctgaatggaatcatacaattatgaatgaaaaacacacaggtatactgttttgtgtctggcctctttggctcggcataatgtctcttcagatcctttcacattgttgcatgtatcaatatttcattcgtttctatttccgagtagcatttcattgtatagatatatcatcatttgcttatgcatttatttattgatggacatgtggatagtttccagttgttggctattatgaataaagctgctatgactattcgagtacgagtgtttctgagatttcatttttcttgggtaaatacttaaaagtgggattgttgggttgcatggtaggtgtatgtatgacttcataagaaacagtcgaactgtttccaaagcagttatacaattttacattcctaacagcaacgcattagagttctggctgctctgtatttgtgctaagacttgctatttttagtcttttacattttagccatcctaatgggtgtgtagtagaatttcattgggtttgaatttgcattcctcttatgactgatgataatcttttcatgtgcttattgatcatatgcctgttttcttttaaaaggtgccctttcaaaatcttccgcacacctttattggtttgtttgtcttcttatatttgagtagtgagttctttacatattctggatacaagtgctatgtcagatagttgtgtttctgtttacttctggtgtgtggtgtcctttgtttcattttttaaaaaacaacgtctttcaaggagcaaaagttgcaagttttgattaagtcaattttagcaaacgttttgtgttttgtacccctcgtgccctatctaaggaatctttgtctaccaaaaggtgggaggatttgtttctatgttttttaaaaaagttaaacagtttaagtttgtaggtttgggtggaaagaggtctttagaccacttagtctttgtttaggtctttgtttatgtctctgagattggcagaggggaatatacaatcattcagatcaggctattggatgcctttttctatctctgaatttttctggggtgacctcactgacacccatggcttcaatcaccacttatgctgatggctccaagtctatctgtgcagcccagacccctcctcatctccagaccctggaagctgatgccttgggctgctcctcctatttcctgggcaccaggaatatgagctactccctccccacagtcctgctctccccagtgctcccatgtcgctgaaggcaccaccatcttccaagatacatgggcctccccagggtctaggagtcctagacgtgggagtagaaattagatgacattggtgtctaaacaaaacaccactgcatggagatagaacaggggagccccctgaatgtggtgagagcaccctcccaggtgtgttccaccctcaccccgggctcatcaggagggtgcttaggatgcatacagttttaagggggttggaggaatagttcagaggctgagatgttgcacccacagctgagaatccctttctagcgctctgtgtcctcacaactccccgggaatcatcctcccctggagagttcccaaagcccttgcaggcctgccttctctgtgccttcctgcctgcgccctctggtggacagctccattcgctgcctgtcccatgggttctgtccaaaggtggaatctattatcaatgtggatttctaatgggggtaacttcctccctaagggaagcctcagcttcaccagcaatggcagacacggccaggcatgtagacacagaggaagtgagatagaaagtgtgcacagcccagagagcctgcccacatcatcctggggcgaccaggacaaggaggcgtcagcaatcttgccaagcacaagtatgagtgactttctggagcaggacgagtctcatgggcgtgagaccattgtgagtgctcagggtctctccattagaaaggcacacgtttaattctccattttgaaatttgaactagagcccccacaaattattctgttctggaggaaccattcttatcagaacttggtgctggattgacttggaaaaaagcctgaccataatcttcaggatgaaataaaggcctggatgaatggacacttcagtctctaagcagacttgcagaagactggagccttcagcattcagaagaggaattcagactgtgcaagatctgaggccaggctccagctcccccggtcccttggtgagcaggagctccctgaacccaccatgggtctttgctagggttgtcttgcacatgtgtgctttagacagcagcacctcttcttccatggtgtagatggagaatcctcaacaaagcctttccaagaatctgatcatcacatcttgagctcagcctccctgcagctttttttatattgacagccacttcagagagagtcctctttgagctttacaagaaatatcctggtgtgaaaaacgaccaaaaccagatagccagcctccccactccctgtttaaagaaagctggcttagcaatgttgtctgcattttggatgtgctgtgttacccatatgtgggaagaaagagtattaagagttagcaaatagggtcacatccagcagagaccatatggttggggactagggcaatggtgactcctcagacctcagctgcagcctgataaacgtggttaagagagaagtaggagacagtgacatgaaatgggggttcacagccttgtgttgggaattgaatgagaaacaagagcttgaacttggatgttccccagagcgagcgcaaggtcagatgagtttttcaagataggagtgatcggtctttcccagggtggggcccataatgcaagacaattatagattaacgggtaataagtaactggaggagggcactctgtcttcaattacatgttgatttgctaggtgtctcagtgacaaggtaattaagacgaaggaaacaattctaggaggcacaacgtggggtggacagtcagctgtcggtggcttctgctgagatggccacaggactccaggttcccctgccgcagctggccacaggactgctgcttctcctcagtgtccagccctgggctgagagtgggaaggtgctggtggtgcccactgatggcagccactggctcagcatgcgggaggccttgcgggacctccatgcgagaggccaccaggtggtggtcctcaccctggaggtgaatatgtacatcaaagaagagaactttttcaccctgacaacgtatgccatttcatggacccaggacgaatttgatcgccttttgctgggtcacactcaatcgttctttgaaacagaacatcttctgatgaaattttctagaagaatggcaattatgaacaatatgtctttgatcatacataggtcttgtgtggagctactgcataatgaggccctgatcaggcacctgcatgctacttcctttgatgtggttctaacagacccctttcacctctgcgcggcggtgctggctaagtacctgtcgattcctgctgtgtttttcttgaggaacattccatgtgatttagactttaagggcacacagtgtccaaacccttcctcctatattcctagattactaacgaccaattcagaccacatgacattcctgcaaagggtcaagaacatgctctaccctctggccctgtcctacctttgccatgctgtttctgctccttatgcaagccttgcctctgagctttttcagagagaggtgtcagtggtggatcttgtcagccatgcatctgtgtggctgttccgaggggactttgtgatggattaccccaggccgatcatgcccaacatggtcttcattgggggcatcaactgtgccaacgggaagccactatctcaggtctgtattggtgcctttatccaatcaatgttccaggcaaaacactttttaaaaaatgtatttacttacaagtgcttccatatctacttatctttccaaagatttcatttctgcttctcattgttgtaatagtcttcagtgagataaacttttaaagggtcaatggtagtgcagttcagggtttcaatggccactgagaggaaggagaggcagggacgaggatctgtcaaaggatgggcaagagtggtgtgactcacggagactgttcgtttgtaaaagcaccatcttcatggctgtggatgtgcttcagctgggcaggagcagggacactacactgagaactgatccatccaatcttgctggcaagattttcagtagaaaggaggaaggaatagaaatttacaattgttgacgtgacaatttttagtggtcccatcttgcaaaagatagagaggtgaccacaggagacctaagcactcagaggaagtagaggtttcaaagaagttgactcagttcagtggaattgggccaatgtaggtgcaatggatgtctgtgatcagagaatgaaacacagagttcagtttccagagagggagtgttggattgtaataggagaatgtttcttgtgaagacactacttaaaaaaaattcttactaggttaacttcatggtctaataccgaagtgtccaatagaaatatcatgtaaaccacatacataatttaaacttttctagtgggcatgttaaacaccagcaaaaagaaaccactaaaattaatgtgaataatgcattttatttaaccagatgtatcccaaatattatcctttcaacatgtgaactgtttaacgtagctttttttgttgttaagtcttcaaaatctagcatatatttgacacttacagtatatctcaatttggaatagccacatttcaagtgctcaatattcatatgtagttagtgacaacaatatggtgaatgtttataaatattccatggataaaactaaaattctatcttttaaatttttctatcttttgagatggagtcttgctctgtcacccagtctggagtgcagtggtgggatcttggctcattgcaacctccacctcccaggttcaactgattctcctgcctcagcctcccaagtagctggaactacaggcgcatggcaccacatccagctaattttctttttttttgtattttttatggagatggagtttcatcatattggccaggctgatctcaaatgcctgatctcaagtgattcactcacctcagcctgccaaagtgctggaattacaggcgcgagccaccacacctaggcaatttttctatcttttaaaagaccctctactgaatctgcccaattctgtgaaggatgtcttttaaaaaatccccttacataacaaattctcctccagttatattttggctcttgaataggttttgctttatacatagtgattagattggtgcatgtaggtttgaggtttgagacttatattttcttcacagtttgctgttatcattaaataataatccttaaaatacattttatctgatatcagtaatgtgactcctatgttattttttgaattccccatctcttttaatttgaaaatgatttgtgtgcaagtgggtagctcacacctgtaatttcagccctttgggagaccgagggaggaggattgcttgagcccaggagtctgagagcagcctgggcaacatgctgagactccatctctacaaaaaattaaaaaattatccaggtgtgatggtgcacacctgtggtcccagctactcgggaggctgaggcaggaggatcacttgatcccaggaggtggaggctgcagtgtgccatgttcacgccacctcactccagcctgagtgacagagcgaggacccatctcaaaaaaataaaaatttatttggaatgtgaaaatcttgttttaaagttagaaaacatttttttaaaactccaatatgaaaagctgggtgcagtagcttgtgcctgtggccccagctacttgggaggctcaggtgggaggatcattgagctcaggagtttcagctcttgtggtttgttgactgactgactgattgactgattgattgatttaaaacacaacaaaacccaaaatgactttaatctgatagtttcttttgatgtcagcattctgattctgtccattcttagttgtattctttccactgagtgtaagctcattcctttaacagaaatttagtttttccatcttagttttggaattccatggcccttttccatttccatggagatgcagtgcagcatcttcaagtctctaattcttacatctgtctctttcacttgcaagagcccttgtgattacattgtcctgcccggacatccagcataatctccccatgtcaaaacccttaatataatcacatctataaagtctcttccacctgtaatggaatatattcccaggtttgcgcaactacaatgtagatactttgtggggctgtgattctgcctaccacagacactaagcttaaagtgaaacccacatcttattcaaaacttggaggttttccttcatttggccatttaaatttaatttttgtttctgtcctccgtagtcttctattctccaggcttcagagctctcagcttaccattcaattatctcctttctctccttatattccttttttcattttttaaaaacaatactttcaaagagcaaaaattttagaatttgatgaggtttattctagtgaagtttttatcgtttgtactttttgtaccctaaggaagctttgtttaccccaagatatagtttctacattctcttaaaaacactaaagagttccagtttatatgtttagctctgtgagattgggagaggggagctagatcactcaggtcaggctttcgggatgcctttttctgtctctggacgttgctggggtgacctcactgacacccatggcttcagctaccacatatgctgatggctccaagtctatctgtgcagcccagacccctcctcatctccagaccctggaagctgatgccttgggcagctcctcctatttcccaggcaccaggaatgtgagcttctccctccccacagtcctgctgtcctcagggcccctatgtctctgaaggcaccaccatcttccaagatacatgggcctccgcagggtctaggagtgccagacacgtaaccagaaatcagatgacatcactatctaaataaaacaccactacatggaaatagaacaccactacatggaaatagaacatgggagccccttgaatgtggcaagagcaccctcccaggcatgttccaccctcaccccgggctcatcaggagggttcttaagatgcagacagttttaagggggttggaggaatagttgagaagctgagatgttgcacccacagctgagaatccctttctagcactctgtgtcctcacaaatccccagaaatcgtcctcccctggggagttctcaagcccttacagacctgccctctctgtgccatcctgcatatgcctcccttgagctgggtgtccctctgatggacgcatccattcactgcctgtcccatgggttgtgtccaaaggtggaatctgttatcaatgtggatttctaatgggagtaacttcctccataagggaagcctcagcctcaccagcaatggcagacatggccaggcatgtagacacagaggtagtgagatggaaagtgggcacagcccagagagcctgcccacctcatcctggggcgaccaggacaaggaagcatcagcaatcttgcgagcacatgtaggagtgactttctggagcaggacgagcctcatgggcatgagaccattgtgagtgctcagggtctccccctagaaaggcacacatttaattctccattttgaaatttgaagtagtgcccccacaaattatgcagcccgttctgttctggaggaaccattcttatcagaacttggtgctggattgacttggagaaaagcctggccataatcttcaggatgaaataaaggcctggatgaatggatacttcagtctctatgcagacttgcagaagactggagcctttggcattcagaagaggaattcagactgtgcaagatctgaggccaggctccagctccccaggtcctttggtgagcaggagctccctgaacccaccgtgggtccttgctagggttgtcttgcccatgtgtgctttagacagcagcacctcttattccatggtgtagatggagaatcctcaataaagccttcccaagaatatgatcatcacatcttgagctcagcctccccggagcttttttttatattgacagccacttcagagagagtcctctttgagctttacaagaaatatcctggtgtgaaaaaagaccaaaaccagatagccagcctgaacactctctgtttagagaaagctggcttagcaatgttgtatgtcttttggatgtgctgtgttattcacatatgagaagaaagagtttcaagggttagcaaatagcgtcacattcagcagagaacatgtggttggggactagggcaatggtgactcctcagacctcagctgcagcctgataaatatggttaacagagtagaaggcagtgacatgaaatgggtgtccacagccttgtgttgggaattgaatgagaaagaagagcttgaacttggatgttccccagaggcagcacagggtcagatgagcttttcaagataggcgtgattggtctttcccagggttgggcccataacgaaaggcagttatagattaatgggtaataagtaactggaggagggcactttgtcttccaattacatgctgatttgctaggtggctcaatgacaaggtaattaaggcgaaggaaacaaatgtagcaggcacagcgtggggtggacagtcagctgtcggtggcttctgctgagatggccagaggactccaggttcccctgccgcggctggccacaggactgctgctcctcctcagtgtccagccctgggctgagagtggaaaggtgttggtggtgcccactgatggcagcccctggctcagcatgcgggaggccttgcgggagctccatgccagaggccaccaggcggtggtcctcaccccagaggtgaatatgcacatcaaagaagagaaatttttcaccctgacagcctatgctgttccatggacccagaaggaatttgatcgcgttacgctgggctacactcaagggttctttgaaacagaacatcttctgaagagatattctagaagtatggcaattatgaacaatgtatctttggcccttcataggtgttgtgtggagctactgcataatgaggccctgatcaggcacctgaatgctacttcctttgatgtggttttaacagaccccgttaacctctgtggggcggtgctggctaagtacctgtcgattcctgctgtgtttttttggaggtacattccatgtgacttagactttaagggcacacagtgtccaaatccttcctcctatattcctaagttactaacgaccaattcagaccacatgacattcctgcaaagggtcaagaacatgctctaccctctggccctgtcctacatttgccatactttttctgccccttatgcaagtcttgcctctgagctttttcagagagaggtgtcagtggtggatcttgtcagctatgcatccgtgtggctgttccgaggggactttgtgatggactaccccaggccgatcatgcccaacatggtcttcattgggggcatcaactgtgccaacgggaagccactatctcaggtctgtattggtgccttcatccaatcaatgttccaggcaaaacactttttaaaaaatgtatttacttacaagtgcttccatatctacttatctttccaaagattttattttggcttctttataacagataaactgttgaggggcctagtgtatttcaagttttcagtggtcactgagaggaagaagaggcacggatgagggtctgtcagaggatggacaaggactgctgtgactcacggacagtgtttgtaaaggcaccatcttcatggttgtgcatgtccttcagctcggcaggatcagggacactacattcagaactgatccatcctggggtttttgcttgcctgattttcagctgaacggtgatgcaacagtaaattagaattgtggacatgataatttttagtggtcccatcttgcgaaagatacagaggtgaccacaggagacctaggcactcacaggaagtagaagtgtcaaagaggttgactcagttgagtggaagtggggctgtgaaggtgggatggatgcatgtgatcagagaatgaaacatggagttcagtttccagagagggatctgtcctgagaaaagtttttctgaccaggagttgggggtctggtgtatgatgtggggacatcgtagagtttggaaggtatggtgatggttgcatgtcaaaagggtcttctacttggaatgctgaaattatcaagagtgggtggaagggactagggaggagataagaccgtgaatctataagcccagtgaagctgggaccagtgatgaatggacatgtgtccaagaagggaagtgtttctcaggtgaagctgatcatatcaccaaactcaccctatcccactccaagtttctatagtgggatctattctttttccaaaaatttcagaggtgactttcattaatacagaatatttgggtttcattgaaatagtactctgggatgtgaaaaaccaaattcacacaccaatgaatttggtttctaaatccattaagggagccatccttttttttttttttttcttgagactgagcctcgttctgtcgcccaggctggagggcagtggccggatctccgctcactgcaaccttcacctcccgggtttaagaaattctcccacctcagtctcctgagtaactgggactgcaggcatgtgccactgctcctggcaatttttttttttttttttttagtagagatgaggtttcgcaatgttagccaggctggtcttgaactcctgacctcatgtgatctgcccgcctcggcctcccaaagtgctgggattacaggcaagagccaccaagcccagtgagggagccatctttcttgtgagagaattgagcccttttttgtcatattcactgaatttatatgaacttccatgagtttaggtcctttgtattcttatttctgtacttctttttattagtgtaggtattattgcaaaggacactaaactttatttttgtttttgatcaaaccacaagatatttgttctactggttttcttttccccttatgcaatgtagttactgaattgtaaaaaatatatatgttctttagctttgtaaaaatgtggaaaattaggaaggcatttgaatagtgattgtggctcttttcttgtggtttttcactatgaatatattctttagactgaactgcactggctcaaatcttcactctcatttttctagctatgtgacctaggacaggtaccctaagcattgtggttttaatgttgttatagtgagcacccaataaatattatctgttatcattcttattattttagtttaattgcatttattttatgctgaatttcttccagagccataggtaaattttttcttcagtttcttctgggatatctttttcttctgtgcaacctcatcctcaggtttaggaacaatttgttccttatcagtaaagatcatcttgaatgtggcagtggggggtcatgtaagggttaatccaataatgagctctgcaagacgcatggctcatcttggatgctttgtttacttggataagcttaatgatgagagaatctacatctaaattgttatatttagcattattctctgcattttaaagcacatgcagcaaaaatccagcaccctatttgggccaccgaccttgtgtccagccccactgctcggccctgggcacacttgccagcccctccattgcaatatcgaaatggtgcacactgcttccataaagtgacatccttcagacacttggtggctctttgtatatgcatacattgatggcctgggtagtttcacgaatgtcctttaagtgaacaggaaaactgaaacctcttgaattgcatgattttgtggtgtttctgggtcaagtgaataaagaagaattttcacagatcaccttaggcctcttagaggaagagctatcatcatcattagtagagtttaagactcctgcaggacaagatgtgtcacctggagacctttgccatgttcgtgccaatttactgagtgcatgaaagatcatttacaccaaaatctttatcatgtattatctgtgacagacacgccattatcatttttattacattgatttcctttgttattttgtcacccttacttacttggtttggttgacccttagatttgaaatttttctacaaatatacaagactaaagttgaaatcttacgtttcttctccctctctttctccttgatttaaagtttatggataggttgaattatttgattggtcttctcaaagaaataactgtggaatttgtatattcttttcactgtttcattttccgtttcgttaattgcagcttatttttgccttaatgatttcatcctagtttcttttggttgatttgtagctgcttttgcaacttcgttagaggactattacacttctttacatttgatttttcttaatgaagcattgagggctcgagtaaaagatttcttttacttaggttttggtaaaaattgctgttcttttcattgcttttagataatttaaatatcagtttttaaatttctcctttgatgcagtgactgtctataaggctgttacctaattctgatattgttaataattttgtagtcatctccctcttattttttcaagttattttgtattataataagaatgtttcttttttttttttttgaaggaaaaaataaatttattgctcattaagtggaagtggatcatcataaaggtcttcatcctcattgtctccatgctgagtgggctgaggaggaggaggaaggggagggattggtcctgctgtctcagcgtggcagaggcagaagaggatgagaaggtggaagggccagcgggagaggcaggcacactcggtgtaactttatggaaatatatcatcatttttgtttgacttttttcctttctcatttctctgaaaatgtttctgtacagtaccaattcttcttccaccatttgctttagtttcagtgcccaaaccatagaagggtccatgtggtaaaaaaagtcaaaactgacttttttttttttttttgagttggagtcctgctgtcacccaggctggagtgcaatggcacgatgttggctcactgcaacctctgcctcccaggttcaagcaattctcctgtctcagcctcacaagtagctaggactacaggcacacgtcaccacacctggctaatttttgtacttttagtagagatggggtttcaccatactggtcaggctggtctcgaactcctgacctcaggtgatccacccgcctcagcctcccaaagtgctaggattccaggtgtgagccactgcacctggtcaacaatcttttttttttttttttttttaatttatttttttattgataattcttgggtgtttctcacagagggggatttggcagggtcatgggacaatagtggagggaaggtcagcagataaacaagtgaacaaaggtctctggttttcccaggcagaggaccctgcggccttccgcagtgtttgtgtccctgattacttgagattagggattggtgatgactcttaacgagcatgctgccttcaagcatctgtttaacaaagcacatcttgcaccgcccttaatccatttaaccctgagtggacacagcacatgtttcagagagcacagggttgggggtaaggtcacagatcaacaggatcccaaggcagaggaatttttcttagtgcagaacaaaatgaaaagtctcccatgtctacttctttctacacagacacggcaaccatccgatttctcaatcttttccccacctttcccgcctttctattccacaaagccgccattgtcatcctggcccgttctcaatgagctgttgggcacacctcccagacggggtggtggccgggcagaggggctcctcacttcccagtaggggcggccgggcagaggcgcccctcacctcccggacggggcggctggccgggtgggggggctgacccccccatctccctcccggacggggtggctggccgggctgaggggctcctcacttcccagtaggggcggccgggcagaggcgcccctcacctcccggacggggcggctggccgggcggggggctgacccccccacctccctcccggacggggcggctggccaggcggggggctgaccccccccacctccctcccggacggggtggctgccgggcggagacgctcctcacttcccagatggggtggctgccgggcggagaggctcctcacttctcagacagggcagctgccgggcggaggggctcctcacttctcagacggggcggccgggcagagacgctcctcacctcccagatggggtctcgccgggcagaggcgctcctcacatcccagatggggcggcggggcagaggcgctccccacatctcagacgatgggcggccgggcagagacgctcctcacttcctagatgtgatggcggctgggaagaggcgctcctcacttcctagatgggatggcggccgggtgaagacgctcctcgctttccagactgggcagccaggcagaggggctcctcacatcccagacgatgggcggccaggcagagacactcctcacttcccagacggggtggcggccgggcagaggctgcaatctcggcactttgggaggccaaggcaggcggctgggaggtgtaggttgtagtgagcggagatcacgccactgcactccagcctgggcaccattgagcactgagtgaacgagactccgtctgcaatcccggcacctcgggaggccgaggttggcggatcactcgcggttaggggctggagaccggcccggccaaacagcaaaacccggtctccaccaaaaccagtcaggcgtggcggcgcgcgcctgcaatcgcaggcactcggcaggctgaggcaggagaatcaggcagggaggttgcagtgagccgagatggcagcagtacagtccagcttcggctctgcatgagagggagaccgtggggagaggcagaggcagaggcagaggcagaggcagaggcagaggaggcagaggcagaggaggcagaggcagaggaggcagaggcagaggaggcagaggcagaggcagaggcagaggcagaggcagaggcagaggcagaggcgcctggtcaacaatcttaagtccaataagaatgtttcttatgaagacactacttaaaaaattcttaataggttaccttgatggtctaatacagaattgtccaatagaaatataatgtaagccacatacataatttaaacttttctagtgggcatgttagaaaccagcaaaaagaaaccactgaaattaattttactaaggcattgtttaaccagacatatcacaaatattatcctttcaacatatattcgatataagattatgacttaactatttgacatagttttttcttgctaagtcttcaaaatctagcatatatctgacatttacagcatatctcaatttggaatagtcacatttcaagtgctcaatagtcatatgtagttagtgactaccatatggtcaatgtttacaaatgtaaacattgtaagagacttacattttcttcacatagtttgttgttatcattaaataataatccttaaaatccattttattggataccagtattgctactcctatgttattttttcaattccccatctcttttaatttgaaaatgatttgtaggcaggtgggtggctcacacctgcaatttcagccctttgggagactgatgcaggaggattgtttgagcccaggagtctgagagcagcctgggaaacgtgctgagactgcatctctacaaaaaatcaaaaaattatccaggtgtgatggcgcacacctgtggtcccagctactcaggaggctgaggcaggaggattacttgatccgaggaggtggaggctgcagtgtgccatgttcacaccacctcactccagcccgagtgacagagtgaggccccatttcaaaaaaataaaaatttctttggcatatggaaatcttgtttaaaaagtttagaaaacattttttaaaactccaatatgaaaagctgggtgcagtggcatgcgcctatggtcccaggtacttgggaggctcaggtgggaggatcattgagctcaggagtttcagcacctgtggttttttgatttatttatttaaaacacaacaaaaaccaaaattgcttccatctcatagtcttttgatgtcagcattctgattctgtccactcttaatcttattctttccactgaatgtaagctcatttctttaacagaaatttcctttttccttattaattttggaatttcatggtacttttccacttttagggagatgcagtgcagcgtcttcaagtctcccactcttacgcctgtctccttcacttgtaagagcccttgtgattacactgtcctgcccagatacccaggacaatctccccatcttaaaactcttaatttaatcatatctgtgaagtctcttccacctgtaacggaacatattcccaggtttgaggaagtacaatgtagatacttttgtggggctgtgattctgcctaccacagacactaagcttaaagtgaaacccacatcttattcaaggcttggaggttttcctctattcgaccatttaaatttaatttttgttccttttctccatagtcttctattctccaggcttcagagctatcagcttaccattcaattatctccttttttcctgatcttccttttttcatttttaaaaaacaatacctttcaaagagcaaaagttttagattttgatgaggttctttctagcaaagttttatcatttgttgtttttgtaccctaaggaatctttaccccaagatgtgaagattagtttctgtgttctcttacaaacattaaagaattccagtttgtgtgtttaggtctgtgagattggcagaggggaacaagaccacacaggtcagtctttcaggatgcttttttctgtctctggactttgctggggtgacctcactgacacccatggcttccacatatgcggatggctccaagtctatctgtgcagcccagacccctcctcatctccagaccctggaagctgatgacttgggcagctccttctgtttcccaggcaccaggagctcctccctccccatagttctgctatccttagggcccctaggtctctggagtaccaccgtcttccaagatacatgggcctcctcagggtctgggagtcccagacatgtgacaagaaatcagatgacttcactgtctaaataaaacactactacttggaggtagaacatgggagcccatgaatgtgggaagagcacactaccaggcgtgttccacccgtcacctgggctcatcatgagggtgcttaggaagcatatagttttaagggggttggaggaatagttcagaggctgagaggttgcacccacagctgagaatccctttctagtgctctatgtccttacaaattcccaggaatcatcctctactggacagttcccaaagcccttgcagaccttccttttctgtgccatcctgcgtgtgctgcccttgagctgggtgtcccccagtagacgcttccattcactgcctgtcccatgggttctgtccaaaggtggaatctgttatcaatgtggagtaatttcctccctaagggaagcctcagcctcaccagcaatggcagacacggccaggcaagaagacacaggggcagtgagatagaaagtgcacaccccagacagcctgcccacatcatcctgaggtgaccaggacaaggtggcatcagcaatcttgtgagcacagcacatgtgggagtgactttctggagtaggataagcctcattgggcttgaggcccttgtgagtgctcagggtctctcctttagaaaggcacatatttaattctccatcttgaaatttggactagggcccccacaaattgtgcagcccattctgttctggaggaaccattcttatcagaacttggtgctggattgacttggagaagagcctgaccataatcttcaggatgaaataaaggcctggatgactgaaataaagactggagccttcggcattcagaagaggaattcagactgtgcaagatctgaggccaggctccagctcccccagtcccttggtgagcaggagctccctgaacccaccatgggtctttgctagggttgtcttgcccatgtgtgctttagatagcagcacctcttcttccatggtgtatatggagaatcctcaacaaagtcttcccaagaatctgatcatcacatcttgagctcagcctccctgcagctttttctatattgacagccacttcagagagagtcctctctgatccttacaagaaatatcctggtgcgaaaaacgaccaaaaccacatagccagcctccacgctgttcagagaaagctggcttagcaatgttgtatggtttttggatgcgctgcgttactcatacatgagaagaaagtttcaagggttagcaaatagggtcacatccagcagagagcatatgactgggggctagggcaatggtgactcctcagacctcagctgctgcctgataaacatggttaacagagaagtaggagacagtgacatgaaatgggtgttcacagccttgtgttgggaattggatgagaaacaagagcttgaacttggatgttccccagagtgagcacagggtcagacgtgtttttcaagatagtcatgatcggtcttttccagggtggggcccacagtgaaaaacagtgatagattaatggttaataattaactagaggagggcactctgtcttccaattacacgttgatttgctaagtggctcagtgacaaggtaattaagatgaagaaagcaaatgtagcaggcacagcgtggggtggacagtcagctgtccgtgtcttctgctgagatggccacaggactccaggttcccctgccgtggctggccacaggactgctgcttctcctcagtgtccagccctgggctgagagtggaaaggtgttggtggtgcccattgatggcagccactggctcagcatgcgggaggtcttgcgggagctccatgccagaggccaccaggcagtggtcctcaccccagaggtgaatatgcacatcaaagaagagaactttttcaccctgacaacctatgccatttcgtggacccaggatgaatttgatcgccatgtgctgggccacactcaactgtactttgaaacagaacattttctgaagaaatttttcagaagtatggcaatgttgaacaatatgtctttggtctatcataggtcttgtgtggagctactacataatgaggccctgatcaggcacctgaatgctacttcctttgatgtggttttaacagaccccgttaacctctgcgcggcagtgctggctaagtacctgtcgattcctactgtgttttttttgaggaacattccatgtgatttagactttaagggcacacagtgtccaaacccttcctcctatattcctagattactaacaaccaattcagaccacatgacattcatgcaaagggtcaagaacatgctctaccctctggccctgtcctacatttgccatgctttttctgctccttatgcaagccttgcctctgagctttttcagagagaggtgtcagtggtggatattctcagtcatgcatctgtgtggctgttccgaggggactttgtgatggactaccccaggccaatcatgcccaacatggtcttcattgggggcatcaactgtgccaacaggaagccactatctcaggtctgtattggtgccttcatccaatcaatgttccaggcaaaacactttttaaaaaaatgtatttatttaaaattgcttccatatttacttatctttccaaatatttcatttctgcttctccttgtcataatagccttcagtgagataaactgttaaggggtctctagtagcgtatttcaggttttaaatggtcactgagaggaagaggaagtagacacgaatgtttgtaaaaggatggacaaggactggtgtgactcatagagactgttggtttgtaaaggcaccatcttcatggttgtgcatgtccttcagcttggcaggaacagggacactacgtttggaactgatccatcctggattttttgctagcatgattttcaggggaaagatgatgcaacagtaaattacaattgttgacatgataatttttagttgtcccatcttgcaaatgatagacaggtgaccacaggagacctaggcactcacatgaaatagaagtgtcagagaggttgactcagtggaagtggggcaatgaagttgggatggatgtctgtgattagagaatgacacacgaagttcagtttccagacagggatctgtgctgtcaagagattttctggtcaggatttggggtctggtgcatgatgtggggacatctcagagttcggaaggcaaagtaatggttgcatctcaaatgattcttctacttggaatgctgaaattatcaagaaatggcggaaggggctagggaggagataagactgtgaatctataagcccagtgaagctggggacagtgatgaatggacatgcgtccaagaagggaagcatttctcaggagaggctcatcacatcaccaaacccaccctactgcactccaggtttctatagtgggatctactcctttaccaaaaatttcagaggcagctttcattaatccagaatatttgggtttcgttgaaatggtactctgggacctgaatattgtttcttattccttgctgtgccatgtacatcgtgagagaatcagcctttttatgtcatattcaccgaatgtgtatgaacttccatgatttagatccttttgtattcttatttctgtgccttttttataaatgtaggtattattgcaaaagactctaagcttcatttttctttttgatcaaacgacatgatttttttatgcaatgtaattattcaattataaaatacgtgtttatttagatttgtaaaaatgttgaaaagtgggatggcatttaaatagtgactgttgcccttccagtttttctttcttttttttttttttattatactttaagttctagggtacatgtgcacaaattgcaggtttgatacataggtatacatgtgccatgttggtttcctgcacccaccaactcgtcatttacattaggtatttttcctaatgccatccctcccccagtcccccaccccacaacaggccctggcgtgtgatgttccctggcctgtgtccagtgttcttgctgttcagttcccacctatgagtgagaacatgcggtgtttggttttctgtccatgtgatagtttgctgagaatgatggtttacagctttgtccatctccctgcaaaggacatgaactcatccttttttatggctgcatagtattccatggtgtatatgtgccacattttcttaatccagtctatcattgatggacatttggattggttccaggtctttgctattgtgaatagtgccacaataaacatacgtgtgcatgtgtccttagagtagtatcatttataatcgtttgggtatatacccagtaatggtatggctgtgtcaaatggtatttctagttctaggtccttgaggaatcgccacactgtcttccacaatggttgaactaatttacactcccaccaatggtgtaaaagtgttcctatttctccacatcctctccaacatctgttgtttcctgactttttaatggtcaccattctaactggcgtgagatggtatctcattgtggttttgatttgcatttctctgatgaccagtgatgatgagcatttattcatgtgtctgttggctgcataaatgtcttcttttgagaagtgtctgttcatatcctttgcccactttttgatgaggttgtttgtttgttttttttcttgtaaatttgtttgagttctttgtagattctggatattagccctttgtcagatgggtagattgcaaaaattttctcccattctgtaggttgcctgttcactctgatggtagtttcttttgctgtggagaagctctttagtttaattagatcccatttgtctattttggcttttgttgccattgcttttggtgttttagtcatgaagtcctggcccatgcctatgtcttctaggccatgcctatgcctaaatgatattgcctaggttttcttctaggatttttatggttttaggtctaacatttgagtctttaatccatctggaattaatttttgtataaggcgtaaggaagggatcctgttccagctttctacatatggccagttttcccagcaccatttattaaataaggaatcctttccccattgcttgtttttgtcaggtttgtcaaagatcaaatggttgtagatgtgtggtgttatttctgagaccactgttctgctccattggtctatatatctgttttggtaccagcacccatgctgttttgttactgtagccttgtagtacagtttgaagtcaggtagcatgatgccaccagctttgttttttttttttttttgcttaggattgtcttggcaatgcaggctcttttttgattccatatgaactttaaagtagttttttccaattttgtgaagtcattggtagcttgatgggtttggcattgaatctataaattaccttgggcagtatggccattttcacgatattgattcttcctatccatgagcatggaatgttcttccatttgtttgtgtcttcttttatttcgttgagcagtggtttgtagttctccttgaagaggtccttcacatcccttttaagttggattcctaggtattttattctctttgtagcaattgtgaatgggagttcactcatggtttggctctgtttgtctgttattggtgtataggaatgcttgtgatttttgcacattgattttgtatcctgggactttgctgaagttgcttatcagcttaaggagactttgggctgagacaatggggttttctaaatatacaatcatgtcatctgcaaacagggactatttgacttcctcttttcctaattgaatgctctttatttctttctcttgcctgattgccctggccagaacttccaacagtatgttgagtaggagtggtgagagaggtcatccttgttttgtgccagttttcaaagggaatgcttccagttttcgcctactcagtatgatattggctgcgggtttgtcataaatagctcttattattttgagatacttccatcaatacctagtttattgccagttttaggcatgaagggatgtttaattttgttgaaggccttttctgcatctgttgaaataatcatgtggtttgtcattggttctgtttatgtgatggattacatttattgatttgcatatgttgaaccagccttgcatcccaaggatgaagccgacttgatcgatgtggataaactttttgatgtgctgctggatttggtttgcagaattttactgaggatttttgcatcgatgttcatcagggatatttgtctaaaattttctttttttgttgtgtccctgccaacctttggtatcaggatgatgctggcctcataaaatgagttagggaggattccctctttttctattgattggaatagtttcagaaggaatggtaccagctcctgtttgtacctctctggtagaattcggctgtgaggaaggggaacatcacatactggggcctgttgtggggtagggggagcggggagggatagcattaggagatatacctaatgttaaatgacgagttaatgggtgcagcacaccaacatggcacatgtatacatatgtaacaaacctgcacattgtgcacatgcaccctaaaacttaaagtataataataataataataataaaaagaatttggctgtgaatccatctggtcctggactttttttggttggtaggctattaattattgcctcaatttcagagcctgttgttggtctattcagagattcaacttcttcctgctttagtcttgggagggtgtatgtgtccaggaatttatccatttcttctagattttctagtttatttgtgtagacgtatttatagtattctctgatggtagtttgtatttctgtgggatcggtggtgatattgcctttactattttttattgcgtctatttgattcttctctcttttcttctttattagtcttgccagaggtctatcaattttcaaaatccatctcctggattcattgatttttttgaaggtttttttgtgtctctatctctttcagttctgctctgatcttagttatttcttcccttctgctagcttttgaatttgtttgctcttgcttatctagttcttttatttgtgatgttagtgtgttgattttagatctttcctgctttctcctgtggggatttaatgctataaatttccctctacacactgatttaaatgtgtcccagagattctggtatgttgtgtctttgttctcgtcggtttcaaagaacatctttatttctgccttcacttcgttatttacccagtagtcattcaggagcaggttgttcagtttccatgtagttgtgcgattttgagtgagtttcttaatccagagttctaatttgactgcactatggtctgagagacagtttgttgtgatttctattcttttacatttgctaaggagtgctttacttacaatcatatggtcagttttagaataagtgtgatgtggtgctgagaagaatgtatattctcttgacttagggtggagagttctgtagatgtctattaggtctgcttggtgcagagctgagttcaggtcctggatatccttgttaacctttggtcttgttgaactgtctaatatcgacagtgggatgttaaagtctctcattattattgtgtgggagtctaagtctctgtgtaggtctctaagaacttgctttatgaatctaggtgctcctgtattgggtgcatatatatttaggatagttagctcttgttgttgaattgctccctttaccattatgtaatggccttctttgtctcttttgatttttgttaaagtctgttttatcagagactaggattgcaacccctgctttttttttgctttccatttgtttggtagatcttcctccatccctttattttgagcctatgtgtgtctctgcatgtgagataggcctcctgaatacagcataccgatgggccttgactctttatccaatttgccagtctgtgttttttaattgcagcatttagcccatttacatttaaggtaaatattgttatgagtgaatttgatcctgtcattatggtgttatcgggttattttgcccgttaattgatgcagtttcttcacagcatcgatagtctttacaatttggcatgtttttgcagtggctggtactggtgtttctttccatgtttagtgcttcctttaggagctcttgtaaggcaggcctggtggtgacaaaatctctcagcatttgcttgtctataaaggattttatttctccttcacttatgaagcttactttggctgcatatgaatttctgggttgaaaattcttttctttaagaatgttgaatattggcccccactctcttctgtcttgtagggtttctgcagagagatctgctgttagtctgatgggcttccctttgtgggtaacccgacctttctctgtggctgcccttaacattttttccttcatttcaactttggtgaatctgacaattatgtgtcttggagttgttcttctcgaggagtatctttgtggtgttctctgtatttcctgaatttgaatgttggcctgccttgctaggtttgggaagttctcctggataatatcctgaagagtgttttccaacttgtttccattctccgcatcactttcaggtacaccagtcaaacgtagatttggtctttccacatagtcccatatttcttcaaggctttccttgtttctttttactcttttttctctaaccttgtcttctcactttatttcattaatttgatcttcagtcactgataccctttcttccagttgctctaatcagctattgaattttgtgcatgtgttatgaagttcttgtgccatggttttcagctccatcaggtcatttaaggtcttctctacagtgtttattctagttaggcattcatctaaccttttttcaaggttcaaccttccttgcaataggttcgaacatgcacttttagcttggagaggtttgttactaccaaacttctgaagcctacttctgtcaactcgtcaaagtcattctctttccagctttgctccattgctagcaaggagctgtgatcctttggaggagatgtgcttatgcgctatggtttttagaattttcagcttttctgctctagtttccccccatctttgtggttttatgtaccttaggtctttgatgttggtgacctacagatggggttttggtgtagatgtcctttttgttgatgtttatgctgttcctttctgtttgttagttttccttctaacagtcagatccctcagctgcaggtctgttggagtttgctggaggtccactccagatgctctttgctttggtatcaccagtggaggctgcagaacagcaaatattgcagaacagcaaatattgctgcctgatccttcctctggaagcttcataccagaggcgcacccacctatatgaggtgtctgttggcccctactgggaggtgtttcccagtcaagatacacagaggtcagggacccgcttgaggaggcagtctgtccattctcagagctcaaatgccatactaggagaacgagtgctctcttcagagctgtcagacagggatgtttaagtctgctgttccccacatgttcagaagttgtctgctgccttttgttcagatatgccctgcccacagaggtggagtctatagcggcagtagcccttgctgagctgcggtggactctgttcagttccagcttcctggatgctttgtttacctactcaagcctcagcaatggcggacacccctcacccagccaggctgccgcctcacagttcaatctcagactgctgcactagcagtgagcaaggctccgtgggcatgggagctgctaagccaggcaggggagagaatctccttgtctgccagtttataagaccttgggaaaagcacagtatttgggtgggagtgtcccgtttttccaggtacagtctgtcatggctccccttgtctaggaaagggaaatccctcaccctcttgcacttcctaggtgaggcgacgccctgccctgcttcggcttgccctcagtgggatgcacccactatccaaccagtcccaatgagatgaaccaggtacctcagttggaaatgcagaaatcatccatcttctgcgtcgatcatgctgggagctgcagatcggagctgttcctatttggccattggtgctgaagcttccgttctcctctccaacacctcctttttttttccttttctcttccagtttttcaatgtgaacatattctctagagttaactacattggctcaaatcttcactatcatctcagtggagcagaacaaattgggaactgtggcacaggtcactcttgctatgccccttaagaattccacattaacaaagctaattttcgagtgtggtaaagaacaggctagtgtatttagtagtgagtccattgactgtttcccaacatgaggtcacactagatttaatatggtttggctctgtgtcccccaccaaatctcatcttgaattgtaatccccataatccccacgtgttgaggacaggacatggtgggaggtccccacctcctaatctcatcatagtgagtgagttcttatgagatctgatggttttataaggggcccttatcccttcacttgcaagctattcctctttctctctttcatgtaagacgtgtctttgcctctctctcactttctgccaggattataagtttcctgaggcccctccagccacatggaactggagtcaattaaagctctttcctttataaattacccagtcttgggtatgtctttatagcagtgtgtgaatggactaatacagtaaattggtgtcatggagagtggggtactgctataaaactacttgaaaatgtggaagtgacttggaactgggtaacaggcagaggctggaacagtttggagagctcagaagacaggaagatgtgggaaagtttggaacttcctggagacttgttgaacggttttgaccaaaatgctgataatgttgtggacaatgaagtccaggctgagtctcagatagagatgaggaatctgttgagaactggagcaaaggtcactcttgctaagctttagcaaagaaactcgtggcatttttgcccctgccctagagctctttggaactacgaacttgagagagatgatctgaaattggaacttatgtttaaaagggaagcagagcataaaagtttggaaaatttgcagcctgaccatgtggtagaaaagaaaaacccattttatggggagaaattcaagccagatgcagaaatactagctaaagaaatttgaataaataaggaggaaccaaatgttaatcaccaagacaatggggaaaatggctccagggcatgtcagagacctttgcagcagaccctcccatcacaggcctggaggcctaggaaggaaaaatggtgttttaggctgggtccaggcccccactgctgtgtgcagcctcaggacttggtgccctgtgtcccagtggctccagccatggctaaaaggggccaaggtagagctcaggccattgcttcagagggtgcaaacctcaagccttggcagcatcgatgtggtgttgggcctgcgggtacacagaagataagaatttaggtttgggaacctccacataaattttagaggatgtaaggaaatgcttggatgtccaggcagacgtttgctgcatggatagagtccttatagagaacctctgctagagaagggtggtaaagaaatgtgaggttggagcccccacacagagtctccactggggcactgcctagtggagttgtgagaagaaggccacagtccttcagaacccagaagggcagatccaatagcttgcactgtgtgcctggaagagccacagacatcaatgccaccctctgaaagcagccaggacgagggctttaccctgcaaagccacagggttggagctgcctgagaccgtgggagcccatttctggcatcaccttgatctagatgtgagacatgaagtcaagggagattattttggagctttaagatttaatgactgccctgcctggttttggacttgcatggggcctatagcccctttgttttggccagtttctcccatttgaaatgggaacatttacccaatttctgtacccccattgtgtcttggaagttactaacttgtttttgattttacaggctcatgggggaagggacttgacttgtctcagatgagaccttggactatggacttttgagctagtgctgaaatgagttaagactttggaggacagttgggaaggcatgattggtttttaaatgtgaaaagacatgagatttgggatgggccagagggcagaatgatatgatttgactgtgtgtttccacccaaatctcatctcatattgtaatttccataatccccatgtgttaaggttggtacctggtgggagctgattgaatcatatcggcagttttccccatgctgttcttgtcatactaagtgagttctcatgagagctgatggttttataagggactctttctcctttactcacaagcttttcctctctgtctctcgcctgctgccatgtgagacatgcctttgcttatctctcaccttctgtcatgattgtaagtttcctgaggcctccccagtcatgtggaactgtgagtcaattaaacctctttcttttataaattacccagtctcagctgcgtctttatagcaggctgagaatagactaatacaagattggtggtgattgaagttatactgaaagggtttaaaggagagtctgagaaaaggaaatgaatctgcatttattgagaaagttgatgagaaagtggaattagaaattcctagaaaggtaagttgttgtgtgaattatttcccaaaatggggaagtctctctacctgtttggagacagaaagtggaatcagaggagaagaagatgatggacagaaaggatcattccctcttccagatgctttccagtgtgtgatgtaagctgaactaaaatcagctgtgttgaactccagccagaaaaaatgtccggcattttgttttttgggaccctaatgaaatggttacaggtctccaggtctcttggggctcacagggtcatgcctttccttgcccagtgtacttggtgagaaggtacaggtgtttccatggagggtgttcattttagggatttcaagagggtcatctttgcaccacaggaaatgcccccttttacactctgaaaaccttatcaaaccgttgtataaaagatgaatacccacataacaggctctagcactgttctgtttttgagctgagacattttaaaaggagatttttcaattctaaaaattctttaaataaaatgctcttgcagggacaacatagtaggtcaacattgttcccatctccacaaaaagttttttttttaattagctaggtgtggtagcatttctgtagtcctagctactgggaatgctgaggaggaaggatcacttgagcccaggaattcgtggttacagtaagctatgatcttgcctaggtaacagctacagagcgagaccctgtctttaaaacaaacaagcaaacagacaatcaagctttacacttctataaaagcaacactttccatttatgacagcactaatccaggatatatcaaaactgaacttgtgtttgctttcaactgttaaaactagccagagttgttacagacccactacctctgagtgacactggtatgccactctttgctgaccactgaacaatgggatttatgtacccaattgtgtagatacacaccaactcattctactctacccagagtagtgatttccaacacacaaaaccacaatgaaactgcccatgcctttctaccactttgaaactcctttcatccctgaactgctccaaaagcaaacctactcagcaaactactcagtgagtatcttcacacatgtaagttccctcgtctgatgtacaaaaaactgaactcatttttcaaaagccttaacagtctgtcttattctgatacttcttttatggttattgtatgagaatcaactacccaggcacctcggagcatgttgatttcagagttcagtgtcagaccccatgagcccctgtgggatggtgccagctgactgccatgttcctgctgtttattgcttgggtgccattacatgcagagtggactctgagggttctagagcatatccaaacccatatcacactctttgttggttaatgatgtgttcaggccatgatttttctgtaaaaaattaccagcatgctgctcttaatttttttcagcctatccagttcagttgccttttgctctcatgccttatgcaaacctttcctcagaggtgaccctagaagaagggaccctttgtgatggaaaaggtcttcatttggggcataacctgtgccaacagaaaggtactttcttgttgtgtttatggtgcctcacccaaaaaatattacagatacacttggctttcatcaacctaatttgatatgtcccaagcatagcaataggatagttctgtgtggccttatggagatcctttttttacatttccaggacccactgccaagaccagcttggtcgtggagaccctaacccagcagcgctagacgaattaaagacacacacacagaaatatagagtgtggagtgggaaatcaggggactcacagccttcagggctgagagccccaaacagagatttacccacatatttattgacagcaagcctgtgataagcatcatttctatagattatagattaactaaaagtattccttacgggaaacaaagggatgggctctggctaattatctgcagcagaaacatgtccttaaggcacagatggctcatgttattatttgtagtttaggaacaccttaagcggttttcctccctgggtgggccaggtgttccttgcccttattccagtaaactcacaaccttcagcataggcatcatggctatcatgaacacgtcacagtgctgcagagattttgtttatggccagtttaggggccagcttctggccggaattgggggcttatccccagcaacctaccatagttggagaaccacgttcaggctgaagacagtcctagtataccaccgaccaaccatgtaaccccaaggtttgtcctcagccttcagagggaacatgcttccaccgatttcagctcagtgatatgggattcaaatgtctgacctccaaaatattaagataataaatgcatgttgttttgaaccatcattaaattaagccagaagtattgatattatttgtagatttcaccactacacactaaacaataaagtcaaatgatttagagcaaaccacctggctcacactttcccaacggaaaaaggtaatgctcaaagtgctgaactgaacattctgtcctaccactagcaaataatcattgtctgcctcaggcttaagtttaataaatagcaaattgcatacagatattttacaacgattgaaagacaaacagaggtcctatccgtgtagtcccaacgataagaacaggtgttggcatgaagtgtttataaattcttgggtacagctgttctgaaagtaaagttcactttcaatcctaaaaaaagtccgctattcctccagatgtgcttaaagtcaaatgtggactggaattacttggtgtcaatgcggagtaactgctctttgctatttattatgaaggactttaactcaactctccatcttcctccacttccaccctttcttggccattctcaatgattctcttggtggtgatttttttaccatcaactatttcagtggaagtcgacatggacttgaagctgcctgtcccatcactaccgtaggacatgcagaaggaagaaaggcccccacttcccagggagccaaaggaacgaaatcctgtatcaaaagaagaaaaaacacccccaaaagctggaaattcactgaaggcagagaaaaggggtgcagacgctctgcttctgcttccccagcagttcctctgacccccccaaaatattctccagcgggtttcccaagaggtcaaaggagaatgggtcctggccgccgaagaactccctgaagacgtcggctgggtcgcggaagctgaagacgtactcgaaggggtcctcgaagggcctgccgcctgtgcagccgccctccgcccccgcctcgccatagcggtcatagatatcgcgtttcttggcgtccgacaacacctcgtaggcctcggccacctgcttgaatctcctctccgcttcctccttgttctcagggtttttgtcggggtgccacttgagcgccagcttgcggtacgccttcttgatggcctcggatgaggcctgccggggcacgtccagcacctcgtagtagtccaccatgctggatggccagaacggcccaccaggcactggcacagcgagcggcaaggctgccagcacccaggcgcaggcccgagtgctcggagacctgggccgcctggagagacgccccttatgacgcagccacatctcattggtcgaggcctatgagcgcctcgcatcccaagatgcagtgcttctgggactggccctgctctctgtgaggctctgtgaggccctgtgatgctccaagaccaggccccgcccactccggcctccaaccagccatggtctccaaaaaggatgggaaaaagaggttggggaaaagagagggccttgactttggctgcctgaagaactgtttttcttaaagtaggctttatatcagtctttttcctcggccacaggagggaagagggtggtgggagtgagtttagtctgactggggctgaagacatcctgttgtttaggactgcagttctccaacgttccagccccggtgcccatttgcttttgttcatgtggattatatctatcatacgtactgcattagagattaaaacagaattaaaaagacatattaattgggcaatttagtaagaataaacccatgacacaatagcaaatcttatttttatgtaaattttattaagacaaaatgtagtgagaagagtggcatcgttttacagtttttgcatctctctttagtacttggctctatagagaggtggattctcatgtcagcttctgtattcaatctactgtgatattacacatcacccatgtagcttctggaaaactccactgtacacttgtgagagaatgacggtgaaaaaatcaagtagcattattatggaaatagttttaactttgcaaaattctcctgaaaaattcttggggatccctaggatttcctggctcatactttgagaatcgctagtctagcagagtagtccttggtattctgaagggattagtttaggacaaccctcctctccataccaaaatctagatgctcaagctccttttataaaatgacacagtatttgtatataacctaccaatatccttctttaagcctctagtcatctcttgattacttttacctaataaatgtaaatgctatgtaaatagttgttttacagtattggttttttatttgtattatttgtattgttttttcattgctcttccccccaaatatttttaatctgctgttggctgaatctgcagatgtgaagcccaagtatatggagggtcaaatgtgcatgttattcacttttcttgactgctaaaacaaccagggagatcctctcagacaaaaggaaatacagcactatttactgtatcgaaaccattaagacttgcaggccgtgtgtatagcactggggataaacgtgggatgcagtgattatttccactagaactgctatatcatgaccatgaattttgggggaatttttttgagatctgagttctcttcacctccttattctctttttgacactggattcttttctttgataaattgtgaggcaatacactagtaaaggtcactcagttctaaggggaaaatgattaaccaaagaacattctaagatttcctatagggtattaggtctaatggggatgtgttatgtcaccagaacaaacttctaagtttatatagcctctagtgacataacctgagacccggacttggcacttggtaagcacacaatgaacagtcatagaaagctggccgagggtagagttcagtgtgaacaaagcaatttgggaacatcaaagcaagtttggagaacaacaagtgatccagaatggctggagggtaagaggcagagggagggggcaagcagaaggggtggagaggaggaatgagcttagacaggggggctggggtctatcccagagttttgagagcaaggcagaggactctgaattttcttctgtgcccaggaagctgctgaccaaggttccagaagtgttggtggggtggcgtttttcagggagcagctgaggcagtgattcagaagggacagctgggggttgggcaactgggggacaggggccctgaaatgggaccatgacagctgggtctgagagacagtggtagaaacatccagattcagcacttacttgctggcttggatgcagggtctagaacgaaaagagaagaggagtcacttctatacagaaacatgtccagagtgcttactgtctgcaaaactgtggactggcacctgagtgatagcatgattccaaagccaaaatcttgcctgtaaggaatatatgtataggatatagctatactctaatagcaaggacagatatgcaaactgctaaaagatacaaggcagaacagaacaaaacgctgtggggattcaaggaaggtggctttgtttcccttggagggccctgtagatgatctacagggcaatggacatgtttatgttgctcctttagtaacaagtcccttcattctgatttgatgaaaggagctgggagtgtgtccaatggtgacctattaacttatgtcttcagcttaaaaagaaagtaccttcaaaagggttccagaaacactttccatggacatgtcactctttagtagcccccaaagcaagaccatcatattgctgccctgctgtgtgacttcttagcccctagagcaccacaccctgtaattgcctagttgtgagtttgtctctgttcacctgacccctcctttcaggcaaggaccatttctaacttggctttctgtcccgagttcctagcatagtaggtagggctcacacattccataaatatttggtggataagggaattagcaatggattctgctttggttccaaagcagagattaattggattgcttagtagtggttttctgttgtaattcatgagcgtgaatgtggattgcctactattgcctaccactgttggggacctctcagacctcagctgcagcctgataaacgtggttaacagagaagtaggaggctgtgacatgaaatgggtttccacaggcctttgttgggaattggatgagaaacaagagcttgaacttggatgttccccagagcgagcgcagggtcagatgagtttttcaagtaggagtgatcggtctttcccgaagtgggacccataatgaaagacaatgattggttaatcggtaataattaactaggaggagagcactctatcttccaattacatgatgatttgctaagtggctcagtgacaaggtaattaagatgaagaaaacaaatgtaggaggcacagcgtggggtggacagtcagctgtccgtgtcttctgctgagatggccacaggaccccaggttcccctgctgtggctggccacaggagtgctactccttctcagtgcccagccctgggctgagagtgggaaggtgctggtggtacccattgatggcagccactggctcgcatgcgggaggccgtgcgggagctccatgccagaggccaccaggcggtggtcctcaccccagaggtgaatatgcacatcaaacaagagaaatttttcaccctgacaacctatgccatttcatggacccaggatgaatttgatcgccttgtgctgggccacactcaactgtactttgaaacagaacattttctgaagacattttctaaaagtatggcaattttgaaaaattcatctttggtctttcataggtcttgtgtggagctactgcataatgaggccctgatcaggcacctgaatgctacttccttcgatgtggttttaatagacccaatttacctctgtggggcagtgctggctaagtacctatcaattcctgctgtgttttttttgaggaacattccatgtgatttagactttaagggcacacagtgtccaaatccttcctcctatattcctaagttactaacgaccaattcagaccacatgacattcctgcaaagggtcaagaacatgctctaccctctggccctgtcctacctttgccatgctctttctgctccttatgcaagccttgcctctgagctttttcagagggaggtgtcagtggtggatcttctcagccatgcatctgtgtggctgttccgaggggactttgtgatggattaccccaggccgatcatgcccaacatggtcttcattgggggcatcaactgtgccaacaggaagccactatctcaggtcggtgttcgtgccttcatccaatcaatgttccaggcaaaacagtttttaaaaattgtatttacttacaattgcttccatatctacttatctttctggtgcttttatttctgcttgtcgtaatagccttcagtgagataaactgttaaggggtctctagtagcgtatttcaggttttaaatggtcaatgagaggaagaagaggcagacatgaatgtttatcaaaggatggactaggactgatgtgactcatggagactgttcgtttgtaaaggcaccatcttcatggttgtgcatgtccttcattgggaaggagcagggacactacattgagacttgacccatctggattttttgtttgcacaattttcaggggaaagatgatgcaacagcaaattacaattgttaatgtgataatttttagtggtcctgtcttgcgaatgatagagaggtgaccacaggagacctaagcactcgcaggaagtagaagtgttaaagaggttgactcagttcagtggaagtagagcaacgaacgtgggatatatgtctgtgattatagaattacacactgagttcagtttccagagagggatctgtgctgacaaaagatttttctggtcaggatttggggtctggtgcatgatgtggggacatctcagagttcggaaggcatagttttggttgcaggtcaattgggtcttctacttggaatgctgaaattatcaagaaattgtggaagggtctagggaggagataaaactgtgagcgtataagcccagttaagctggggacggtgatgaatggacatgtgtccaagaagggaagtgtttctcaggtgaagctgaacatatcaccaaacccaccctatcccactccaagtttctatagtgggatctacttctttaccaacaatttcaaaggcagctttctttaatccagaatatttggggttcattgatgtggtactctgggacctgaatattgtttcttattccttggtgtgccatgtatttcatgagagaattcagcctttttatgtcatattcactgaatgcatatgaacttccatgacttgatccttttgtatttttatttctgtacttctttttattaacataggtattattgccaaacactctaagcttcattttttaaaatcaaaccacatgatttttttattggtgattttctcccttatgcagtgtagttattcaattataaaatatgtgtttattagatttgtaacaatgttgaaaagtgggatggaatttaaatagtgactcttgcccttttcttccagtttttcaatgtgaacatattctctagtgttaactacattgctcaaaacttcactgtcatctcagtggagcagaacgaattgggaactgtggcacagatcactcttgctatgccccttagagaattagagaacactagcaaggctaattttcgagtgtggtaaagaacaggctaatgtattcaatagtgaggccactgactctgtctcaacatgaagtcacactagatttatcatgatttggctctgtatcccccaccaaatctcatcttgaattgtaatccccataatccccacgtgtcaaggacaggatctggtgggaggtgattggatcatgggggcagtttcgcacctgctggtctcatcatagtgagtgagttcttatgagatctgatggttttataaggggccattgtcccttcacttgcaagctcttcctctttctctctttcatgtaagacgtgtctttgcctctctctcactttctgccaggattataagtttcctgaggctcccccctccagccacctggaactgtgagtcaattaaagctctttcctttatgaattaccgagtcttgggtatgtctttatagcagtgtgagaatggactaatatattaaattggtgccatggagagtggagtactgctataaagatacttgaaaatgtggaagtgactttggaactgggtaacaggcagaggttggaacagtttggagagctcagaagaagacaggaagatgtgggaaagtttggaacttcctagagacttgttgaatggttttgaccaaaatgctgataatgttgtggacaatgaagtccaggctgagtctcagatggagatgaggaacttattgggaactggaacaaaggtcacccttgctatgctttagcaaagagactggtggcattttgcccctgccctagagatctgtggaactttgaacttcagagagatgatctgaaattggaacttatgtttaaaagggaagcagagcataaaagtttggaaaatttgcagcctgaccatgtggtagaaaagaaaaacccattttatggggagaaattcaaaccagctacagaaatactggctatagaaatttgcataagtaaggaggagccaaatgttaattgccaagacaatggggaaaatggcttcagtgcacatcagagacctttgcagcagaccctcccatcacaggcctggaggcctaggaaggaaaaattgttttgtgggctgggtccatgctccccctgctgtgtgcagcctcaggacttggtgccctgtgtcccagtggctccagccatggctaaaagaggccaaggtagagctcaggccattgcttcagagggtgcaaacctcaagccttggcagcatcgatgtggtgttgggcctgtgggtacacagaagataagaatttaggtttgggaacctccacataaatttgagaggatgtaaggaaatgcttggatgtccaggcagaagtttgctgcatggatggagcccttatagagaacctctgctagagaagggtggtaaagaaatgtgaggttggagcccccacacagagtctccactggggcactgcctagtggagttgtgagaaggcggccaccatcctccagaatcccaaatagtagatccaatagcttgcactgtgtgcctggaaaagacacagacactcaatgccagcctctgaaggcagccaggaggagggctttgccctgcaagccacagtgtccaagttgcctgagactgtgggagcccacttctggcatcagcatgacctagatatgagacatgaagttaaaggtgataattttggagctttaagatttaatgactgccctgcctggttttggacttgcatggggcctgtagccccctttttttggccagtttctcccatttggaatgggaatatttacccaatttctgtacccccattgtgtcttggaagttacttttgattttacaggctcatgggggaagggacttgccttgtctcagataagactttggactatggacttttgagctagtgctgaaatgagttaagactttggaagattgttgggaaggcacgattggttttgaaatgtgaaaagacatgagatttgggaggggccagagggcagaatgatatggtttgactctgtgtttccacccaaatctcatctcaaattgtaatctccataattcccatgtgttaaggatgggacctggtgggaggtgattggatcatgtgtgcagtttcccccttgctgttctcatcctactgagtgagttctaatgagagctgatggttttataaggggctcttcctccttcactcacaagtgaactcttcctctctgtttctctcttgcttgctgccatgtgagacatgactttgcttatctctcaccttctgtcatgattgtaagtttcctgaggcctccccagccatgtggaactgagtcatttaaacctttgtcttttataaattaccccgtcttgggtatgtctttatagcagtgtgagaacagactaatacaagattggtggtgattgaagttatactgaaagggtttaaaggagagtctgagaaaaggaaatgaatctgcatttattgagaaagttgatgagaaagtggaattagaaattcctagaaaggtaagctgttgtgtgaatgatttcccgagatggggaagtctctctacctgtttggagacagaaagtagaatcagaggagaagaagatgatggacagaaaggatcattccctcttctagatgctttctagtgtgtgatgtaagctgaattaaaatcagctgtgttgaactccagccagaaaaaatatctggcattttggttttttggaccctactgtgatggtcacaggactccaggtctcttggggctcacagggtcatgcctttccttgcccggtgtgcttggtgagaaggaacaagtgtttccatggaggaaattcattttaggggtctcaagagggtcatctttgcaacagaggaaatgcccctttttccattctgaaaacctgatttatcgaacccttttataaaagatgaatacccacatataggcctctagcagtgttatgtttttgagatgagacattttaaaaagcgatttttcaattctaaaaattctttaaataaaatgctcttgctgggacaacatagtgggtcaacatcattcccatctctacaagattttttttaaaaaaacattagctaggtgtggtagctgttgtcttagttactgggaatgctgaggaggaaggatcacttgagcccagaaattcatgtttactagtggggtatgatcttgcctaggcaacagctacagagagagaccctgtctctaaaacaaacaaacaaacaaacaaacaataaccaaacaagctttacacttctgtagaaggaacacttcccatttatgacatcagtaatctaggatatatcaaaatttgaactttgtgttagctttcaactgttaaaactagccagcgttgttacagatccacctctgagtgacactggtatgccactctttgctgaccactgaacaatgggatttatgtaaccaattgtgtagatacaaacccactcattctatcctacccagagtggtgatttacaacacaaaaaactaccatgaaactgttcccatgccttcctcccacctcaaaactccttttattcctgaacggctccataagcaaacccatccccagcaaactactcagtgagtatcttcacacatgtaagttcccttatccggatcactaaaaaatgaactcatttttcaaaagccctgacagtctgtcttattttgatacttcttgtatagttattatttaagaagcaactacccaggcaccttggagcatgttgatttcagagttcagtgtgagaccccgtgtgcccctgtgggatggtgccagctgactgccattttcctgctgtttattacttgggtgccattccatgcagattggactctgagggtactagagcatatccaaacccattgtcacagtatttgttggttaatgatgtgttcaggccatgatttttctgtaaaaaattaccagcatgctgctcttaatttttttcagcctgtctagttgttgcccttttgctctcatgcaaacttttcctcagaggtgaccctagaagatgggaccctttgtgatggactaccccaaggcaatatgccccaaaaggtcttcatttggggcataacccgtgccaacacaaaggtactttctcaattgtgtgtatggtgcctcacccaaacaatattacagatgcacttggctttcatcaacctaatttgatatgccccaagcacagcaataggacagttttgcgtggccctttggaaacgcttttctttacatttccaggacctaccatagttggagaaccacgttagggctgaagacagtcctagtatatcattgaccaaccacataaccccaaggtctgtcctcagccttcagaaggaacatgcttcttacaccgatttcagctcagtgatatgggattcaaatgtatgacctccaaaatattaagagaataacgtgtgttgttttaagccaccaagtttgggtaatttgttacagccatgataggaaacgaatgcatccactttgccaggtttacctgcttttataaagcctgggtttaaccttttatctaaataatggtcaactcttcctacatcacgagcatttatgtgcaattaaaagccatcattaaattaagccagagtattaatatattcatagatttcaccaccacacagtaaaacattgaagtcaaatgatttagagcaaaccacctggctcacactttcccaacggaaaaaggtaaggctcaaagtgctgagatgaacattctgtcctagcactaggaaataatcattgtctgcctcaggcttaagtttaataaatagcaaattgcatacagatatttacaatgatcgaaagacaaacagaggtcctatccgtgcagtcccaacaataaagacaggcattggcataaagtgtttataaattcttgggtacagctgttctgaaagtaaagttcactttcaatcctaaaaaaagtccgctattcctccagatgtgcttaaaggcaaatgtggactggaattacttggtgtcaatggggagcaactgctctatgccgtttattatgaaggactttaactcaactctccatcttcctccacttccaccctttcttggccattctcaatgattctcttggtggtgatttttttaccatcaactatttcagtggaagtcgacatggacttgaagctgcctgtcccatcactaccgtaggacatgcagaaggaagaaaggcccccacttcccagggagccaaaggaacgaaatcctgtatcaaaagaagaaaaaccaccctcaaaagctggaaattcactgaaggcagagaaaaggggtgcagaccctctgcttctgcttcccagggagttcctctgaccccccaaaatattctccagcgggtttcccaagaggtcaaaggagaatgggtcccggccgccaaagaactccctgaagacctcggcggggtcacggaagctgaagacctactcgaaggggtccttgaagggcctgccgcctgcgcagccgccctccgccctcgcctcgccatagcggtcatagatatcgcgtttctacgcgtccgacaacacctcgtaggcctcagccacctgcttgaatcttctcaccgcttcctccctgtcctcggggtttttgtcggggtgccacttgagcgccagcttgcggtacgccttcttgataccctcggacgaggcctaccggggtactcccagcacctcgtagtagtccactatgctggactgccaaagagcctgcggggcactggcacagcgagcggcaaggctgccagcacccgcgcacaggtcagaggcttggcgacctgggccgcctggagggccgccccttatgacgcagccacatctcattggccgaggcctgtgagcgcctcgcatcccaagatgcagtgctcctgggactggccctgctctctgtgaggctctgtgaggccctgtgatgctccaagaccaggccccgcccactccggcctccaaccagccatggtctccaaaaaggatgggaaaaagaggttggggaaaagagagggccttgactttggctgcctgaagaactgtttttcttaaagtaggctttatatcagtctttttcctcggccacaggagggaagagggtggtgggagtgagtttagtctgaccggggctgaagacatcctgttgtttaggactgcggttctccaacgttccagccccggtgcccatttgcttttgttcatctggattatgcctatcatatgtactgcattagagattaaaacagaattaaaaagacatattcattgggcaatttaagaagaataaacccatgacacactaacaaacctttttatgtaactttttttgagacaaaatgtagtgagaagagtggcatcgttttacagtttttgcatctctctctttagtacttggctctatagagaggtggattctcatgtcagcttctgcattctatctattgtgatattacacatcccccatgtagcttctggaaaactccactgtacacttgtgggagaatgacaatgagaaaatcaagtaacattattacggaaatagttttgactttgtaaaattctcctgaaaaattactggggatccctaggatttcctggctcatactttgagaatcgctagtctagcagagtagtccctggtattctgaagggattagtttaggacaaccctccttccccataccaaaatctagatgctcaagctccttttataaaatgacacagtatttgtatataacctacccatatcctcctttaaacctctagtcatctcttgattacttttacctaataaatgtaaatgctatgtaaatagttgttttacagtattggttttttatttgtattatttgtactgtttttttttcattgttgttccccccaaatattttcaatctgctgttggctgaatctgcagatgtgaagcccaagtatatggagggtcaaatgtgcatgttattcacttttcttgactgctaaaacaaccagggagatcctctcagacaaaaggaaatacagcactatttactgtatcgaaaccattaagacttgcaggccgtgtgtatagcactggggataaacatgggatgcagtgattatttccgctagaactgctatataatgacgatgaattttggggggactttttttgagatctgagttctcttcacctcctccttattctctttttgacactggattctttgctttgataaattgtggggcaatacactagtaaaggtcactcaattccaaggggaaaatgattaaccaaagaacattctaacggttcataaagggtattaggtgtaatgaggatgtgttatctcaccagaacaaacttctgagtttatataacctctagttacataacctgaaacccggacttggcacttggtaagcacgcaatgaacagtcatagtaagctggccaagggtagagttcagtttgaacaaagcaatttgagaacatcaaaggaagtttggggaacagcaagggatccagaatggctagagggtaagaggcagagggagggggcaagcagaagggctagagaggaggaatgagcttggacaggtgggctggggtctatcccagagttttgagagcaaggcagaggactctgaattttctgtgcccaggaagctgctgaccaaggttccagaagtggtggtgaggtggggttattcaggtggcagccgatgcaatgattcagaagggacagctgggggttgggggacaggggggctggggccctgaaatgggaccatgacagctgggtctgagagacagtggtagaaacatccagattcagcacttacttgctggcttggatgcagggtctagaacgaaaagagaagaaaagtcacttctatacagaaacatgtccagagcgcttactgtctccaaaaccatggactggcacctgagtgatagcatgattccaaagccaaaatcttgcctgtaaggaatatatatatatatatatatatatatgtatatatgatatagctatagtctaatagcaaggacagatatgcaaactgctaaaagatacaaggcagaacagaacaaaatgctgtttttctgggattttggaaattcaaggaattcaagggattcaaggaaggtggctttgcttcccgggagggtcctgtagatgatctacagggcactggacatgtttatgttgctcctttagtaataagcctgtcattctgatttgatgaaaggagatgaaaggagctggtagtgtgtctgatggtggcctactaacttatgtcttcagcttaaaaagaaagtagcttcaaaagggttccagaaacactttccatggacgtgtcactctttagcagcccccaaagcaagaccatcatattgctgccctgctgtgtgatttctcagcccctagagcaccatcccctgtaattgcctggtcatgagtttgtctctgtctacctgacccctcctttcaggcaaggaccatttctaacttgactttctgggcctagttcctagcatagtgactgccatccagtagggctcacacgttccataaatatttggcagatgagggaattagcaatgggttctgctttggtttcagagcagatattaattggattgcttagtagtggttctctgttgtaattcatgagcatgaatgtggattgcccactattcagattagtaagtatttcttggtcaagggcagagctgtggccacaaaccatccaggtacacagcagaagcagcctcaaaaagcttggaagctctgcatgatgcaggaaagtcataaaatcattacagtggtgacttatgtgtttatagcccctttactgtctataatctgcaaatgaactcacacagcattgggactttggaagaattatcacccttaaggtttaaattaaactgtgaatttcagaatttctaataaggacacaacaaagagtgaaagcattgctatgtctattctgcttgcccagaatcttggtcctaaaaaatgaagagtgtttgggtgtggggaggagcttcagtgtgcatgtgcatgcaaagtacctactctaaggagaagaatgagagggtaccctaattacctgttaatatgtcccataggacaccaaaactctagttagctgtttctctatgatcctctaagcacatccccaagtatggctggccagtgatgtgtatggttcaaatgttgggatctgtgcagttatcttggaattgtatagtacagcagtatatcccccccaaaaagagtgtaatacttccaattctggctgcacaatacttgccccatagtccatggtcaataaatacaaatttgagttgtttttgctcatctttcccttttgacttcaaatcagtcatcagaatttccccaaatgcctttcccctggatcttgggccagtggaatgagtacaatttaacttaattgaatttgcttatctatttggtttcctgttgtgaacaaaagttctctgaaaaggaatttggaagaaagagactttgttctagtgaacagtttgcaaaccagggagttacagcctctggtacgcaatgaaggtgagttccacagaacacaaggcaggcaggtttcacggcaaaaagttccttcccaggttcccaatcaggtccatttatgcaaatgaaggatggaaacttgcttagttcttattggtcactgcagctgcattctgattggttgatgaagctgagccctgagtggctgaggtgggtgagctttaattggttggttcaggtgagcgctgaaaatctcaactataaaaaggtacaggttttcaggatactcagagtaaccgtgtgacctgtagtaagcaaagggccagttggctctattttaaatccaggcccagttagccactcaagatctatcttacaggactggctctttcaggttcacactaataaaggcctgtccttggggaagacttctgttcacatgcgctccagtgaatttccctttctggtcattctctaccccagcacgccccccacccccgacccgccccacccacccacctgttcatttccttcttagcatgcttcacgatttctaagttcctgctcatgtgtttaaattgtgagtctggctcacctcatggcgcgtgctcgtgtggtgggctctgctgcagcctcaagaccccacactgtgctggactcaataaatattgttggacgaaggaatgaaacacatgatacaagtgagcaggcagtaccgggggagctgtggagtgggcactcttacaggtttccatggcgaaagcgggggtacagttgtgttcttttctttctaaaaggctttctaaaaagccttctgtttaatttctggaaaagaagcctaacttgttcactacatagtcgtccttcttcctctctggtaacacttgttggtctgtggaaatactaatttaatggatcctgaggttctggaagtactttgctgtgttcactcaagaatgtgatttgagtatgaaattccagccagttcaactgttgttgcctattaagaaacctaataaagctccaccttctttatctctgaaagtgaactccctgctacctttgtggactgacagctttttatagtcacgtgacacagtcaaacattaacttggtgtatcgattggtttttgccatatatatatatataagtaggagagggcgaacctctggcaggagcaaaggcgccatggctgtggagtcccagggcggacgcccacttgtcctgggcctgctgctgtgtgtgctgggcccagtggtgtcccatgctgggaagatactgttgatcccagtggatggcagccactggctgagcatgcttggggccatccagcagctgcagcagaggggacatgaaatagttgtcctagcacctgacgcctcgttgtacatcagagacggagcattttacaccttgaagacgtaccctgtgccattccaaagggaggatgtgaaagagtcttttgttagtctcgggcataatgtttttgagaatgattctttcctgcagcgtgtgatcaaaacatacaagaaaataaaaaaggactctgctatgcttttgtctggctgttcccacttactgcacaacaaggagctcatggcctccctggcagaaagcagctttgatgtcatgctgacggaccctttccttccttgcagccccatcgtggcccagtacctgtctctgcccactgtattcttcttgcatgcactgccatgcagcctggaatttgaggctacccagtgccccaacccattctcctacgtgcccaggcctctctcctctcattcagatcacatgaccttcctgcagcgggtgaagaacatgctcattgccttttcacagaactttctgtgcgacgtggtttattccccgtatgcaacccttgcctcagaattccttcagagagaggtgactgtccaggacctattgagctctgcatctgtctggctgtttagaagtgactttgtgaaggattaccctaggcccatcatgcccaatatggtttttgttggtggaatcaactgccttcaccaaaatccactatcccaggtgtgtattggagtgggacttttacatgcgtatattctttcagatgtattactttggatcgattaactagccccagatatatgctgagcaagcattctgagataatttaaaatgccctcttttgttaatttttgactcctaggtttgagtctgtctttggcatcatcttctggatgatttcttggtatctgagatttcgggaaagcattccttggacattttactctgtgtgctccagtggatagtaatcaattagaaacaacaagctgttaaatgccataggcacagaatgctgggtttggggcaccctgcagaaaactcagttgaagcctgcaccttgccctggattcagtcaggcaggcaatgttcaggactgatgaaatcattctttgatgatgatagatcctggaaatgaaagttgcctttgtgaccctggttaaagctccagtttctaaatattctgataagaagctaaatcctgcagtccgttctcttctaatgagtgaatcaccagacagtcaggttctgacatgatacagaaaggttgtaggtttcattctcaagctattaggtttatttttcccctacagagtttgaagtatgcaaaaagtagcattcacatcctcatcgaaatctcagcagaggatagaaaagaacaggagaggctccttcagatggagcgttagggaattactctttgaggaggtgacatttcagagagcgttcattcacttatcctgcaaagattggctgaggatctactggcagcccaggcacttcccaggtgctgcgtctggctcccattaaggggactgatatcaccttcggaggtgaccttatttccactatacctccaatgtgatttgtattttattttttttaattttctgtgcattttccttcatagcacatcaaatatggcagccatttcacttagatagttgttgattgtccgcttcacatcatgagccatgtggggacctgtgtgactttgcattaatcacatccactgtatgcggcgtcctcaacacctgccaatgggtctgcatgtatttggcgccccataaatctcagcacctaaggcacagaataggcacccaccgaatatgtgttacattaatgaatgagaagaaaggtgccaaccgaggtctagttaatgggtcgagagtaatccacaatagctctttttagttctttgtactccagctattacataccaatatgtatatagaaacatatgtaaaattttttggttgctttttctacaaaatagagtaacagtgtattcccactgcccacttaccgataatgtcatggatatcactccagttttaaatgctattactttttaaactatgaaatagtatttcatggtacttgtgtaccacagtgtattctgctggagatctagtctagttccccacagaggaacattacaatttgtattccaggagttttgttgttgtgacctcaaacacttcctttaaaaagataagctattttgtagtttaaaaaacatttgttctgtttctttctcattcatcttttcttaagtattttacacggttttttttttttggtcactactgtgaatgtgttatttttttgcatttctatctctagctgattatctactcattactcagctatctcatcaaaatattgattttcataataaaaaataataggcagtcatttgctgataaagaaattttggtttcttctcttataaattccatgccaaatatcagggctattgaatttattagaatctctaaaaacagttgaataattctggcaataggaaagatgcccgtcttgctgctattttagtggaaattgattatcatttcattattttgcattatgttagccattgttttctgaacaggctttattgatttagataatttccttctttgcgtgaggatgtttgtaggagaggcaccgaactttatcagctgcctttctggcatttattgatataaccataaaagtctaagtggtgaactgtgttgactacatatttgttgttgccttgtttggtgcagtcaggcttaggtgtgaaaatatgtttttaaattgtaccttttagtaacctgttttgtcttgttgcatgttttaatctgaaattccactttttggatattaatattaccacttctgtattatttttgtttacatttccctagcacatctttagtactcctttgtcttcaagctttcttcctttttaaacaacatggcactggtatttttaatccagtcaggcagttgctttaataagtgcattttgcctatttgaatctaacaattaatagatttgattgtaactctctcagtttactttatgtttagttgactttgccattctcctttttccggatttctactggttggtcaagttactgttcttattttctctttcttcctttgttaactaaaaatgccactctgcactaccattcctcttgtgttgatggtcctattctcaatactcttgataaaactcctgaactttaagaataaagataaaacttttattgcacaaagaagtccatagagaaagcacaacctggcattggcgtgtctttggtgtgtctgaaggaaaagagatagtggaacaacattgggagaaaaggaatgaaactcaagaattccaagatgttcctcccctgccagggtaagatagcagtggttcacagacaatcgcaatgctgggtctgagaaaaataactaaacagaagattagtgaggaccaaggcttcgagatggccaggagaggaaagcttgggagcagggaaggttgagatatatgtgggttactgggaatgcgtgatggtgaagtcacagatgacccacatggtgtctaagtgctaaagaagaattctgggaaaatgaaatgcatttgggaagggaaaatctaattaaaagcctaaactaaaaatacaaaattcttggtaaagtttaggagttatgttaaatgtctcattttggctggtgaagtctcatcagaacagggaaattctctcattcaggggcatctcatcttttctttgaagggaatcaatggtgggggattggagtgttattttcagttaatatgttgcttcactctttggtcattccggtaactgtgaagtcagggtgaagtttaagggaagctttgccaagtaggggatggacttcacctttattgagcctcatagtagctggctcaggtaggagttggccgtgatgacaacttctctgcagtttgccctgcgtgaatctccagatgaacttttgtgccatttaaactttcgtgatctcctgctatttaacttcgaatgtttatggacctgtgggttcaattttgtgtgaatcacatcctgctgattgctgagtgggcgtgtgggagggtgtgcctggaggagaacttagactcggccttttccagatgagcttcagtgtaagagtgggtttcatgaagagcaaaggtcctaggaaatttaagtaagccatttaccaacgctcagaagaaagaacttgaagagcacttggaaatgagctgtgtctccccaagaaagagggagagaaagaggggagagatgtggtgcagaccctagggaggaaggagttcagaaaaaccatcctcagggtgttcttgctacaaaccaaaaaatgcagcatggtggtggggaggatgactctgtcctccctgacttttagatgagcccaagggaaaaggcaaagacaaagcccttaagagccagaggactcacgagggcctggggctggtgagagtggcggggagagagggctcaccttgggagaaggatggtcagtgtctggggctttcctggtcatgttccaaatcaggcttggcaggagtcctgctgtgcaaattgcgtttgctgagccctgtcagaggtctcctgtgtctcacatctagggtgaccagcatcctggcttcctcaggactgttcaggttttagcactgaacatcacatgtcctagggaacccctcagtttgggcaagccctgccacatcacacaatcatattagtgccctcagtattctttgcaaacataaaaccatagactcagtaatcccattactgggtatatacccaaagaaatataaattattctactataaagacacatgcacatatttgtttattgcagcactattcacaataacaaagtcatggaaccaacccagatgcccatcaatggtagattggataaagaaaatgtggtacatatacaccatggaatactatgcagccataacaaggaatgagatcatattctttgcaaggacatggatgaagctggaagccatcatcctccacaaactaacacaggaacagaaaatcaaacaccgcatgttctcactcataagtgggagttgaacagtgagaatgcgtagacgcagggaggggaacaacacacaccagggcttgtggcggggtgaggggtgaggggaggaacttagaggataggtcaataggtgcagcaaaccaccatggcatatgtatcccagaacttcaagtaaataataataataataattaataataataataataataaataaacccataaagccatttgagagattcttgggggattcattggaccactgaaaatctacagtgagaaaagaattgccatgttgatgaaacaggaaaactttccttgtccccctcacagagcatgtgacagcgggaggggctcactttctcagtgcgccactgctcaaacctctaggggagcatacagacgggcaggttgtggggctctgacctcaccggcagtgtctagaggtggatgtttacagctcctgaagctccagtgggcgtgggttatggccttcttttagttttgccctctatagtcagcttgtgttaaccagctcaattacaccctctaccttgtcgcaaggacagagggctttctgtatcctgggggcttgccttggtgtaccagaagaatcgaatcccacctgggcttggagaatgagtgcaaggatttattgagtggatgtagctctcagcagatgggggaagccagaaggggatggaatgggaagggtttcccctggagtcagaccgctcagtggcccgggctcggtggcccgggctcggtggcctgggctctcctccgactgcctcagccaaactccgcgttgttctgctggtcagtggcctgccggtgcctgttggtgagttcttctcaatgtccagctgtccttgcgtccctccgctgatgtgctcctcccgatgtccagctacctgtgtgtctgcctgctagggtcttggggtttttataggcacatgatgggggcgtggcaggccagggtggttttgggaaatgaaacatttaggcaggaaaacaaaaatgcctgtcctcacctaggtccatgggcacaggtctgggggtggagccctcgccagggaccacaccctcttctacccagcacttcccttccctacttccatatcatttaaagggaccacgcccttcccagctcttcccttctgtatcactgatgccttgctctgtgttctctaagtggaattatcactgtgtgtatgtacaggtgtgtgcatgtgtgtgcatgtacctgtgcttttcttttggaaaactagcacattacctggattttgcatctcaaggataattctgtaagcaggaacccttcctcctttagaaggaagtaaaggagaggaaaatgctgtaaaacttacatattaataattttttactctatctcaaacacgcatgcctttaatcatagtcttaagaggaagatatctaattcataacttactgtatgtagtcatcaaagaatatgagaaaaaattaactgaaaatttttcttctggctctaggaatttgaagcctacattaatgcttctggagaacatggaattgtggttttctctttgggatcaatggtctcagaaattccagagaagaaagctatggcaattgctgatgctttgggcaaaatccctcagacagtaagaagattctataccatggcctcatatctattttcacaggagcgctaatcccagacttccagcttccagattaattctcttaattggaaccttagatttggcttttccctgccacttcccaactattaatccaaaggttttttttgttgttgtggttgttgtcattgttttcaatttgactctcaaatactctattaaactatgatccaccacactcagaagtatcattttctctaagagactcaaaagtgtattagggagaatttatttaaaaataaaataaatgggatattgtttcttcatattaaatagaagtatttctccaaaaagctgttggttagaacactgaatttatgtcttacatttctgctcttatagttctgcatccacttgtttcattaagcaaactttcccttaaagtgcaggaaagtgaaaaaatcctaagtgcacagcttgataaattatcacaaattcacgtagtgcatacacccttgtaactaaacctccaaaacaagatgccggaagttgccagtcctcagaagccttcacagttactgatcctcccactctgttaaagactgttccttcagaggacccctgttttctagttagtatagcagatttgttttctaatcatattatgttctttctttacgttctgctctttttgcccctcccaggtcctgtggcggtacactggaacccgaccatcgaatcttgcgaacaacacgatacttgttaagtggctaccccaaaacgatctgcttggtatgttgggcggattggatgtataggtcaaaccagggtcaaattaagaaaatggcttaagcacagctattctaaaggattgttgagcttgaaaatattatggccaacatatcctacattgctttttatctagtggggtatctcaacccacattttcttctgcaaatttctgcaagggcatgtgagtaacactgagtctttggagtgttttcagaacctagatgtgtccagctgtgaaactcagagatgtaactgctgacatcctccctattttgcatctcaggtcacccgatgacccgtgcctttatcacccatgctggttcccatggtgtttatgaaagcatatgcaatggcgttcccatggtgatgatgcccttgtttggtgatcagatggacaatgcaaagcgcatggagactaagggagctggagtgaccctgaatgttctggaaatgacttctgaagatttagaaaatgctctaaaagcagtcatcaatgacaaaaggtaagaaagaagatacagaagaatactttggtcatggcattcatgataaaattgtttcaaatatgaaaacatttacgtagcatttaatagcgttgtttcaaatataaaaacaaatacataaaaatctggatttttatttcttcttttttttttttttttttttttgagatggagtcttgctctgtcacctaggctggagtgcagtggtgcaatcttggcttactgcaacctccacctcccacgttcaagcagttctgcctcagcctccgtgtagctgggattacaggtgtccaccaccacgcccggttaatttttgtattttttagtagagaaagggtttcaccatgtttgtcaggctggtcttgaactcctgacttcaggtgatccacctgcctcggcctgccaaagtgctgagattacaggcatgagccagcgcgtctgacctggatttataaataagataatttagaggttattattcactttataaaaggattctttagtttctatataatttatcatataatttatttagaattttatttcccccattagatttaaaactccaatttacataaaaagttgccataatagacatctgatccataagtttcctgcacagaaagaaatactccattataagaagcatagtatctttaagagaaaaacaactcaaatgcttagaagtacagctttttgcagcactggaacctgtgagaaattttgtccatggagtttatgaatgaaggagctataagatatcacagacaaagtcttagaataagagcaaaggaaaatttgctcaaatgtggccctgaaaacgattcaaagggcaaatgatttctggattaaagttagtatattactgtcaagctcactggtaataggcttattagaaccttatgggaagaagtggtggccagtggtagatttcatccgacaatagatactgtgtgcatatgtgcgtgtgcgtttgtgcatgtggctgtgctcatgtgtgggtgcacacgtgtgcattcatatgcgtgtgtgtgtgtgtgcgtgtgtttatgagagtgtccattgctttctcccatggttacctcctttagaaagaagcagcagtcaggaagacagatgtgaagagctggagcatgttcagatgagaggagacggaacacggggacacaccagcttgagcaagggacaacaggggaggactgatgactgacttcccacctttgaggtgctaatgtgtgtgtggtggcactggataaaagatcaatgttggctaggcaccatggcacacgcctgtagtcccagccactctggaggctaaggcgggaggattgcttgagcccagaagttggaggctgctatgagccgtgatcatgccactgcactccagcaacctgggcaacagagtgagaccctgtctcaaaaaaaaaaaaaaaaatgaaaagtccacataacctgagcatcatgtgcccagagcgttgggtggtgtggtcccattccttccttccagcggcttcttctggccacctcaatgtcaggatgtcctgctcacatatcaataccattaaaacctgacttctttccctgcactgttgaagctccttcttgaggctcacattatggatataattttgattctttcttcagtggtatagataactacttgtaacctaagaacaacttggtgaaagtcctctaatacattattttttaaaaaaacacaaatcaatgagctcaacttattaactaactttcatctattcatttttgagccatccctgtctgattgtgaatctccatgattccaacactctgagctggggatagtgcctacacaaaataaaaagaagtggaaaattttcaaacatcagtttatgctgacaaccaggccataataggtgctcaattactattgaatgaatgaatgaaagttctggccaggtacggtggctcatgcctgtagtcccaacactttgggaggccgaggcaggtggatcacttgaggttaggagttcgaaaccaacctgaccaacatgaagaaaccttatctctaccaaaaaaatataaaaaaattacccaggcatggtggtgtatgcctgtaatcccagctatttgggaggctgaggcaggaaaatcacttgaacctgagaggcggaggttgcagtgagctgagattgtgccactccactccagcctgggcgacagagtgagactccgtcttacttaaaaaaaaaaaaaagaaggttccaagaaaattcatcttaaggtttatgtaaaaggaagatgatatttaacatgattcatggccaagtactaatattacattataataatgtttccaaataacattatagatatgtttaaagacagtgtattaggctgttcttgcattgctgtaaagaaatacccaagactgggtaatttataaagaaaagaggtttcattggctcgtgtttctgcaggctgtacaggaagcttagtgctgacatcacttggctgccgggggaacctcagggagcttttactcatggcagaaggcaatgcgggagcttgcatgtcacatggcaaaagcaggagcgagagagagttgggggggaaggtgccacacactttttaatgaccggctctcacaataactcatgaaaactcactatcaggaagacagcactaaagcacaagggatccgaccccatgatccaaacacctcccaccaggccccatctccagcactggggattacaattcaacatgagatctgagtgtggacaaatatccaaactgtatcagtcaacagcgatcataattagtcctgaataggagtgcctttttttttctttcttctcccttttcttttctacttcctcctccttttccctctcctcttcaatctcctcttcattcctgtagcaccaagggttgaagcacctaacccgttttggattgagatgttctgattgggcaatgaacactgtccagaataaacagaaatccattttgcactaagtggctgcacagaccctgcctcatgctaaatctagcacccagatagtttaatgtttcaatgactgaattacaaatatatcatcaccttggatttggcacttacaaatggctgttaatttggccagaggtggttgtttacaacttcaaataggagactattcataatttctgacgtgacattttcctttctttattttactgtatgaaaatataatgaaatttctcacaaaatatcactaaaaagaaaagaagaagagtaggaagcaaggttaaaatatttctaaaatataattttggtctttctttttctcccttccttcctccgtccctctctcctttcctctctccctccctccctccctcccttcctcctttccttgcttccttccctccttctcttccttctttttcaagagatcaataacatttattaagaataagtttcttaattataacctttcaggtgataatagtaacacagcctgggcaacacaataagaccttgtttctacaaaaaatttaaaaattggccagacatagtggtgcatgactaattccagctactctggaggctgaggcaggaggatggcttgagcccaggagttggaggctgcagttagccatgcttgtgccactacactccagcccgggcaacagggcaagactctgtatctaaaaacaacaacaacaacaataatagaaacaggtttcctttcccaagtttggaaaatctggtagtcttcttaagcagccatgagcataaagagaggattgttcataccacaggtgttccaggcataacgaaactgtctttgtgtttagttacaaggagaacatcatgcgcctctccagccttcacaaggaccgcccggtggagccgctggacctggccgtgttctgggtggagtttgtgatgaggcacaagggcgcgccacacctgcgccccgcagcccacgacctcacctggtaccagtaccattccttggacgtgattggtttcctcttggccgtcgtgctgacagtggccttcatcacctttaaatgttgtgcttatggctaccggaaatgcttggggaaaaaagggcgagttaagaaagcccacaaatccaagacccattgagaagtgggtgggaaataaggtaaaattttgaaccattccctagtcatttccaaacttgaaaacagaatcagtgttaaattcattttattcttattaaggaaatactttgcataaattaatcagccccagagtgctttaaaaaattctcttaaataaaaataatagactcgctagtcagtaaagatatttgaatatgtatcgtgccccctctggtgtctttgatcaggatgacatgtgccatttttcagaggacgtgcagacaggctggcattctagattacttttcttactctgaaacatggcctgtttgggagtgcgggattcaaaggtggtcccacggctgcccctactgcaaatggcagttttaatcttatcttttggcttctgcagatggttgcaattgatccttaaccaataatggtcagtcctcatctctgtcgtgcttcataggtgccaccttgtgtgtttaaagaagggaagctttgtacctttagagtgtaggtgaaatgaatgaatggcttggagtgcactgagaacagcatatgatttcttgctttggggaaaaagaatgatgctatgaaattggtgggtggtgtatttgagaagataatcattgcttatgtcaaatggagctgaatttgataaaaacccaaaatacagctatgaagtgctgggcaagtttactttttttctgatgtttcctacaactaaaaataaattaataaatttatataaattctatttaagtgttttcactggtgtcgcatttatttcttgttaagttgcattttctaattacaaaagtaatgcatgattatgacagaaagtttggaaaatatagaggttcacacacacacgccttcattgcgtgtgcatgcataaatgcatgagaaaagaaaaataaccagtaatcacatcgcccagaaataaccccagttacaattgtggcaaatacacatacttataaatattgcagatatattaagtatacctagtatttgctaacactctttcttctactctgtcatgaagattctcccaaggtgtttttgtataatatttaattcattttcagtggccaagcagtattctacttcatggatataccaggatttatttaaccataacttctggttggattcactcttattattttgtttaattaaaaaaaaaagacctcggctgggcacagtggctcatgcctgtaatcccagcactttgggaggccgaggtgggtgga

SEQ ID NO: 29045 - DNA, 755217 bp, Homo Sapiens
gaattccttaggattttctatacacaggattatgtcatttgcaaacaaagatggtttaacttcttcctttctattgtgaatgtcttacattttttgtagcctaattgtcctggctacatcctccaatactctgttgaatagaagtggcaagagtggacctcagtgtcttatttctaatcctggagaaattactgaggcttccatgacattgtatgtttctatgtgaatttttaattgatgctctttataggcaaagttcccttctatgcttcatttgctcaatgttttcataaatgctccaatcataaatggggttttaattagtcaaatgcttattcttcatcttaagtgatcatgtgtttttactctttatactatttagatagtatattttactaattgtttttgtatgtttatccaaacttgcaatgctggaataaatacccttggtcatagtgtatatcctttgtctacggtgcttttgtgttttgatagtttttccttgaggattctcgtatttataaggcatgttggtctctaattttcctttcttacaatgtctttttccagttgtagtatcaggttaactgacttcataaaatgcattgggaagtgctctctttttcctttttggttttcgttcctttgtttgttttcttcttctcttgggagaggagttagtgaaggattgttataaattctttaaagttttggtataatttactagtgaagtaatctcaccctgggcatgtaattgaatcctaacaacaatctgtgagcttggaagatgattcctccccagctgaaccttcagctgagacttcagcctagacatcatctacaccaggattcatgccctaaagaaacagtgagtaatatgtgtgtgtgtggttttgaggcactttgctgtataaatgagttatacagcaataaataagtaataaacctgacagttaatgtactgtggcatctggaatgaatcattgacagaaaaagtgacattaatgtaaaatcgggtaaagtataaagacagtctgtatttcagttaatggtttttaccacattcaattttatttgttttcacaaatatgttatggctatttaagatgttaagattgcaagaagctgaatggtatacaaaactctttatattctccttatacctttcagtaatctaaaattaattgttatttttaattgtcagataataagtgtatgtactcttactcatggggttaattgtggtgttttgttatatgtatacattgtggaatggtcaaattaggctaatcatcatatccattacctcaaatatttattatttctttgtggtgagaacatttaaaatcatctcttttagctgttttgggaaatatacaacacattcttattatctatattcaccatgctgtgaaataaatcaccagacattattcctcctgtctaatagaaacttcaaaccctttgaccaatgtctctccttccccaaccaccccttcataacaacctgtggtaaccaccatatgattctccacttctatgagtttgacttctaagattccacatataattgagatcatatggtaatcgtccctctgtgtctagcctattttacctagcataatgtactgtaggttcatccaagttgttgcaaatgacagaatttcctatatttttaaggctgaatggtatcacattgtgtatatgtaccacatttttgttaatccatttatccattaatgagctcttaaattgtttccaaatcttggctaatgtaaataatgctgaaatgaacatgagagtaaagacatctcttcaacatagtgattccaatttttttggcatataccctggagagagattgctatatcatatagtaattctatttttaatttcttgtgacacttccatagtattttctaaaatatctgtactaattgacattcccacctacaatgtacaaagtttgtcttttttcatttcctcaccaacatttgttatatttcatcatcctgacaatagccaaagtagcaggtgtgagccaatatctcattatgattttaatttacacttctctgatgattacaaatgttgaagaattttttcatatgtctgttggacagttgtatgtcttattttgaagtcctttgcccattttttatgttgttacttatactcttgtaattaagtagtgctgagaccagctcggtcgtggagaccataatcctgtggcactagaggaattaaagacacacacacagaaatgtagggtgtggagtgggaaatcaggggtctcacagccttcagagctgagagccccgaacagagacttacccacatatttattgacagcaagccagtgataagcattgtttctatagattatagatttactaaaagtattcccccatgggaaacaaagggatgggccaaaaggaagggatgggtctggctagttatctgcagcaggaacatgtccttaaggcacagatcactcatgccattgtttgtgatttaggaatgcctttaagcggttttccgccctgggtggaccaggtgttccttgccctcatcccggtaaacccacaaccttcagcgtgggcatcatggccatcacaaacatgtcacagtgctgcagagattttgtttatggccagttttggggccagtttatggccagatttgggggtctgttcccaacaaagtagtttgagtcttgtatattttttaagcatttcacaattaaaatcttattttaaaagtgttgttttggtaccaaaaaaaaactacacagacataaacaaataacctccatcaggtaatgatgattcattggatgatggtcatatacatagggagagaataggaaagcatcttccttatctattcacaattctaaattcaggtgcatctgcttcagaaagacaccatcaagctccaggaacttttctcctctttcttttttcccactggcttcccattacatagtcaccactttcctgagtgtcagtaatcacttcttcaaagaaagcttcctgtgtctcacatatcacagaaaaccccattttaagaagttgtcagatagtttatctacaagatcccactaaagcctttttggaaggcagggattcaggacattagaaggaaagattgagagataccaatgacaaggaacataagtcatatttctgcatttaggagagtgtttccatgtgcaaggaatccttctttaaattttcacatgacaactataccttcaagactttgagagaaccctgtgataatgaagttattttattctatagactccaccatgaatttattgggagcatgtgttctgctgagatttcgttgtggaattattgttgtaaccaagcaagttagagagaaatgccacactttgagatgaattcaggagtcctttattagctggcgaccgagagacagctaatgcttgaaattctctcggccccgaagaaggggcttgattttcttttatactttggtttagaaaggagagcggggagcttaactgtagcaatcttacagaagtaaaacgggcaaaaaagttaaaaagacaaatggttacagaaaagcaaacagttccaggtgcaggggctttaaatccatcacaaggtgatagacactgggctactaaccagacacgaacacaggggcttagggtgctatcatctggacaaattcctgggaactgcggacctagcttgccatagcatcttatcagttatttgcattttttgatgtcctgggagtcagctggcagaagttaagtccttgaggaagggggtgggtaaggagcccttgttgtcttgcaaatgaaggagccaaaaggagtccctccgctttctcaactaagagggagtgattcaggttaatacaagttagagtatcacattatagtgccaaatgacaattccaacagccacagaatagatatcatcatggtcgtgggtgggctgtgaaaaaaataataactttatatacctgatagattaagccaatttctgctgacactgaccaaaaaaagtcagaatggcagtccattaagtatacacagtagatgtgcacaaggagtgacccactgaaaaatggcaagcacgttgatgagctctaacgcctcatggtgagagactaaaaattgtgctaacatgatattacaggcacagaggacacagtgctaagcagcaaaaccccaaatattactatgaaagcatcacctcctaaacaacttgtaagctggtttcactgagattagactgcccagcagatttctcagaaagatgtcaatgtaaacatttaaacttcccaaataagagcacattatgaggcaagaacccaacaccctgtttccacacaagagtctgaatagaagttagagtgcaatgaatacatagcttatatgtatgacatccaaacatgctattaacttaaatgaacctctacaacctgaaagtctagttgcaaacacactcaacatccaaaattataaattacgcttcttcttcacttaatatattcatgaagaaacacaaaaacccattccgtttttttaagtagctaacaggagagttgaccagagtaacaattaatccaaagaacaagttttatgaaagccgcaaaacatctacttctgcagtgactgatcaagagtgatttctatgatcactatccatgagattagaaagaggagtggaggaaaaaaaatgaatactcaattgttctggattaaagaattggatgtggaatgcagcctacagagactattgttcatatttctaagataagggcagaaattctcaagtacagttttttctaagtctgtagaaagcagccagtctagtgcaaacattcagctacctctatgccatacctgtcttccttctcaatagtttttctgaattgtatcttataaaattatttctccacatattttgtacttttgttatttctagtttgatcttaaggtattcctctggacagtgtctataaactccagccctgcccaaaggagacttaatacaatttggtcatggatatctactatgtacttttcacaggatatgtactatgtacttttcataggtggccaaatgcataagtatctgacctgtgaccaggtgtccctatcacaggaaacttgattatattggaagattccctcgtggttcttgtgtgatctgtgtatggtttacccacgccaaagccgccacgctgtcagggagctttggctgggaaaacacttaggttcaagtgtgttcgtcaggtaagacatagaggaggcaactcagcaaaacacatgaaatagcatgagcagtgcattctttacacatcccagagagaagaggtcagcatgccttacgtgaccaatgagaagggggagccttcctggacacaggctcacaacaagccagtagggagcaaagagagagagtcagagggaagcccagtcgctgaagcctttattgggatccactgcattacacatgcaggtttctcatggggagttctaatttctgggtttgcaggaaacaagcatgagttccacagagtcacactatgactgacagggggctactgctgcatatctgctcagttcacatggagtaggtgtactctgtgggacaagtcaatgtaactgtatcaacaactttcaggaactgggaggaattgaggaacttgaaactgtgtcaaggatgactgagtcctgcttctggtatatgccagttaagtgttatacaaaatagatgctgaggcaaagtaaaattatcagaatttgcaacatataaaataggaattccagtaatccactattaactccctaagaaccatgcagaaggtaaaaggacttggttaatttatatgaaaatatatttgagcatgtttcctcaataaaagaacaaactacagcagatcaacaaccataatattccactgagaaatgagcagtcacagagaaaaatagtgtatccactaatgctaaaatgcacattttcacacctttcaaatagagatccgtctaaaagttcatcgtatcaaaacactgctggccacgacacaaactttatgtggttgtctttgtatgtgtcacctgaatctggtctaaaaagcttccttgacagcttccaataatatcatcaacatcaaaacttgcagagtagcagtggattagaaagataatctcacaaaaagtatcataggaatctcacaaggaatgcagcatcaccagatgcttctgattagcacagacaataaggggggaaaagtcaggcaagataagattaaaagtgactcagaagagtttgatccaaatggaagaaatttaataatacttttcttaatgtattttgcataatttttcatctccctgaataagaatgatataatacaaatatccacatttgtataagttgaaaagagatatcatcagtaattatgaggtaaatattctaagtcataagaagtatttgtgtcacagtttgtcaatggttttattctttcattgtgacaaaaaataatggtgcatttcacaattgatgcaattgatgcaaatgatacacctttcacttacatagaaaacactgtcagtattagcagtactgactttgtggttggcgtattgaccagccgttagtctacaagtgttatgtatcattagttcattcaattctcacaacatcttaagagttaggcctattacccctcccatgatactgaatctgacctaaagccctacaggaaaagaagtaccttgaggttgactgtgtttgtctctagagttcagacattcattcagcttgctgatgaaggacaccttttacaacttcaagctttcctggtaatatttagtcttgtttttgttttgggtttgtttgtttgttttggcataaaaatacctttaacatttgtttgcagttttctttttttaatctcacataaacatcatctaaaagcaagttaacatttttgcattctctattcatgcctttctttcctttatttaaaaatgtattcataactttttaaatatacttttaattattttcatcttttcaagtatcattttaccaattgaatggaaatatcacttttattaggaaagataaatgttacacattatttattttagtgttccacagaaatttgctctgaaatacctgtggttgaaaaggagagggatagagacttttctgaaaatcacaagtcaaaatttgctcagaatcacatgctttaaaagagctgcgattgttttcattatatggcttagtttgttctaattatgaaaggtacacaaggaattaatttgtgtatacagaacactgagattattattctgaatgcagtgaaagccactttgctgctctggaagttagaatgtcctcatattgtttgctttttgtcttacacaaacgctatagacattggctaagtcttttctttgatgccttccaacttgtttttgtgaatacatgtctttgtacagataagccataatatagatatgtatccttttcctactctttgatgagagattaccaaaaattgcttctggtttgccttgaaataaaaataccactcaggtggtgctgtcatccatctccagcctgcatatagttcgatactatcgtcttgtaggaagagaactacaaactttattgattttctattatcaactagcaaaatatttttaaaaggttttcatgcttaaagttttttacattttattttccttgattcaatcaatattttacccacttttctatttcacttctatgttgttgtttattgtttcaagctgaacctttgatactcctctgagtgaatcgatggctgagtgtcctgggtagtgaatatgggattcctcaacccggattcaacagggatttccatctgaagaaacaattcagggctccagaaagcagtctgggatttctttagcacctgaaatgtggactgtgcaaataccaacaggattgtattgagaggaacacattctctagtgaaggatgccttcctgcagggtgagtctgcaagactcaatagcaaatggctgctatacaagtaacaaaagactcaatataatgattttaaaatgattatggttggcaattgttcaagatttatgagatgtgagaaatgaagagaccaagagtattgatacattatggatatttttattctgaattaatagatagacatttatttgccaggcaatgttgcagggactctagtttcagtcttctacacagagaatttaaagggcagactttagttttatctacagtacccttcatctttactctatttgataacctggcactcctaaccttaatttccttgtaaattaagagtaacccagtgctccatgcaaattgtatagactgtgatatttatgcagtgaaggacaggcacaagattattcttaaattggaaagaaactggaagtgttctagggaaacaaagagaggagataagacataacagtttttccttgtttgcatgagaaattttttctgttcttataaatagaaaactcggccaagcgcaatggctcacctgtctaatcctagcagtttgggagaccaaggcaggtggatcactcgaggccagaagtccaagaccagcttgggcaatatagtgagaccttatccctacagaaaaaaattaaaaattagctaggcatcgtggcacaaacctatagtcctggctactcaggagggtgaggaaggaggatgacttgagcccatgatttcaaggctacagtgagctatgatcgcaccacagcactccagcctgagtgacagagtgacccctattccccacaaaaaagaaaactccctttaaattatagatgctctctgaacttactttgggatgacattcgcgtaaacccatcaaaagttgaaaatatcataagttgaaaatgcatttaaatcacctcactaacctaacatcatagctcagcctagcctaccttaacgtattcagaacacttacattagcctatagtgggtcaaaattgtctaatatgaaacctattatataagaaagcgttaaatagttcatgtaatttagtgaataaatctgtgaaaaacagagtggtcacgtgggtaattgaaatatggtttctatacaaggtgtattggttttctgccgtcctacagtcaaaatatcttcaatcgaaccattgcaagccagagagcattcattttaaaaaatgtaatctttgtcagccacaaatgacaacatatggtacgaaatgtagatttgggtccagatgtggtggttcaacctatttatacacatttccttcaattctaatgtttcacttttcatatgggcttgttgcaagatggttgtgtcatgtgactgcctctttctgcagacattaataagatgaacaggtggaagaccaggtgtattcaaatgtattttcaagggtctttgtttttttcttgtggactgctactgcagtgaaattaggcaaacttgtttttccagaccctagtttaatcgtatcaacacaaaaagtctccaaacatccttgccacatcacagcaggaaattatcttgaagaagtaccttgaggcgatagtaggtctcatgtcactatttcatatcccacaggtatcactgtccttcgttgcttcatgcacagtgtctcacaaaccattgttcacataatttgtccactttttttgcatttgttaaggcgtattaaaccctatgaattttactacaatattttgattccaggccgggtgcagtggctcacacctataatcccagcactttgggaggccgaggcaggcagatcacgaggtcaggatatcgagaccatcctggccaacatggtgaaaccctgtctctactaaaaatacaaaaattagctgggcatggtggcacgtgcttgtaatcacagctactaaggaggctgaggcaggagaattgcttgagcccaggaggcggagattgcagtgagccaagattgtgccactgcactccagcctggcgacaaagtgagactctgtctcaaaaaaaaaaaaaaattgattcctgccttctgcaattactcagtgattactgtatccctgactatttgcctcaagttgccaagatgaaaaaataatgaaagtgaaatgcttagatgaagataattgaactggcatttgtgacactaaagggaggggaggtcagattggtcttgcacagtatcagcaagagtctcgatgggtgtcagccactgtgtgtcaatgaatgaaatatttaagatgcacctaaaagaaaggataatgtccctgttgattaaactacagtcatgtttcacttaatgaagaggatacattatacattcttataaatgtttgttgggcagttttatcattctgggaccatcatacagtgtacttacgcaaactgtaataggttgtgccatctactacacacttaggctatatggtatagcctattgctcacagactacaaacgtatgtagcatgttgctatacttaatactgtatgcagcgctaacaaagtaagtatttgtatatctaaacatacatagatgttagaaaagtcacagcaaaaaatatagtacaaaatcttttttatggccaggcgcagtggctcatgcctgtaattccagcactttgggaggccaaggcggggggatcacctgaggttgggagtttgagaccagcctgaccaacatggagaaaccccgtcttccctaaaaatacaatcttagccgggcatggtggcgcatgcctgtaatcccagctactcgggaggatgaggcaggagaatcacttgaacctgggaggtggaggttgcagtgagcagagatcgcgccattgcactccagcctgggcaacaagagcaaaactccatctcaaaaaaaagaaaaagtatatattttttaaattgtacacctgtatagggcacttatcatgaacgaagtttgcaagactggatgttcctctgggtcagtcagtgagtaggaaagtgagggcctatggcatactttacactactgtaaactatataaacactgtacacttgggctgcattaaatttactttaaaaataaagtaattggccagttgcagtggctcacacttgtaattccagcattttgggaggcccaggtagccagatcacttgaggccaggaattcgagaccagcctggccaacatggcgaaaacccatctctaccaaaaatccaaaaaaaaaaaaaaaaaaaaaaaattagccgggcatcatagcacacaactgtaatctcagctactcttgaggctgaggcatgagagtcacttgaactcaggaggtggaggttgcaatgagccaagattgcaccagtgccctccagcctgggtaatacagtgagactctgtctcaaaaaaaaaaaaaaaaaaaagtaattttactacgacaaatgcctacaacatcattaggaagtactttttttaagctccataataatcttgtggaaccaccattgtataagcagactgtcattgaaaattgcattatactttgcagcagaaaagtgtattatacacataagggcctattttacactaatggaaaacgccctctagaactatagaaacttgaattttatttacataaaaatgaaagcaatattgaaattaatttataaatgggtttgcaaatatcttaaaattctgattatgatggttccaaatcagattttaatccagggctatgaatattttaacatcaccctctgtggcctaaagagtaaaggcaggctgggcacggtggctcacgcctgtaatcccagcactttgggaggccaaggtgggcagatcacgaggtcaggagtgcgagaccagcctggccaatatggtgaaaccccatctctactaaaaatacaaaattagccaggcatgatggtgcatgcctgtaatctcagctactcgggaggctgaggcaggagaattgcttgaacccgggaggcggaggttgcagtgagccaagttacgccactgcactccagcctgggcgacagagcaagactctgtctcaacacacccacacacaaaagtaaaggcaatgaaacattttttaataaaagaggctgcgtcattgtgtgatttccacttttcctgctgacacccattatgcaaattctgatgcacatgatcttacaagaagatgacaatgtaaaagttcaggacaaattcatctatatacaatgaaaatgaacaatgaaaatgaaaaccaagtaatgactgccaccaggataacaactactgtgataaaatttgaaagaaaaaaatagcaaaaatggtgaaatacagcagctagcaaaaatttggaaatgtttatcaaggaagtcatattaatagaggtgaatcttggagaacaagacaattttcctcggtttctacgaaggcaacactgtccagaaggacaaaagaggggcagatgaggaggatggagcaagcaaccaggcccatgagaggggctctgcagtggattgaggatggagaggctggagaagaggctgagggtaagtcagggctcacatcctgacctgaataaagaaaggggcacaagaaccaggttcatcttcaagttcaagtcatttcagattgaaagagagttgtactttatcgttaattaggtaagaatgtagttaagcatttgactgatccattaattcatttgtgagattcaatataaaggagaatgttctgtgttgctttttgtttatcacatgtgaggggctcacagaggaacaacacagataaaagtttccattttctctgatatttcagtcaagtagtgattcagaaaatgtaacagaaactaaactgtagatgatagatcagctcctcagaactcaggggacaggcatcagacctgggatgggatggagaagggaggcctccaggaggaggagcattggaagagattctggagagtgaggagcagtgagtacaatagacaggggaaggaaagcgaagaggaaacagtgtgtccgtggcacaggccaggccataagaagagagcagtggattggaaggaccgctgggatgagtaatatgtgaggaggcagaagggcagaccacggagggactgggcaggggagggagggccgcttcctgaggactgcattctgtggggagggatttgaatgactcagttttcttctttgaaatattcccatgctgggtgcggtggctcacgcctgtaatcccagcactttgggaggctgagacgggcggatcacaaggtcaggagatcgagaccatcctggctaacacagtgaaatcccatctctactaaaaatacaaaaaattagccgggcgtcgtggctggcgcctgtggtcccagctgcttgggaggctgaggcaggagaatggcgtgaacccgggagggcggagcttgcagtgagccgagatcacgccactctactccagcccaggcgacagatcgtgactccccatctcaaaaaacaaaaacaaacaaaaaaatattcccccaagtccatgaggtcatccaatcagaaaagacagtaagacagtcagaacatgtgaggatggtccctgtccactgtggagaggggaccggaggagttggtgctgaggaggagtgagagtggaaaggacagagaggttcctgtctgctcagtcattttgcaggtgtcggtgggatccaaggatctgaaaattcacagtggctggctcatggccgcctggtatcaatacactacagggtgagagcaacgtcacaggcagctggaaataagggggtccacacctggccccagaagaaacccaatgcaaggcacacaggcactgcaggaggggaaatgcagagagggtgggggtgggtggggtgcgcaggcctttatgggactttctccaaggacatgcacatgttcacccatcaatcggtgcctgcatgtcccctcacatgttcttcgatattttcctacaaaatctcatgattatttcatgtttcttggagtgtcacatgtattttgactctcttctcacacccttttctttgtatacatagcaatacttcaatttatttttggtgggttattcataattaacgtatttcccaactttggaaccaaattaatttgccccgctttgcatgcttaggttgatcatagattcgtgtctcctaatttcagagtggatcacctctgcatgaccctaagcaagcgttcagtttggggtattgcattttcttaggtaacattcgacacgtttatgctccataaactattaagctgtcactagtcatttaaaaattccagtaggctttatctttatttcgttttctctatattggcatattatatttttcttccgtttactttggatttaacttgatacacttttctttaaaggtttctaaggtgaaaattttgatgacatatatatatatatatatatatttttttttttttttttttttttttttttttgaggcggagtctcgctctgtcgcccaagctggagtgcagtggcgggatctcggctcactgcaagctccgcctcccgggttcacgccattctcctgcctcagcctcccaagtagctgggattacaggcgcccggctaatttttgtatttttagtagagatggggtttcaccatgctggccaggctggtctcacactcctgacctcgtgatccaccagccttggcctcccaaagtgctgggattacaggtgtgagccaccgtgcctggacagatttcttcttttctaatatatatatttgaggctataatatccctccaagctccctgattgcaccccatgaattttgataagttgtgttttcctttaaatttagttcgaaatatatttttaaatttctcttgagattccttctttgacccatgtgatagttagaactctgctattgaatatccatgtattttaccagttatcatccctttattaatttcaattttaattctattttgacctgagtttatatattatatgatttctattcttttacatttgttaaggtgtgttttatggaggagaatgtggtctctcttttgatgagcggttcatgtaggcttgagaagattgtgtgttctgccattgatatggtttggctgtgtccccacccaaatctcaactggaattgcatctcccagaatccccatgtgttgtggaagggacccagggagaggtaattgaatcatgggggccggtctttcctgtgctattcttgtgataatgaataagtctcacgagatctgatggttttatcatgggtttccacttttgcttcttcctcattttctcttactgccaccatgtaagatgtgccttttgcctcccaccatgattctgaggcctcctcagccatgtgaagccgtaagtccaattaaacccctttttcttccctgtctcgagtatgtcttcatcagcagcatgaaaatgaactaatacacccatcgttgggtaaagtagtctgtagatgtcaactgtacccccaatccgttgatggtgctgctgaattcagccaaatcctactaattctgcctgctggattgatttctgatagaggagtgctgaagtctccaaaaataatggtggattcttctatttcttctcgtagttttaacagtttcttccttacatagattgaagcccttttgtgacttacatacttgttagggattgttataccttcttgaataattgacctctttatcgttatgtaatgctcttctttattcctgataattttcctggcctaatagtccaccctttcagaaattaatatagctattcgtgctttcttttcattcatgctttctccgcccccctgggttcaagcaattctcctgcctcagcctcccaagtagctgggactacaggcgtgtaccaccatgcccagcaaatttttgtatttttagtaaagataggatttcaccatgttggccaggctggtctcaaactactgttagcatgacatattttgtgtcattcatatacttttaatttaggtgtgtcttcacattttttaattgacaggtataattgtatgtatttactgtatacaacattatgtctgaagtattatatacatcgtgggataattctagctagttactttgtgcattacctcacctattatctcagagatgtgatgtgatagctcactatggctttaatttgaattttcttttatttgtctttatatttaaatgggtttcctatataaaacatatggctgggtcttttttaattcactttgacaatctgtgtattttattttatttcattttattttatttttgagacagtctcactctatcacacagggtggactggaatgacaggatctcggttcactgaagtctctgcttcctgggttcaagcaagtctcacatcttagcctcccaagtcactgggattacaagtgtgcgccaccacttctggctaattttcgtatttttaggagagacagggtttcaccatgctggccaggctggtctcaaactcccgacctcaggtgacagtgcttcggcctcccacaatgctgggatcatagacatgagcaaccgctcctggctgacaatctgtgtattttaattgttttatttttaccattggtattcaaagtgattactgatatagttggattgatatctactatatttgttactgttttccatttgttgcccttgttctttggtcctatttttgtcttccacccattttctgccttttgtggtttaaattgagaattgtatatgactccattttctcttctttaactttttttttttttttttttttacttttttagtggttgccctagggaagaaaaacttttatcttcctagtaaaatctaacataacagtttgatgaaagaaatgacagcaacaatgtatttgatgatgtattactaggtatatgtcgtgtgtgtctgtgtgtgtgtgtgtacatatgaatgcttatatacaagtgaaatgtcatgacactggtgggtgtttgatttagtatgtcttattaggtctggggtagggcatgggtcaaacccaacaccacgctggacccagccagtctcagcgaacttagcccattaaagtcttatcagcctgggcttgtccttgtccttgtagctcattttaaagatcctttcttgaagttatgtgaaattactgcttgatattttcttctttttcatatgaccactcagccttcctattttatgcctgtttatttaactagggggtggaataatcattaggtattctggaaagggaggggatttcagggacccccggttactgtaccctttattgcttacttgggtttgctgggaagggtcatggacatgtcaccctgacaaggattttggccattttctctctcttattttggggttttcctctggtttattcacctggttcatgttttagctgttattttggtttttcatcctcttgccacaacccagtgctattcctatatcaatgaggcatcaacaatattgataatattttgttcattaagttgggcaaagacttaagaaaaaaataaacttttttagaatagtttatattcacacaacacttgctaaggtagtacagtttcccttattaaactcttaactatttttattattagtgtgggacaatagtagtaactaatgaacgaatattatacattatccttatctaacatacatattttatttatttatttatttatttatttatttattgagacggagtctcaccctgtcacccagcctggagagcagtggtacagtcttggttcactgcaacctctgcccccctgggttcaagcgattctcctgcctcagcctcccaagtagctgggactacaggcgtgtaccaccattccctgctaatttttgtatttttagtagaaatgtggtttcaccatgttggtcaggctggtctcgaactactgacctcaggtgatccacctgccttggcctcccaaaatgttgggattacaggcatgagccaccgcacccggcccacatgcacattttatttagatgccttagctttcacttaatgtccatgttccatttcagaatcccatccagaaccccacatcacattgagatgtcatgtgtctccttgggctcctatgcctatgacagtttcccctactttccttgttgttgaggacactgacatccctaattagggatttctctgatgttttcctcatgattttactggatttctgggtttaagggaggaagaacacggaaggtaagtgttattctcatcatatcatgtcgagggtgcacactatcaacatgctttatcaccgttgatagtaattttgttccccttggcaagcagttgtagtcagattttcccactgtaaaattatttttcccctttatttttacatttttgaaaataagttactatacgtagtacatattaacaactagtattcatgttccacttccttatgaatggagtatcttaaacagttgggaattcttcaccatgtacaatttgttgattcttcactatttatcacatattaattcaataatgtatccataccatagggattatatgaaattatgaatatttattttatgctttacttacactcatgtgtattattgctcccatggatccattcttaaccattggaaggtctttcagttgactactgtatcatttaaaattgccaacatcattttggttttagtttgtttggttgattgtgctgcagtttcacgttttcctactttcaggctgtggaaggtactccaggtaaaattttgatcactccctgacaaagcctagtatccaccatttcttcaaagcatcctagtttatttcattggaaagtggaattagaaatgatctgcccaccaagcgtactcattgctactggagtgtctgtagattcaaagccttgtcagctgacacaaaaaagaaatgtacatgtgtatacaaacctgcctatataaacacctgtgtaaatatttctacattttcccatatatatctacataaacatgaattcctactgataatctccatcaccacatgatttcatcctgcaacacatgaatgtctctacccattcccactacttatgtgtaatctcctactctagagaaagttggcttcctttatgtaataatcgagtcccataatacatgcacgatggcttcagcattgttaatccatactcccataggaaacaacattaccaattaaaatacactgctcatagacaactcctttggccattagactcagaatctccacttatttcctaagttgcttagatcagctcctttttcccccattccgtcaatgggattattttcatacatttgtaatgcatttttcttatcttgcctgcatttcttcatgggattcccccaacctaaaaataaggttttttttttttaattttcatatatttaggttcactctttgacttataaaattctgtagggtttcaaaaacagtatgatgcgtgcagcgttacaggatcatgcagaatgtcttcactgctctaaaaatattccatgtacttcacctattgagccttcttcccgcttagaaagttcctagtaagcactaatccgtttactatctccattgttttatcctttccagagtatcatattaacggagttacatgctctgcaatcttttcaaagtggcttccttcactttaaaatatgctttaattttgtaaagcgctttttttttttttttttttttgtgagacagagtctcactctgttgcccagactggagtgcaatggtgtgatctcacctcactacaaccaccacctcctggattcaagcgattctcccacctcagtctcccgagtagctggaattacaggcacccaccatcatgccccagtaatttttgaattttgtagagacaggggttcaccatgtgggccaggctggtcttgaactcctgaccttaggtgatccgcccacctcggcctcccaaagtgctggaagtacaggcgtgagccatcatgcctggccataaagtgtatcttatggtgactttttccctaagaactaatggcattaatcaacttttcaggtgttcattgggcatgtgtattgcttatttagagaaatgtttatccaaacagtatacccatttttaatttggatatttgacctttgtttggaattgtgagaatcacttctatattctgtacagtggacactgagctatataacttgcaaatattttttcccattctttcagttgtctttcaactttttgatagtgtttgttgaatcacaacttttaactgtgatgaagacaaacatgttttttgtcactttttttgatggtaacatcaaaaatggtatcttagaaaccactgtttaaccttagccataaaaacatatttccgtgctatcttctacaggttttgtagttttagagcctgcgtttaggtgtgtgatatattttcagtaagtcacgtatatgtcatgagggaggagtccaatttaaatgtggacattagcttgtccctgcaaaatttgttgaaaaaaatatttttcaccaattaattgccttggcaacttgtaaaatcattgacgataaatgtcaggattaatttttcaacatttctattctatttcattgatctatatggcattccttatgccacaggattcttgccgtgtcacttcaccagccggaaacctgtggccagcagcaccttcttcctgagtattgcttgctcctgctggattcattcctcccacttggcccaacaggctgagctcagatagttctaccagcccaaatcccaaacctggcaagggtgagccaggcacagagtggtgagaagtgtgtgcgtgagcaagtacagagtccggccattgtgcacagccaaacatgctgactgctgcacagagacaggcagctcctggcaccagcacaggcgccagctctatgcaaggatgtggctggaccaaaggtactacatgcagcttctgctgtgagcacctgcatctggattaggggaaagtggtcgcacctgcaatgaatgaggtacacagacaatgggagggtgaccaaggtggagaggagtgtaattgagcagcagagctgttcctagaatatgacctgcagtaggcagcacttttcggcaggcaagtcatccccacatttcttatagtcttcctgagtccagagtctttatgcgcccagaaaggtgaaagtgcatgctgattggaaccgagaagtccatgggcaagctcagacaaataagcattaagttctcccacctggctgcgtactccacccacaactggcaacctgcactccaggtttcaggtcatccctggcttgaaagtgcggtttcagaaacgaccccgcttatccctggcttgaatgttaggtttccctagggaccgtttccactcccagcacccatctgcctcctcccctcaacacaccctcaacagcgcccctgtggttcctgccaagctcccttcaacacccccgccccaagcttccctccctgagctccttggtgcccaaagtttcaaagtgggccagagcagcacaaggggacggtgtgacagagccaccccaagcacacacatacatctggccaggttgtgatatgtccagagtcagttccttccagtaggttcgcagtctcgctgacttcaagaattaagtcagggacctttgcagtgagtgttacagctcttaaaggcagcacatacccaaagagtgagcagcagcaaaacttattgttaacagcaaaagaacaaagcttccagtacacaagtcccagcgagttgcagctgtgggctgggagggggtggtggccagcttttattcccttattagtccccgcccacatcctgctgattggtccattttacagagtgctgattggtccattttacagagcgctgattggtccattttacagaatgctgattggtccattttacaaacctccagctaactacggagtgctgattggtgcattttacaatcctctcgtaagacagaaaactccaagtccccacccgacccagaagtccagctggcttcacctctcagtgatagctcctgggcttggcttcaactttgttccgaaatcagagctggtgccaggagtggggagaagcaggcgcaggcacttctgagcttgttgagtcaggagagcttcacagacacttgagagtgcaggggtgcccttatttagagaaatgcttatccaaacaatatacccatttttaatttggttatttgactttttgtcaaaaagttcagagctgcagctgggtggctgcagctgcacctgggagcacagggttcccaccctgccaacttggtagggtgcggggtttctgccagctccgtggagcatgcagccccagcggcacctccccaccggcagctggcttccccacagtggcagccaatgccatcacctatactagtaccaaaatcccttgattactaccagtttgtcactttgcattaggtattgaaatctgataatccaacttttttttttttcaagattattttggctgttctggatctcatggatttttatttaaattttagaaacagcttgccagttactacagaaacacacacacacacagagagagagatttccctatcacaaccacagcactctgctgagcagcagcagaggttccaggagccgtgcctacagcacttacaaagccgtggagctgcaaactgctctctcgtagacatccacacagccaagactcttcttttatggtctgtaatcatggagtatattttctctacctggttcaaagcttccatgagagaacggctcctgggatcttgagatctggggtgacagatacagctgacctggaccgtgtttctcacttctgtcatcagagtagcatattcttgggtactttttagtttgacttttgtaagccaagaaagcttctcacttctccaagctcacatttcactccttcaggaaaaacaaattcatttaaattcctcatcttccagaaaaataataataaagggaagagtaattgtaataaacaagccatagatgaggacaaggagggacccatctcaaatgacaagacagtcgatgagctccaagtgctcactgtaggagaggactgttgatacatagatgactgtgctaacatgatgtcacaggcacagaggacacagtgctgagcaccgagtccctaaacgttgctctgtaatagcatagaagatattattttctacaatttactaaaccatcagatttcacaaacacttgaccttgccatcagaagtcttgaaagatgacattgccaatgttccaaagtcttgaaccacattaggcaagaatccaccaccctgtcttcacagtgcagcttaaacagaagataaattccagtggatggatggctcatacattgagctcagggcttcttgtccatttaattgtgccttcctggagacagaaaatctaggtgtaaattcattcaacatccttaatcataagttgtatgtgtttttccctcacccaatgtgtacaataggggacaccaaaacccatttcaatatcagtatccaaaagcagagttgaccagagtaacaaggaagcagagcaaaatattttatgaaaaccgtaacgaatcttattctgcagtgacttatcatgaagtgatttgtataatcaccatccacatggttagaaagatcagtggtagagaagaagagagatagatatacaaagattaaggattaaagaattgagggtggaatgtagcttacagggagcattgctcatatttctatggcagaaattctcaagacacacctttttccaagtctttagagtgctactgctgcagcgcaaacttcaagtaaattttgaatttatatctccttctcaattgatttcttttcttttcttttctttttgagtcagggtctcactctgtcacccaggctggaattcagtggcacaattacagttcactgcagccttgacttcccaagctcaggtgaccttacctcctcagcctcccaagtagttgggaccgcagatgcatgccactgcacccagccagttcctcgatgggtttcttaagccacagtttacaaaattacctcttcacacttaaaataggaattccagtagtccactagtaagtctaatatctataataggtaggtagaagaaaaatggagttggtcaacttacatgaaaatatgcttaagcttatttcatcaataaccaatcagaatatagctgaagagtcaccctgatttaacactgataaatggatggtcacagtgggaaaaggtgtattccattaatgttaaagtgcacacttccacatttttcaaagggttgtgttttaatatgggtattgtaagaaaatgactggccagacagcatgatacggttgccatcttgtgcacaggcatgaagttggtctagaaacctattattgtcaccctctgataatatcattatcatcaaaacttttagagtagctgtcagtaggttacaaatataatctcacagaggataatacagaactctctaaagatatgaggcaaagccaaagcttatgataagcacaggtgatgataatttgaggaaagtcatgaaaacggtgagttgagaagtgattcagaagagtttgatctcatgagagctattttaggattatctctgttaatgtatcctgttttaatttttcatctcatgtactcataggagtgatataagataaataacatgttgaattcacttcctgtgtatatattcccagaagtggaatagctggataatatggtagttctatttttagttttttgaaaccttcatttttttttccacaatggctgtactaatttgcattcccacccacagggattcccttttccacatttatttaagttcaataaaattgtaatcaataataatataaaaattctaagtgataataaatatttgtgtcacagtttttcagtggttttattttttgtggcaaaaaaataatggtgcattttaccaatgatgcatcttgtaattacttaggaaaagctgtcagtattagcaaattctaatttagttgttagtatagacctgcattagtctatgtgctctatgtattactagttcctttaaacctcacaacatcccaagaggtaggcaatattatcacttccatgctccagttctgaatcttagctaaagcacttcagtaaaaaataggagatgctggagcttgactgggtctgtctccagagtccttgctcacattagctatgttacgatatattttgtgataagaaccttctagatctagtttcagaaatcttatataccccatggtcatgaagctattctcctaaattaggtcctaaataccgtactaattttttttaaaaaaatatctaggtccggccaggcacgttggctcacgcctataatcccagcactttgggaggccaaggtaggcagatcataaggtcaggagttcgagaccagcctgaccaacatggtgaaacccatctctactaaaaataaaaaaattaggcatggtggcgtgcacctgtaattccagatactcaggaggctgaggcaggagaatcatttgatcctgggaggcagaggttgcagtgagctgagattgtaccactgcatgccagcttgggtgacagagcgaggctctgtcacaaaatatatatatatctaggtcagtgatccatctggaattgattaattttgaaatgtgagatcaaatgtctattttattttctcctacggatatttaattttttggaacatatattgaaaaatcaatattccctatttatctttctttacactatttttcttacatattcttttgtccttttttgagctttcttttttcatttgtttatttctgtatttttctgcgaatactaaagtaactcagttactgagagacttcattttacacaagaattttccctccagagtccattctcttcatcactgtgctgttctagaatgaagaaatgaaagagtaggatcctgcattccttgcaccccaaccaaaaataccaggtgtactttgttttgttttgttttgtttcaatagagtttaagacttcagaacatgactgttgacactaatgtctctaacgtctttgtgactctcagacaaccccaaccaacttcactaccactttatttttcagtaacaaatcagtgaattttatgtgattttgtgccttctcttccaccactctgggctttctctatccttagaaacattggcaggagcttggagagtcatccctgggtgcatcccgctcatgtggatgagcctcagtggacttggtcttactcctctggaccatgacccatcaaagtcctggctgtggcaggcaaagctgagctgagggctctctgtgaggcctgcatgggcaaaaccagctgctcccaacactccctaagtgatctgtttgggtattcattctgtttttaataaagaatgagtttgttcaacaatgactgagcttgctgaccaaggataattacccttcagaccttgtctgataatgtttgttcttgcttttgctttggcacacagttttcaacactttgtattaatttttatttgttttggtcacataacaatttctgcaaccaaattcatatttttgtcttgtgtattaatttcattattgtatttaataatgcacttatacccatttttcataaaaccttttcaattattttcatcttttcagtcataaaattttcctaaatagaataggaatatgacttttattgggaaaagcagatgctacacaccctttttccgtgttttccaggaatttccactgaagtacctctggttgaaaaggagaacagagacttttttcacagccacaggacaaaatttgttcagaattaaatgctgaaaaaggaggtatgattgttttcattatatggcttagtttgttataattgtggaagatgcacaaggcattagtttatacaggcagaatactgaatcttcaattctgaatgcaaagaatagccattttgtcactgagcaagcataaatatcatactgttactctttatccaaaagctatagacatggctgaagtctttgattccttctaacttgttgtaaatgtatgcatgtaatttccttgtacacatggaccataatataaatatctatagttttcttgcaattcagtgagttactactaaaactgtttacagttttcagtaaaataataaatgtaactcaagaaatctgtaaatacatctccaggaagcacaaattcttgtagaaagggaattgccatctttacttattttttttttttggtcatctcctagcaaaatatttttaaaggttttcatgcttatgagttttttagatttttgtttgcattggctcagtcaataattttcccatccttcgattatttaactggtctgatgtttattattttaggctaaacttttgacactcttctgatataatttgtatgtgaatagatttgctgagtgtcctggatagtgaagatgggattccttgacatgcattaagtaggaattttcccaccggtaaccaataagaaacacaaaagtaagaagaggacagaaacagttcaggactctaacaattaagaataggtttccttaatttaaagtttacaacatggagggcactaatgacagcaaattcctttcactagtgaaaggaaaacattcactagtgaaaggaccattcccacaaggtagatctcagactcagtagcatctatttgctatgcaagtaaaaaaattctgtagttgaattcaagatggctgactagacgcgccaggagaaacttctgcctctgagagataagcacgtcaggaatactggcacactctgagcagatcttcagagagaaggcattgagagtgaacagagggagaatacagatgctgggctgaagggaaaggaagctggaaatctcacacagggctgccatgccctgggactcttttctgactcccaataactcaactcttggggaaggggtgagttgaacaggaacggagcaaggcactttcaccatgggcctctggaatcctggcagctggagaccccacgacccccttggacactggagctagcagagaaagcgtcttagagaggtcggaggggcaggactccagcctgtgtggagcccagaggctttgatgagggaatgtctgcagtggagcatggccagggatgccagtccccgaagcctcaccatgcagctctaggaaactttagccttaaggagactgtcggacctggatggagcagggtggtcttgctcatgaggcagggccagtctgatctggactccctctttgtctgctggcctcccccaggtccccaggctggccatgcccacttgcagtgcagcctcagatgcccaactggggtgcttcctgggagcctgatccttcatcagcagaccatgcctgttagagagctccagcagagcggcccccaccaatgcatgccagcccaccagcactctccctctactgcagcctccctcatgccactttgacagggctcaattgcccatggccacagccctgctgctttgtgggcatgtgcacacagacctcacctcccctacctatccagtatgcgtgtgcaggtgcaacccactgtgcaaattttgccagtgtaagtggagccgaatccaccatcccttacgccacactgccattgcagacccaaatgggcacatggagaccagcaaccccatcccctctgtgccaacattgccaccattgtgaacacacatatgaatgccaaggcctggtgcctctctctgtgccaccactagcatgaacacatgtacagatgccaaaaactgccaccactgcaaacacacgctcagaggctggcagccctgtgcctgccagcagtgtgatatagtgccccacttctactggtgtgagtgtgagcaagaacactgaaacagcactctgatgatactgcaccccagccaacatgaatgcaccccagcacactgccactgctgctggcatgtgcaaatgaacacattccactgccaccatccctaaaagcgctttggctggcaccacctattgaaatattgtggctagtggtccaggaacacatcaacctctctggcacagctggtgtgaatgtaaattacttcagccagcatggaaagcagtttggtgatttctcaaagaacttaaaacagaattgccattcagctcagcaatcccattatttgttatctacccaaaggaatacaaatgtttctgccataaagacacatgcacgcatatgtttatcacagcactattcacagtagcaaagacatggaatcaacctaaatgcccatcaacagtagactggatgaagaaaatgtgccacatatataccatggaatactatgcagccataaaaaagaatgagatcatgtcctttgcagcaacatggatggagccagaggccattatcccaagcagagtaacacagaaacagagaaacaaatactgcatgttctcacttacaagtgggagccaaatattgagtgaagatggacacacagaaagaaacaacagacatgagttcttacctgagcgtggagggtgggaggatggtgatgatcaaataactaccaatcatgtagcatgcttcttacctgagtgacaaaatagtctgtacacaaaacacctgtgacatgcagtttaccaatataacaaacctatacatgtacccttaaaattaaaatacaggtttttaaaaaatcctcaatctaatggtctagaaactattggggaggggatttgttaaagattcctgaaatgttagcaaccaacagaccaagaacattgacactttgtaggtagttttagttcagattaatagatgcacatttgtttcacctggtaagtctgcagtcaggagctctgggagtcaatgctgtatgtttcaagataatgtcaaggccagattttggttaaaaagaaaacctaaataaaaagccaagcattcatcttcactctatttttgtattagaacctgacaccattattcataatttcactgtatatgaagagcaaccctatactccatacaaacaacatagactgtggaattatgttgtgaaatgtaaagagaagatgattcccaaatttaaaggaaactggaggtgttctggagaaacaaatagaggtggttaaccttactgatttcttctcttgatgataattgttatttgcactgtaagtaaaaacttctacttgaattactctacaatgctgtaaatctatcactcacacatacaaaataccataggaaaaaggggtagttccacatgtggtggtgaagcctacttaggtgcataattttcttcatctctaaagagcgtccgtttgacggggtgtagtggctcatgcctgtaatcccagcactttgtgaggctgaggtggccaatcacttgaggtcaggagttcaagaccagtctagtcaatgtggtgaaaccccatctctaccaaaaatataaaaaatttgccaagtgtggtggctcacacctgtaatcccagcactttgcgaggccaaggagggcagatcacaacgtcaggagttcgagaccagcctgaccaatatgatgaaaccctgtctctactaaaaatacaaaaattagctgggcatagtggcacatgcctgtaatcccagccctcaggatactgaggcagaagaatcgcttgaaccaaggaggtagtggttgcagtgagccgagattgcaccgccgcactctagcctggccgacagagctagacttcgtctcagaaacagagagtgcattcatccctgggcttcttgcaaaatggccttatcatatacaggcctctgtttttgttttggagtttgtttgtttgtttgtttgttttgcagacagggataaatcaaaaggattgaaggccaggttcactaaatggcttctcctggtactgggttttccttccgaactgttcccatagttctgtgaccatgtctccatagaataagggtggcacgtggcaaacctaaatgcatggaagtgggcatgtttactctctccccatacttagcactggatgtggagaatggcttgatgaaattgggtcaaagtgttcttccagaatcgccgttccatcttcttaactcagaaagtcagccaaggttattgccacgccgtagactgaaaatcccctggaagcacaaagctggagcaatatgagggttcacatcatgttcaacatctctcagctatcactgctcttcatcgtttcatgtacaatgtcttgcaaatcattgtttaatatactgtgttgatttttttcttttttgcatgtggtgaggcatatcaaatttctattagtgtttccatatcttgattcattcctcctgcaattgctaaattattactgtaccttcaagttgtcaatattaaagtgagtaagtaacaatgtaattcaaactcacagagaaagacagaaaagtaaacaggtatttggaactctaaagagaagggaagaaatggtctacccacacagtgtctgccaaagtctccactgtatgtcaataactcaaagacttgaggatctaaaagaaaggataatatctctgacaatgaatctattatacacttcttagccttattttatgactacaacaaaactctcatataattatgcaggcacaagatttattcacataaagtgaaagcaatattggaagtaatatataaataattcacaaatatcttgatattctgagtctatatattctaaatcaaatattgacccagagtcatggaaatctttatatcaccctctgtgtcatgaagactgatggcaataaaacacttcttcataaaagaggctgtactattccctgtgtaatttccatctttcctgttcatacacattctacaagtgtgggtgcaggtgatcctacctgaaggtgacagcagatcagatttcaggactagttcatccatgtatggaaaatgaaaagcatgtcatggcttctaccagattaatgcaattgtggtaaaacttgaaaaaagatcaaattgatggaatagtgtaaccaatagagattttgaaatatttatcaagggagccctattaatagagctgaaatttggaaaataacaagattttcactggtccaagagggcaatgcaattcagaaggacagaaaggggcagatatgatagaaacagcatggcccatgggagggactctacagtggattgaggatgaggaggctggagaagaggctgaggggagtcagggctcacatcctgtcctgagaacagagaagagcacaagaaacaggttcattttcaagctcaaactctcttcagattgaaagaaagttagtttcttgggaagcagacaagaatataggtgaagagtttgagagattcattaatttctttgggaaaatcaacataaaggaaaatcttttatgttgctctttgtccattacatgggtggggctcacgggggaacaacatagacaaagatttcctcttctttgatatatcagttcagtggagattcagaaaactcaacggaaacgaaattgcaggtggaagagttgccattgggaactgagaggacaggcatcagacctggaatgggatgggcaagagaggcctccagcaggaggagcattggaggagattctggaggatgaggagcagtgagtccagcaaacaggggagggaaaggaaagaggaaacagtgtgtccatggcacagacaaagacatgagaagagagcaggggatttaaatgtcctctagaaataataatatgtgaaaagtcctggagcaggaagagcaggccatggaaggactgggccttggttcagtggatgttttccgcaggacatacacaggttcatacttctgggtctgcacatcctcttacctgttccttgatatttcactacaaaccggataattttttcatgtgtctcagagtataaagtgttacaatgatagcaataacacaagatctgggagggataaattagtattcttttattagcaataacataagatctgggagggataaattagtattcttttgttagcaataacataagatctgggagggataaattagtattcttttgttattatacagtacttacactccctgtatagcaatatagtgttatttgaaagaggcttgggttagttgtaaataatatcgcaaattctaggaatggttattgaatcaagagccttagatactttctggtcattggacccagcctacattcaattccttcccatgctggcatttcccacgtggccaaacactgcatcaaagccatcaagagataaaatttgctagtaaaacagaaatcacaagtatgtcttatagtcagccaagtgacaacctattacctttgcagtatctgctgtttcaaagcaagctacatgtgctgtccctagtcaagagtagagggctgttcagattccacatataagtgagatcatatagtatttgtcactctgttcttggcttgtttcctcagcataattttctctaggttcgtccatgttgttgcaaatgacagatttttgtttgtttttgtaaaccaaatagtagtccattgtgtatatatgccacatttttaaaaactttcatcccattgatagtcactttaggagtttccataacctggcaacagtgactaatgctggaatagacagggaagtggaaaggactcttcaacacactgatttcaattcattttggcacatacccagacattgaattgcttcatcatatgataatactattttttgtgttttgaggaacctccatgttttcttccaaaacagctgcactattttgcaatgtcaccaacagagcaaaatggttgcctttctccacaccctcaccaacgcttgttatgtttcatctttctgacaatagccaatgtatcaggtgtgaagtgatactcactgtaattttaatttgcacttatccagttattaaaaatgttgagcagtttttcatatattgtttggccatttttattccttcgttagggaaatgtttgtttaggtcctttgcctatgtttttaatactgagtcttgttctgttgtccaggctggagtgccgtggcacaattatggttcaccagcctcaacctcctgggatcaagcaatcgtctcacctcagcctcctgagtagctggactgcaggtgagtaccactatgcctggctaatttttgtatttgttgtagagatggggtcttgctatgttgctcaggcaggtcttgaattcttgggctcaagcgatcctccttcccaggcctctcgaagtgctaggataataagggtgagtcactacacctggccctttgctcagtttttttttttttttttttcttttggagacagagtctagctctgtcgcctaggctggagtgcagtggcgcgatctcggctcactgcaacctccgcctcccatgttcaagtgattcttctgcctcagcctcctgagtagctgggactacagtcacgtgccaccatgcccagctgtatttttattagaggcgggtttctccatgttggccaggctggtcttgaactcctgacctcaggtgatccgcctgcctcagccttccaaagtgctgcgattacagacatgagccaccgcacctggcccccttgcttattttctacgttgttgtttgtagtcctgttattgagaagtctgggattcttgtatattcttaaattattttgtaattaaagtgttgtttaaaaagtattattttggtacagaaaaaagaaacaatccaaacacagacataaacaagtgacctttggctcaggtgatgaatggacacatgggagtgtatgaaaaagcagcttccttatttattcacgattctaaactcctgggcacctacttaagaaagacaccatcaagctccagggacccttctcctttgccttattcccctttctccctttttatactctttttcttcagtcaccactttcagtgtcagtaaccacttcttaaaagataggttcctatgtctcatatatcacagaaagcccatattcaaacatcctatggcactgttatctgcaggatcccactaaagccattttggatgatatgacatgtggacactcaaaaccaagaatgagaaatatcaatgacagggaacataaaccatatttcttcatctaggagagtgatatggtttggatgtttgtcctctccaaatctcaagttgaaatgtgattcccaatgttggaggtggggcctggtgggaggtgatccctcatgattctttggagagtgatatggtttggatgtttgtcctctccaaatctcaagttgaaacgtgattcccaatgttggaggtggggcctggtgggaggtgatctctcatgattctttagcactatcccttcgtgataagtgagttttcactgagttagttagctcacccaagatctggctgcttaaaagtcctggacctacccttcttctcttccttccttctgctcttgctataaaaaacacctgctcctgcttcaccttcccccacgagtacaagcttcctgcacctccccagaagccaagcagatgttggtgccatgcttatacagccctacagaatagggaaccagttaaacctcttttctttatgaattatccagcctcaggtattttttaaaacaatgcaaatggcctaatacagatagcatttccttattacaagaattatttaattttcaaatgacaactgtaccttcaagtttctcagggcatcctgtgataattaagctcttttcattctactgaccctacagactccatcaggaattgaccacgtattctgttgacaattacactgtagaattttgttgcccattgcaagcctaaaagccacagaatagatattgtcatggtcataggtgagctgtgtaaaaaaaaaaaaaatgtttataaacctattggttaaagccactccgtatttacaaccaaactgcttaaaggttaaaattaaccttttgatttttggcaggtgcaggctagtaacttattcagaatgtgttgtgcacaggtgaagaaagcctagcagaaaaaaagaaagacaaaaatacaacaacccgatacaacacatcttcaacattcctgcagtgatacatgagatagacacaggctgaatggtgactctgcatatgtgctggctaaacaaagaatccccatagtggatagaactgtccactcatcccctgcacagctgcctattcacagaccacagcactgtgctgggtagcaccagggttttgtccaagaaccatgtctacaaagcctacagtgacatgagaatgcatactgcactcacatagacatccacgaagtccagattctttttctttttcagatcattatcatcctccacacaacattcatagcttcagtgaggagactggcttctgcaggcttggaggtctgaagtgagagatacagttgacctgaccacatttctcacttctgagattaaaagaacagttaacttaagggctgttattttgtgcatttgcaaattaagaaaactttggctgggtgcggtggctcacgcctgtaatcccagcactttgtgaggccgaggcgggtggatcacgaggtcaggagatcgagaccatcctggccaacacggtgaaacactgtctctactaaaaatacaaaaattagctgggcgtggtggcgtgtgcctgtaatcccagctactcaggaggctgaggcaggagagtagcttgaaccagggagtcggaggttgcagtgagccgagatcgtgccaccgcactccagcctgatgacacagcaagattctgtcccccccccaaaaaaaagaaaaagaaaaaagaaaagaaaactttgcactcctctgagttcatacttccttccataaaaaaagcaggcttatttgaatttgtcatcttaaaacatggatttttcttccatttattttattataatgggagttctgctaacagagaaatgtcttgtcaaattcacttttcatcttcatttcaatgcacacattacagtctatcatgatttatactgggaacaacatatagatcaccaaattcttcctaaaagctgggggaagagaatggcaagccatgaaagagacataagtacatatggacaaaagggacccatctcaaatgacaagagggtcaatgagctccaagtgcccagagcaggagaagactggtgatacatataggactgtgctaacgtgatgtcacaggcacagaggacactgtgctgagcaccgagttcccaaacataactctctcatggaatggaagacatggtttcccaaaacctactaagcaacctataaccagatttcactgaagttagactctaccagaattctcagaaagatgccattgcaaacatcccaaatgcagagcacatggtgaggccataacccaatgccctttctccacattcaagcctgaatagaagaaattagaattcaaagaatgcatgactaacatatattacatcagatattggtgttaattttattgagccttcctggaaactgaaagtctattttcgaatacaaacaacattctaaattatatgtgtttcttctttattcaacatattcatcaaagaataccaaaacccaggcccagcacagtgtcccacacctgtaatcccagtactttgggaggccaaggcgggcggatcacctgaggttgggagttcgaggccagcctgaccaacatggagaaaccccatctctactaaaaatacaaaattagccaggcgtggtggcacatgcctgtaatcttagctactcaggaggctgaggcaggagaatcgcttgaactcgggaggcggaggttgcagtgagccaagatcgtgccattgccctccagcctgggcaacaagagcaaaattctgtctcaaaataaataaataaataaccaaaacccactccatttttcaggtacccacaagtagggttgaccacagtaacaagtaagcaagcaaaacattttgtgaaaaccgtgaagcatcttcctctgcagtgacttatcaaaaggggtttgtatgatcaccgtccacagaattagaaagtagaatgggagaaaattagatacacagttgttctggaatgaagcactggatttagaaggcagattacagggaaaattgctcttatttctaatattagggcagaaattctcaattacatttttttctaactctacagaatactacaactccagcacaaacattgaactacctctttgccatttctaccttcccccttaatggatttcctgaaccattgcttataaaattatctctgtagtttaatacaaagataatatattaatatgctctatttttcttatttctattttactcttcaggtattcctccggacaatgtaatgctaacctagcccaatgagaattgatagaatttggtcataagtgtttaaaatgtgcctctatatattctgttagatagccaaatgcataagtgtgtgacccatgaccaggggttcctctcacagaaaatgtgtttatactggaaaacaaccttgtggctctgaactgcatctggtttacttctactaaaataaccagtctctgggaaagtcctgacttgaaaaaaattcaggtatattagtcgaatgagacatagaggagtcaactcaacaaaacacatgaaataacagattcagtgcattacttacagatcccagagagagcagagcagaatgcctcagatggccaaagggggagccattctggacacacactcacacggctgagagaggggcccatagctgaggcctttattggggtccagtgtgttattcaagcaaccttctcacagggggttctaactgctgggtttacaggaagcaagcatgaatcctatagagtcacactgggacaaagaggtggtcactgtggcatattcacacagcccacatgagatatggatggtcagggggcaaagtcagatgcttcatctagctatctcataaggagtggctgtataaagtctgtatctacaacaactgcataaagaaagtgggagggattagagaactggaaaatgtgtgaaacgtgttaagtcctgcttctggtatgaccaagataaacataattcaaaatagatgctgaggcaacataaaactataaaattataaaaattaaaatcatgtaaagtagaaattacaacagtactctaataatctcacatatagctaggtagaaggtaaatgaaatgggctaatttatataaaattatgtttgaaaaagtcttcttgagccagacgcggtggctcacgcctataatcccagcactttgggaggcctaggcgggcagatcagaccagcctgaccaacatagtgaaaccccgtctctgctaaaaaacacaaaaattagccaggcatggtggtgtgcgcctgtaatcccagctactcaggaggctgaggcaggagaatcacttgaacccgggaggtggaggttgcggtgagcctgagccaagatcatgccattacactccagcctgggcaaaaagagcaaaatttcatctccaaaaaaaaaaagaaagaaaaaaaaaaagaaaaagaaaaagaaaaaaatcttcttggctaggcatggtgattcatgcctataatcggaggaatttggaaagctgaggtgggaggattgtcaggagttcaagaccagcctaggcaacacagcaagaccccaactctacaaaaaaacaaaatttttttccaaagtggctgggcatggtggcacatgcctatagtcccagctactcaggaggctaaagcaaaaggatcccttgagaccaggcattggaagctgctgtgagatatgatcacaccactacattccagccaaggtaatacagcaagaccctatctcttaaataataataataatagaccagaattcagcagacaagtcactatgatatcacactgtgaagtgagcagtcacagaaaaaatatagtgtgttccattattgctagagtacatattttcacatctttcaaacacatatgtactatggtttagatctttggccccccagacctcctgttataaattgatccccagtgttggaagtaggatctgataggaggtgcttgagttttgggggaaatccctcaagaatggcttggtattgttctcatggcaatgagtgagtacttactctgctaatttcgaggagagctggttgctgaaaagagcccaacatttgccccctctcttgcttcctctctcaccatgtgatctctgcacacacaagctccccttttctttctgtcatgagtagaaccagcttgagaccccagtcagaagaaagtattggtgccatgcttcttttacagtccatagaactgtgagctaaataaatttcttttctttataaattacccagactcaagtattccttcctagcgatacaaatgaactaagacaaaatgcttcttaaaattgatagtgtcaaaacactattggtcaaaatgcagactttttgtggttgtccttatatgaatgcacatgaacctgtcctagaaaccttccattgacaccttcttttaatgtcatcaacacaaaacttgcagaggagctgtcagcaggttggaaagataatctcacagagtgttgcgtaggaatctcacaagaaatgaaatatcaccaaagcttctggttaacagagaagatgataatgaggagaaaatcataagaaagatgaatagtgactcagaagaggtgcatctggatgagagaaatttatcaatatctttatttttctattttttgagacagagtcttgctctgtcacccaagctggagtgcagtggcacaatctcggtccactgcaacttccatctcccgggttcaagcaattcttctgcctcagtctcccaagtagctgggattacaggcacacactaccacaccgggcaaatttttgtatttttagtagagaattttttttttttttttttttgagatggagtctcactctgttgctgaggctggagtgcagtggcacaatctcggctcactgcaagctccgcctcccaggttcacgccattctcctgcctcagcctcctgagtagctgaggggactacaggcacctgccaccacacctggctaattttttgtatttttagtagagatggggtttcaccgtgttagccaggatggtctcgatctcctgacctcaggatcctcccgcctcggcctcccaaagtgctgggattacaagtgtgagccaccgcgccgagcagcaataccttttttaacgtgatttgcttatatttgcatctcattggagtgatataaaacaaatatccacatttatatatgtcgaaaagagttattgtcattaattgtgaggtaaaaattataaggtgtaggaagtatttgtaccatatcttgtcaatgattttattcctttactatggcgtaaaataatgatgtattttacaattgatacaaaaaatatatttaaattacttagaaaacactgtcaatattagcatactgatgttgtgattagtatagacctgatatttatctacaggcattatgtatcattagttcattcatttctcccaaaatatcaaaaggtaggttctattaccactcctaagtacaagttctgaatttgagctaaagccctgcaaaaaaagggctgtctccatagtccttgctcacataaactatgttagaaaatgtttttctgttaaattgtgaatacattgtaggtctaatttaataaatcttatgctagcctatagtcatgaagatattttcctaacataggttgtaaatactgtattaaaaggtatttatatttgggtctatgatgcacctgcaattaattttatgtgtaatgtgaagttaaaggtacatttaacttcccccaatgaacattaatttcctagaacattgattgtaaaagccatctttctactaataactgctcttattaattatttgcatttatattattttgtctgttttgagctttcctttatttcattggttcacctttctatctgtgcaaatattacattgtcttaattactaagagtcttcatttaatacaagaattttccatccacagccctttagcctatctactgtggtgttctaaaaggaagaaagaggctagtaaatcctggatactttgctcctacaccaatattcccagctgtaccttgaaataaaaggatttagaactttagaacattgctgttgttgcttatgtctctaatgttctcttgaatcttgacaatccccgaacactgctccccgctttatttgtttagtccagtcccagtgaaataaattagatgtcaaggctcctcattatggttgcctggtttttggaacctggggtactttgtactcctccagcaacagccagaggtggcagagagctgtcagtcatccctgggtgcctcctgcgcaagcgcagttgtcctcctgcgccgacctcgaatgcggtcctcctgctgcagaccacgcccaccaagggctggccgcagccactgtagctgagctcagagccttctgtgtggtttgcgggggcaaggtcagctgccccctgccctctctctggggctatttgaggaatgcggcctttttgcataagaaaggcttttctctacagtaactgtggtcgctgatcaatgacaccttcctggtaacatttcatattgcttttttggaggtgggggtgcagatatctttaaaacttgcatgcgattgtctttcttttaatcacataaacatcatttaaaaccaattcatattttgtattgtatattaatgcctttcattcctgtattttaaaatgctatcataatcatttttcgaaatacatatttaattattttcatctgttcaatcatctttctttagtaattaaatgaaaatagcactttattaagaaagacaaatgttacatattctctgttttagtgttttccagaaatttgctatgaaatacgactggttgaaaaggagagggtcagagactttcctgagagccacaggacaaaatttacttacaatcgcaggcttaaagaagctatgatagtttaaattacgtggcttagtttgttcttattgtggaaggtgcacaaggaattaatttgtgtagacagaacactgagagtcccattctgaatgcagagacagctactttgctaccgtgcaaatgagtgtcgtcatattgtttgtttttctccttacccaaaagctatagacattggcttgcatatttgagtattttcactttggttttgtaaatggctgcttgacttgccttcctacagaaaatccataatacagagatgtattattttcttactcctttatgagtgattagtttgcactgaaataaaaatgccactcaggaaatgtcatacatcttcaagcagcatatattttaatagtatcatcttgtagaaagggaattacaatctttatttcttctatatcaatgagcaaactacttttttaatttttatatgttcatttttattgacttagtcaatagtttacctactttttaggttttacgtgctccattaatgtccattgttttaggctgaacctttgacactcctcatatatcgtttgtatgagactagatggcaagtaaagataggattcctcaccctaggttaaacactaacttcctcttgaagaaacaacttaggagtccaaaaagcaggctaggaattgtttaggttctgcaatacgaattgtgcaaatgccaacaggattgaattgagagaaacacattctctaatgaaggactcattcctgcagggtggatctatgagattcaatagcaaatggctgttatacaagtaatgaaatcctcaatcttatggtctaaaagcgattctggggggcacttatttaagatacatgagatgtgaaaaagcaatggaccaagagcattgatagtttatggatatttttatttcacattattgatagagctttgtttgccaggcaatgctgcagtcaggcactcggggtttcaataccctatacagaaaatctcaagagcagaccttggttaatttttttaagtaaccctcatcttcattcttttattgtattatgacctcgcgccattgaccttaaatttcactacaaatttagaagaacctaatagtcattgcaaactagatagataatggtatttatgtaatgaaggacaagggaaagatgattcccaaatctgaaagaaactagaagttttctggggaaacaaatagaggagataagatttactggtttattcttcattgatgagagttgcgttctgttctgataaatggaaagctccattgaaattacagatggtcctcaacttaagttggggctacttcccaataaaccatattgaaaatggtttcataaattgaaaatatcaccataaattgaaatatcataaattgaaaatatcaccagtcaaaatgtgtttaacatgcctaccttactgaacatcatactttagtctagcctgtcttaagagtgctcagaacacttatatttgcctacatttgtacaaaatcatctaacagaaaccatattttataatgtgttaaatatctcatgtaacttattgaatactgcaatgaaaatgaaaagcagaatggttgtatgggtactcgaagtacaatttctactgaatgtgtattgctttctcacaattataaagttgggaaatctgaagtcatacctcagggagtgcttttattacacaatacaggtttatcagacgcatataccaacaaatcataggaaattcaggtttgggtcaagggggaggggttcaacctacttatacatatttccttcctctctgttgggctacctttatccttgggattgttgcaagatggccgtgtcatgtaaagggctgtgtcttttagcatcatgaataagatgaaagagttgaaggccaacttcattcaaatgtcttctcgatgtgtccttccctttttctcctggactgctctgtgatccatgtctctgtagaaaatggctggcataagtcaatttctgactgggagctgtcatgattactgtctcccactgttaacactgtacttggaggtcttgatggaattgggcaaacctgttctttcagaccctcagtttcatctcaacacaaaactctccaaaagtccttgctgctccacagcagggaactctcttgaagcaataacatgaggaaatagtgggcttgcatggctgcctcacattcctcaggtatcactgtgctcattgcctgatgtactgtgtcttgccaaccatcattccacgtaatttacccattcttggtttttacattggttaaggcatgtacaaaccctgttagtttttctgcagtatttggattcataccttctgaaattacttgacgattactgtgtctctggttatttgcttctagttggcaatacaaaggaacaatgtgaatgaaactcataaagaaaaacctatgatttaatgggcgtgtgtaacactagagggaaggtcagagttagtctatgcatgggtataggtaggagtctcagtgggtgtcagccattctgtgtcaacaaatcaaatatttaaggtggatctaaaagaaaggtaatatctctgccaattaaactagagtcacgcattgactaatggcaaatacagtctaagaagtgcatttttaggcaattttgtcattatgagaacaacgtagagagtacttacacaaacttagatggtatagcctactacatggctaggctatatggtaaagcatgttgcttctaggctacaaacctttactgaactgtaagcaatgataacacgatggtgtcatatcccatatatatacacatacacacacatacatatatatacatatactatagtaaaaatatgatataaaacattttttaactggtactgctgtttaaagcagatatcatgagtggattttgcaggaccggaagttcatccaggtgagtgagtgagtgagttgtgagtgaaggtgaaggtctagggcattattgtacactactgtagatttaagaaacactgtatgcagccgggcgcggtggctcacgcctgtaatcccagcactttgggaggccgaggcaggcggatcacgaggtcaggagattgagaccatcctggctaacacggtgaaacaccgtctctactaaaaatacaaaaaagttagtcgggtgcggtggcgggcgcctgtagtcccagcatactcaggaggctgaggcgggagaatggggtgaacctgggaggcagagcttccagtgagctgagatcgcgccactgcactctggcctgggtgaaagagcgagactctgtctcaaaaaaaaaaaaaaaaaaaagaaacactgtatgcttacgctatactaaatttattttaaaaacctgaagtaggccaggcgcagtagctcacgtctgtaatcccagcactttgggaggttgaggcaggaggatcacgaggtcaggagttcgagaccagcctgaccaagatggtgaaaccctgtctctactaaaaatacaaaaattagccgggcattgtggcacatgcctgtaatcccagctactcaggaggctgaggcaggagaatcacttgaacccaggaggcagaggttacagtgagccaagactgcaccactgcactccagactgggtgacaaagcgagactccatctcaaaaaaaaaaaaaaaatcctgaaatactaatgacattatgattgctacaatgtcacaagataagataaattttcaactccattgcaatcttatgggaccagcaacgtgcatattgtctgttgttgaccaaaacggcccttatgtggtacatgaccctatacacataacagcatattttatatttatggaaaaagcccttctagaattataaaatcacaagttttactcacataaaatttaacacaatattgagattaactcataaatgaaattataaaagtcttaaaattttgactatgatagttctaaacaagattttaatccagagaaatgaatgtgttcacgtaatcctctgtggcataaagagtaatggcaatgaaacatttcttaataaaacaggctgcatcattgtcagtgcgatttgcaccttcccgttgacatccattctgtaggtattgaatgcaggtgatcttacctgaaggtgacaacagaagattttattacaagatcacgcatgtgccctcaataacgccatgtcattgatgccaccagggtaacagctattgtgataaaatttgaaaaataaacatatgtggcttgaacccgggaggcggagcttgctgtgagctgagatcgcgccactgcactccagcctgggcgacagagcgagactccgtctcgaaaaaaacaagaaagaaaaaagaaagaaaaataaacatacgctaaaaatttagaaggatagtaagtaataagcatttgattgcttgagcccaggaattggaggctgctatgctctgtgatcacaactatgaatatccattgcactgcagcctgagaaatatagctaggctccatctctaaaaaagtaaataactaaataagtgtttgaaaatatttagcaaggaagccatactaatgtagctgaatcttggaaatcaagaaaaaaaattgttcgtttaaaagggcaaaattaaaaaattctttccagatagaaagaataggtgcagatgatagagcagcgtggcccaggggaggggctaagcagtggactaaggatggggaggctggagaagaggctgaggggagtcacatgttgtcctgagatgagaaagggaaaaaaagaaacatgttcatcttcaagtgcaaactctcttcagattgaaagaaagtttttagtttcttgggaagcagaaaagaatataggtgaggagtttgagagattcattaatttctttgtgaaattcaacataaaggaagatattctgtgttgctctttgttcactatatgtgtggggctcacagggaagcaatatagacaaagtttccaaattctcagatgttaaaggccaatggggattcagaaaacgcaacagaaactaaactgcaagtggaagagctgcccttgggagcccagagggcaagtttcaggcctggactgggtgggcaagggaggcctccaggaggaggagctttggaggagattgtggagagtgaggagcagtgagtccagcaaacagggcagggaaagcgaggaggaaacagtgtgtctgtggcacaggccagggcatgagaagagggtggtgggttggaaggaccactgggatgagtaatacatgaggaggcaggagaaggaagggcagaccatgcagggactgggcatgggggtgagggtgccgggcagctcagaaagtgatgcaggggccgctctctgaggactgcattctgtggggagggatttgaatgtctcagttcttttatgaaatgttatccccaatccatgaggtcttctgattcaggaaccagtcagaacaggtgagggtggccccagtccactgtgcaggaccattagcattgccaggaggggttggtgctgaggacaaaagagagtgaaaaggggcaaagaactttctttcctgtctgtcattttgcagatgtaagtgggatctgtggatctgaaaattcacagtggccagctcaccaccacctgatgaaagatacaccacagggtgagagcatcctaacagcaaactgcaaatgaggtgggtttgcagctgcacagagaagggaccccagggaagctacacgggcaaggcaggcaggggacttcagaggtggtagcagtgggtgttgatgaaattattctctgaggatatacacgtttgtcagtgtacgtgcatgaccgcttacatgttgatgttcgcatacaaaccccacaattttctcatgtttttcagagcatagcatgtattttgactttattctttctaccacacgtaaccatgccttgtatacctagcaatacttaacgtttatttttggtggattattcatggttaatgcatttcctgacttggtagccaaatgaaattaccttgctttacaggcctttggttgatcatttctgaagatttgtgtcgcctgaattcagtgggggtcacctctccatgatcttaagcaacagtcctgttgggactgttatgctatcctacttaactttggacttgtatgtcctggaaaatatgaaactatcgatactcacttgaaaattccaggtgctttaccttttactttgtttttgccgtgtttccaatgttatatattttctcccacttactttggattcaattgctctgcttccttttacagtaaaaatttagatgtttgaattttgggtttcaacttttctaatatatacacactcaatgctgtaattttcctctaagcttccctgttgtagctgacaaattttgatgaggtgtgttttcctttcaatttagttcaaattattttaaaaaatttctcttgagatttctttgacccatgtattatttggaaatgaattatataatctccacgtattttgcaattcaccagtttttaaaaattgatttctagcttaattctgttgtgttttgagtgcatacattgtattagtctgattcttttaaatggtttcaggtgtgttttatggaggagaatgtggtgcatctcgatgagtggtcctgtgggcttgagttcaatgtgtattctgcccgttgttggataaagtctgtagatgtcaattatatccaattgactgatgatactgttgagttcaactatgtccttactgattttttctgcttggtggatctgtctatttctgatagaggagtgttgaaagtctccaacgataatagcggattcatctatttcttattgtggttttaacagtttctgcctcacgtagactgatgccctgttgctctgttgttacatgcatatatattaaggatcattatattttcttggaaaatcgatccctttattatcacataaggtctttatccctgataattttcctgtatttacattacattctttctgaagctaataaagctatgcctgctttcttctggttactgttagcaaggtacattttgtttcattcatttacttttatatgtacttttactttttttacatttactcttattaattgacaaaatttgaggtattgactatgtaaaatcttcacatcatcttcaaacatgatgtttgaagaataatatatattgtgaagtgaaaaattcttgctaagaacatatgtgttacctcacacagttatttttcgtggcaagaacactttacatccactctttcttcatttttcataatgcaatttattgttaactatagttaccatgttgtacaatctcttgatctttttcttcctatctaactgaaattttgtacccattcacaatcatctacccatcctcatcccctaccacccttaggccctagtactcaccattctactttgtatttatataaatgagcttttttagattccgcttacacatgggttcatgtggtatttgtctttctcttcccggcatatttcatttaacatattgtcatgcagatacattcattctgcctccaatgacagtaattctccctttttaaggccgataatatcctgttttgcatatacactgcattctttttatccattaatctgttgatgggcacttaggttgatcccatatttggctattgtgactaattctggaatgaatgtgggagtgcagatatctatccaacacaccggatagtcaatgaaatctcccaaggcagattttattacctttggatatatacccagtaataagactgctcgatcaaagggtaattctattgtttttttttttaggatccttcacaatttttcccataattactatattgtactaatttacattcccaccgacagtacacatgttcccttttctccctatctttatcaacactaacttttgtcttttaaaatagccattctaacaagtgtgagatgatatctcattgatttaaatttgcaattgtctatgtatgtcttcatatttatacagatttccaatatacaagatataacggggacttgtttttagatctactctgacaatgtgtctttaattggtgcatttcaaccattgctactcaaagggattactgacatggttgtgagaggtgaggccagctggacttcctgggtcgagtggggacttggggaaatctcctgtcttacagaggattttaaaatgcactaatcagcgctctgtaaaatgcaccagtcagcaggattctaaaagtagccaattgaggggaggattgaaaaaagggcactctgataggacagaaatggaacatgggtggggacaataaaggaattaaagctggtaaccccagccagcagccacaatccgctggggtccctttccacgcaatggaaggtttgtctcttcgctcttcacaataagccttgctaccggtcactctttgggtccatggcatcttggactaagagtccaaggtcagttcaacttggtggagcaagctggcagttagatgaaaaatatacacagacttgctgcagctgtacagatgatgaacgtagaactcaaaagatgatggaggccgggcgcggtggctcagggcctgtaatcccagcactttgggaggccgaggcgggcggaccacgaggtcaggagatcgaggccatcctggctaacacggtgaaaccccgtctctactaaaaatacaaaaattagccaggcgtggtggcaggcgcctgcagtcccagctactcgggaggctgaggcaggagaatggcatgaacccgggaggcggagcttgcagtgagccaagattgcaccactgcattccagcctgggcgacagagcgagactctgtctcaaaaaaaaaaaaaaaaaaaaaaaaaaagatgatggaaacagagtagaaatgatgagaatgatgaatgatgcctggagcttggttcctgggttgctgtggtgttagatggtcacagagcagctttttggaagcttatgtccatgtctcctgctaacagtagatacttgattagaatggaacagaatgtttacctgatttttacttatagcacctggaatgctagtagtaaaatgtaagccctttggagacagaaaatttttcaattctgtgttttcagagcctaggataattcctctgacctcactggtgagaatacgtaggtgttaaactaatgcacggattaaactataagggcaaagaaaaaagttcccctttgtcctctgaaggttcactgaaaaatcaactggcaaaaggaagattaatagaagaaaaggtatgtaaaattttattttaaattgcatagggagggaaccacaaaagaatgatgacccagtgaggtacacacgtttatatatctgttttcatagaggaagaaggcgatgtgtaacatagactattattttaagaggcaatagaccatcaaggagaatgaacagacccaggaggcaggaagcagacattaggagaaggtgaggtgcagagctacgcaggaagagaggttgttgtttaatgcaaattaagtcctccagataatctcttggagctgacctcaaaagaacagacggtaggtgtgtctgggctggtgaggactcccagcctcttgatctttcctggttacttgatgagatccctggggaggatgttcaagaccattgcatttctttattttattttattttcagatggagtctcactctgttgcccaggctggagtgcagtggcatgatattggctcactgcaacctccacctaccagattcaagtgattctcttgcctcagcctcctgagcagctgggattacaggcgcctgccaccacacccagctaatttttgtatttttagtagagacggggtttcaccatgttggtcaggcttgtctcaaactcctgacctcgtgatccacctgccttggcctcccaaagtgctgggattacaggcgtgagccactgtgcccagcctgtaaatgcccatcccattatatttcttttgtaaagaagcttgcttggtcagataaggaaatttcagagaggctcttcctggacttgggagtgggagacaagattagagagaccttcattctgaggcaaattctaagacggctcagcatgacaaagcaccagtctttggtatatctgagccccaacaaaataaactgatttgtgtatgaagaatggagcttacagctcagacagcaaatcaatccttattgactcagttttcaacttcatctggattaccagatgcacagtgtgaaaataagtcatttgccagcctgagcaacatagcaagagcccgtctctataaaaagtgtaaaaatctagctgggcatggtagtgaccgtctgttgtcctagctactctgcagcctgagatgggagcatcacttgttacagtgagctgtgatcatgatcaggtcactgcactccaatctagctactgagtgagaccttgtctctctctctccctctctctctctctctctctctctatatatatatatatatatatatatatagccaggcgtggtggcagtcacctgtaatcccagctactcaggaggctgaggcaggagaatcgcttgaatctggtaggtggaggttaaagtgagctgagagtgccactgcactccagcctgggcaacagagcgagactccatctgaaaaaaaaaaaagaaatgcatataatatatatagtatatatagtatatatatctatatataaaatagatatatatagtatatatatctatatataaaatagatatatatagtatatatatctatatataaaaatatagatatatagtatatatatctatatataaaatatatagatatatatactatatatctatatataaaatatatagatatatatactatatataaaatatatagtatatatatgaaaataagttatttgtattcaaagcatcaaataaaattttgttttagttttctaaaaaaatacaagtaacatatataggcatgctgtttttcttcttatatgtgactacattactttagtatgtagcaaatatcatttgctagctgtagtaaatgtgcattgtcacattttgtccaattttgttcaaactttaatcaaatgcctaagaatttaaaattaccttaattttgtagaagcaaatcacagcttatcattttagatgttttacttacttatgagtctactatttcccacgttactgctgtttctggcctgcctgtggcagtattgccattcactggaacctgcttccataggaggagcatcctgatgtgtttaggaatactaaaattcagatcattccccatcagagttgtctattctgtttctccctctcatccccataatgaatgcatacattctttctgtttgtttggtaattattgggtcatttaaaatgaagactatgaaatgagaacagaaccactgaccaaaatgtacaactttttaaacgtaccatggggaagaaaggtccagaacctatgcgcggagtatgttactaatccagagagaaagtatatttaaaaacaacctgagtggtcaggaagtcaatttcttttttctttatttttttaagagagacagggtctcgctttgttgcccaggctggtctcgaactcctaggctcaagccatcttccctcttcggcctcccaaagggatcagtttctgaagtgagatgagtgagttgattccttgagcattgtcttaatatgctacggctaccataacaaagtaccagagactgggtggcttacgcaacagaagttaacgttctggaggctataacgttctagaggccggcaaggttgtattctttgtgacctctctacgtggctggcagatggccaccttctctctgtgctctcacctcttccttcccctgtgcttgcacatccctggttctctcatccaagcattctattcttatagggacaccaggcagataggatttggcccaccttaatgacctcatttaccttaatcatctaatagaaggccctatgtccaaacagtcacattctgagacactgggggtgagggctctgcaggggagaaaaataatacctttccttcacctgctgcaaggttcgtggctgagtcctcataacaaaatccagattaacaaaagaaaagtatgcaaatgcattttttttttgagacggagcctcacttctgttgcccaggctggagtgcagtggtgtgatctctgctaaccacaaactctgcgtcccgttttcaagcgattctcctgcctcagtctcccgagtagctgggactataggcgcccaccaccacacccagctaatttgtgtattttttagtaaagatggggtttcaccatgttggccaggctggtctcaaactcctgatctcaggtgatccgccctgctcggcctcccagagtgctgggattataggcgtgatccaccacgcccagccacaaatgcatttaatgtaagttttatgtgacacaggagactacggaaatgaaaactcaaacatctagggagaactgtgcatttttatggacagtcatttagaagtatgattggaggacaaaagggtatgatctaatggtaataaactgggaggaacttaccaaggcctgactgttcaggttcttcttggcctccaagtttgatattccttcccttcgggcatagggcagaatacctgtcacatgagggtcttcaggagagaagaggtgggagcaggtcatttcaaacctttctccctctggagttttctgtctcctccagcttaaaatccttagtgtgccagggtgccatacattggggtagtatttcctgtactccagtagcttcaatgtataaatcttagccacaacaagcatgaatagagatttcaagctacagaaggaagcaaaggactaccgagaggtaaagatgtccaaaggtaactctggcgaaaagaatgaactccttgtacagctgtgaatgggagtttgggcaagcgttaagtctgaacctacctataggtgggactcttaaccattttatatttatgcagagcgagtaaatggaaaaatcccgtggaaaaacactaatcatatattgcgacttgagggggctacagatttttttttttttttgaggtggagtctcactgtgtagcccaggctggagtgcagtggctgcgatcttggctcactgcaagctccgcctcctgggttcacgccattctcctgcctcagcctcccgagtagctgggactacaggcgcccaccaccatgcctggctaatttttttgtatttttggtagagacggggtttcaccgtgttagctaggatggtctcgatctcctgacttcgtgatccacccgcctcggccacccaaagtgctgggattacaggcgtgagccaccatgcccggcttggggggctactgatttaaagaaagaaagattaaaaggattttgatgcaataactctttaaattttttttttttgagttggagtctcactctgtcgcccaggccagaatgcagtggtacaatcttggctcactgcaacctccgcctcctggttcaagggattttccagcctcagccttccaagtagctgggattatagcatgcaccacaatgcccagctaatttttgtatttttagtagagacagggtttcaccatgtttgccaggctggtcttgaactcctgacctcagaagatccgcctgcctcggcctcccaaagtgctgagattacaggcatgagccactgtgcccggccaactctttatttatttatttttttttttttgagacggagtctcgctctgtcgcctaggctggagtacagtggtccaatctcggctcgctgcaagctccacctccctggttcaagtgattctccagcctcagcctcccaagtagctgggactacaggcacctgccaccacgcccaggtaaaatttttgtatttttagtagagacggggtttcaccgcgttagccaggatggtctcaatctcctgacctcgtgatccacccgcctcggcctcccaaagtgctgggattacaggcgtgagccaccatgcccggcgccaactctttaatttttaaaattgggtttctggaggtgatatccatccttttccagtacacagtttatagagtttcaacaaatacatactgtcatgaaattaccaccgtaatcaatgtttcccatagtggccacagcttgggaaatcctaacaaaggctttaggcttcctggcctctgctgccatgaccctgtagaaagaatggattacgagattcgttcccacctgcccctccctgggtctcagatcttccctatctatcagataaggattggattgagctggtgtagccagtttgtctgtccctgtgctgaggttactacttctgctggcacccaaagcacttgttatagatctaaacaagttgatttcagtcatccagtccagcaagggaggacatgtcctatataaacttgatgtgcctgataacataagccaccccactggaagtatcagatgtttcccgcactactagagggttcctagcaccctggtcctccctgatcctgtcccccaacactgtgagatcccatagaaagtgggggtcaccttggggaacactgccataaaattagagttagggggccctttctggggttttatggtggcctgaaccacaaaccacccccaagaacatgcactttgaagagaaaaggaaaaagaatggtagggaacactgaggttggaatttcacaggaacagcctaattagccagctacctggtccacctccatccacatcaagctcagtgtttcccaacatgtgctgcagtgccccatttcccatgcattggagtgtagtgtttagtgttcatactactagatagaagtaccgcctcctgagcaggccttcttgatgtcctatcttcagttgctttggctgttccattgttcagtagctccattggcttgcagatgacagggtgcatacaaagcccatcatattccatgagagcatggccattgttttgctggtcatgtagtgaaggatgcttcttggtgagactgaggtcctctggggtgttcaaaatcatgacataagttctcctcaataacagcaatggtagtatcagcatccacaagcgtgcatattttttgtcctttccaagtagcaagctgttttgatagtctttgtccccacaaagaggctctttaaatattctagtcactcaattgccattccctgatgaggtatgtaggctgtcagcaacggcccacacattggtgaaatgcaggaagacctggtggtaggggtggcctgcatggtcatcacaaatgcgtgttgtttggtccactgggcaaattgccaaggtttattctgacaaatgatgatgacaaccacagcctaacagaccccatctgctctgttgtttcactgagccatcagtaaaccatgccacaccatcagcaggcttgtcttggagccttaggctccagacagccatgggaggagccaaagcacacccagtggttctcttggtgtcttctaattagctagccatttgttcacggagcctgctggtcacatgtggtcctagctgggcctgaacttgaatgcaccacttccatttgataagtgaagtctatggagcctgtctaattttattggttgagcttgtgagccatccagagagaaatggcagttcaggttgcagagtttcatctggcattctggccacgaggtgcccagtccaaaacagtacccaatatcaagtaaggattgccatttaaaagagggatataggccgggcgtggtggctcatgcctgtaatcccagcagtttgggaggccaaggcgggtggatcacctgaggtcaggagttcgagaccagcctgaccaatgtgatgaaaccccatctctactaaaaatagaaaaattagccggacatggtggcatgcgcctgtaatcccagctattcaggaggctgagacaggagaattgcttgaacccgggaggcagaggtttcaatgagccgagattgcaccattgcactctaacctgggcaacaaaagtgaaactccatctcaaaaaaataaaataaaataaagagggatatttggtggctgcctgaggcaacttatgtgtccaagatctgagaggctggtacaccccagtgtcagttttctgttgccagagacatccatcactgtgcatcaggttgcacacaactgtgatttcatctggctagcacatttaaggtttaaaaggaagtgcctgagacacaaattgttgtaaacctgctgctgcaaagggttccattcaaagtgtgtggctttattggttaccttgactctgggtgccagaagaacccccatgtgagatgcatgttgtctccagtacccaaagcgacctaaccagctgccaggcctcctttgtatccgtgagtgcagccaggggcttgcctgtatctgggatactgttttggcttcttgctcaggtagctttggcattcattgtgcccatggcctttttgaccagctaaactgggctgttacattgtgacaggtgggttgtcacttttttctttttttcgagacggagtcttgctctgtcacccaggctgacctggtgcgatcttggctctctctaacctccgcctcccaggtttaagcacttctcctgcctcagcctcctgagtagctgggattataggcgcccaccaccatgccctgctaatttttatattttagtagagacggggtttcaccatgttggccaggctgggcttaaactcctgacctcgtgattcacccacttcagcctcccaaagtgctgggattacaggcatgagcccccacggccagccggttgtcacatttttatctgtaacaagtaaatccagaattaataaaatagtgtcattgttccatttagtatgcagtaccactttttttaatgattcagtgcggcttgggtagcttaggtaacaggcaggagtggatacggcccactattgtgtcttagttcttagctgtgagggggcataatcttccaggacatcaatgcctataatgcactcagggtgggaaccagagccacctgcataaaaagttgctcacagggctctacccacaagtacataagcattgtgtgcagataagcatcacgggccaccagtttgttcccaaacctcccaatgtcatccgtttaattattctcctaaaaggacccagaaacattgtcatgtgggttccggtatccaagcacctgagaaaaaactgaagtcttctcttttctcctcttatcataacaagggtataaggccagagggcttcagtagggacctagaggccttggccccattcttaactgtgtcaatcagaccaagacacttaggtggcagtgttcctttatcaaacactcacaatagccacactgcgtaagatttccctggtcttcctccttatcctttcgagcctgactcttcccatcttctgggctgacattgtacgtgttagttcctctcatgcctcagggaccatacaaggacctctctctagtttcttcttgggtgcctcaggggctgtctgaatactcaccattcaagctcttgggccctgacaataagggatcacataagtgcccagcacctaggggaccttgaactatgatctgctgtttccacattcctttctctctgtctcagtccatgcagccagctcacttacatctgtggggaggagagtgacatgtcccatttaccacccatccttatccataactcatccaggtacatgtccagcccctgtgctcctgggctgatgtctctgccttgggctgagtactgggtggtattgcccctcccactttgccagaaagccatgtttctctgaccgaaccttacccactgcaccaatttttcaaagcaggttcaccaattaccaatcccaagggaggactccaccacacagaggacagcaaaggtcatcactataccagccatcaggaataggagtccagacacttctacccactgcatcctccgctgcagtgctacaactgcctgagagcagtgagacagaacacattctcaggcagtaagttaaaggatgcacatttattatttacagatagggagaaagtcttccttcaaaagaagcctaggctccattctgagctcatccccaaaggctcaagaagggttcccagggcagatgaagtctggattgcaaatgcccccctttcacacagctgaggaagcccaaaaggcagcccaccctgggttacatatctcagggcagacatggcgcattgagcaaagctttaaggaaatactgctttcagggcagagaggaacaaaccccagctctcctggacagtccctccctaactaaagatgtgacattccttaggaagggccagaacaaggccagggttgttccagacagtccctccctagctcagaatattgcattccaggctgatgctacacttattcttgacaaattaaaactgagaaaatgggaataattgaatccatccaaggccacctggaggactgttttgcattttcaccccaaaagttccttgtagtagtcttcccaccatatttagttttggaaattattgatatctatctccataactttgccttttacagaatgtcatataaatgaaatcattctgtatgtaatctttcagtaacactttcgagatatgtcatgtttactgtatcaatggtttgtttctttttgaaactgacctgtgctatattcaatgaatgtaccacaatttactcaattgtttatgtttttttttaagacagagtttcgctcctgttgcccaggttggagtgcaatcctgcaacctcggctcactgcaacctccacctcctgggctcaatgattctcctgcctcagcctctggagtactcatcatttttattaatataaaatgttataaatatggataacttgatggatatttgtgttgaggtattatatggttactacaagcatatggtttcattcatcttgggaaaatagatcttagcgctgagatgctggatcatataacaaaagtatgattcagaaggctggttgtggtggctcatgcctataatcccaacactttgggaggccaagatgggaggatcacttgaggccaacagttcaagagcagcttcgccaacatagtgaaaccccatctctactaaaaatacaaaacttggccgggtgcagtggctcatgcctgtaatcccagcactttgggaggctgaggcaggcggatcacctgagatcaggagttcaagaccagcctggccaacatggtgaaaccccgtctctactaaaaatacaaaagaaaattctccaggtgtggtggtgcatgcctataatcccagctactcaggaagctgagacaggagagtcacttgaacccacgaggcagaggttgcagtgagccgagatcataccactgcactccagcctggatgacagagtgagactccatcacaaacacacacacacacacacacacacacacagaaaacttagctaggcgtggtggcacacgcctgtaatcccagctcctcatgtggctagggcatgagaatagcttgaacctgggaggcagaggttgcagtgagctgagatggtgccactgcactccagcctgggcgatagagctgactctgtcttgaaaaaaaaaaaaaacgtatgattcactttacaagaaactgccaaaatgttttccaaagtggctatcattttgcatcctaacagaaaatatgggaatccccgttactccacatccttaccagcacttggtttggactctgtgtgtttgtgtgtgtctgtagtgtgtgtgtgtgtgtgtgtttgtgtgtgcgcatgagtaaatatatgtgtatatatgtatatatatcgactcttaataattccagtagggacatagtggcaccttactgtggtttcaataatttacatcttcctgctgataatggcattgaataaaactcattaacttgttcgtcatccatatctactatttgactgtcactcttctcatttcaaaaaatgtttattgttgtattattaaatttaactatgtatatgtataattttgatatgacctacatctgttaagtaccgaaaatatttttttctgagcctgtgccatctcgtctttctcttaacagtgtctgtcaaagagcagcatttattttaattttgactaagaataatttgtccttttttgttgtttttttttgagacagagtctgtctctgtcacccaggctggagtgcaatggcacagtcttggctcactgcaacttccgcctcctgggttgaagcgactctcctgcctcagcctcttgagtagctgggattacaggcaccctctatcatgcccggctaatttttgtacttttgtagagatggggtttcaccatgttggccaggctggtcttgaactcctgacctcaggtgatccacctgcctcagcttctcaaagtgctgggattacaggcatgagccactgtgcccagccaatttatccatttttaaattttgtgcttaatatttattccctaccattatatattgcttaacacaaggtcataaagattacctacagtattttccttagaaattttatgtgttaaggatttacatttatatctgtggtattttgaattaattttatatctagtgcaaaaaagggtgaagagttttgttttgtattttggcatatgaatgctctgttgttttaggagcttttgctacaaatactctcctttcttcaattcaagaaaattgaatttccgtggcacatgagtcaaaaacctaccaaccatatatgtatatgctataatgctccagttatctaaatatttatccttatacatatccatatatgaatatgcatatgctatacatacatacatatatgtatttgctatactgttccatttatctatttatccttacaccaataccacactatcttgactaataccacattatattaaacttgaaataatggccaggtgcggtggctcacgcctgtaatctggcactttgggaggccaaggcaggcagatcacctgaggtcgggagttcgagaccagcctgaccaacatggggaaaccccatctctactaaaaatacaaaaattagccgagtgtggtggcacatgcctgtaatcccagctactcgggagtctgaggcaggagaatcccttgaacctggcagacggaagttgcagtgagccgagatcatgcagttgcactccagcctgggcgacaagagcaaaactccgtctcaaaaaaaaagaaaagaaaagaaaacgtgaaataagtagtgagtcccccaatattgtcccttttcttctaaattggtttggctatactaattatttagtttcttacataaattttggaatctacttctcagtttctaaaaaaaatataaaaaatcagctgaggattctactgaatgtatagataaatatgtaagaattgacccttggtcaggcgtggtggctcaagactgtaatcccagcactttgggaggctgaggtgggtggatcacgacgtcaggagcttgagaccagcctgaccaaggcatggtgaaaccctgtctctactaaaaatacaaaaattagccgagcgtggtggcaagcgcctgtaatcccagctactcaggaggctaaggcaggagaatctcttgaacttgggaagtggaggttgcagtaagccaagatcgtgccactgcactccagctggggtgacagaacgagactccgtctcaaaaaaaaaaaaaattgatccttaatattgagctttccaatccattaaattggtatatctttatatttatttagatttttttgaatatcaatctgatcagcattttctaattcccagagcacacattttgcacacattttgtcaggtttatctcgaagtatatcacgtttttatgctattataaaatacattttaacttctatagtcaatttttcattatcagtataaaggaagtcaaccgattttcactcactcatttttacaaactaagcaaatctagtggcagccatgtggtatatacattgctacttgtgagggatggataaatgaaaaacatttctcctttatttgaggcatttgtcaagcagagatatgaacaaataggcaatgcaaatcagaggggttgtagtagggaatgtgcattattctgtggaaatccacaaaatgcatgggcatacaaaccaaatttaaatagtcatagaaggaatcctgcaggaagtaatttatgattgaataaagtagctgaaaaccatgcaaattagaattagacaagacaaaagaaggattagtattcaggtagagaccagggtgtgtctacaagtcaacatttttgagacatcacagggagagtaacaatttcagtacactgaaggaagttagaaatctatgtcagggctagatttttaagaaattttgttctgtgtcaataagttaggatttttatagttttctaaggttctattcagctactatggggtcgactcaagaatacagctgttgtaattgttaaaatgggaatttgggagtcttttgaatttgaaagaaaaaacaaatgtgcgggattgaggctcagaccctgtacaggcaaagaaaaagttaaaagtgaggaaaatgagagacaacataaactctgggaaaagtgttcacaaaaaattttagtattttcagggtagaagctcctcttgattgagtcataccttcctgcgaaagatacaaagtcagaaaagaaatcctctacctagaaaacgacattttggcaccaagcataggttactttcatgccttaatttcaccttaccagcatttcaaaatacctgctacactgtggtttgaggaatgagactactatgctcacagcgccacctagcatcaacagaaagggaggcccatggcaaacttaataacaagaggcgggaaaaaaaaggtgaggcccaggaaccggaaacttaatttgagcaggatttttcttatatttatttaaaaactaaaatattggccgggcactgtggctcatgcctgtaatcccaacacactgggaggccgaggcgggcagatcacttgaggccaggagttcaagaccagcctgggtaacacggtgaaaccctgtctctactaaaaatacaaaaattagtgggcatggtggcgggtgcctgtaatcccaactactgggaggctgaggcaggagaattgcttgaacctaggaggtggaggttgtagtgagccgagatcgcgccactgcactccagcctgggtgatagagtgagactctccctcaaaataataaaataatattgctgcaggggtcagtggtgaaatgcaatccataaccattcccagtaaacactcagcgagtcctggcccatgcccacttttcctgtcatttaacgcaagggttaaatatcaaagtgaatcccattatgctaattgatttacaaatacggatgtataggagtgtgataccctgagcgcaatcatacttcggatataactgtaaaacgacttcagctgactttgcagtgttgcagtgtcacattaaaccctaagttgtttgtgtttccctacacatcactctccaggagcattatagttcagaagattagagtaatttcttagactaaagccttgatgggttattattacataaaacgttttccactctgatggagaagtcaggtgcattcgctcatgtctccgtggcagggccgggactcctggtcccccgcgattctgagcggtgcctcacagcctaggtcctccaacctcacagggcggcccgcagcaaatgcgccactgtccggtgcggccaaccagctcgtggtgcgctgtgggaaggtcacaggacggagctggggggcgggggcggcggtgggggcgggggcggcggcgggggcgggggcgggggcgggggcagatcctatttgcgcctgcgcgggactggaggattcggtgttgccctttccccctgctatttccgtttccgcgcttcaagcggatctcttccggttatggcgcccgctgggagtgtcttatcagccgcttataccgcggaaactttaacctgcgttttcccgtaaaattttcctctctaggtttcgtatcattgtcttgtttcttactcttgtattaactttgttttaacctaaggtttctctttcccaaaaactgtggtgtttctttacaacctctttttatagttatataaacattgcaagaaccatgattttatattcttccttttcagtattaataacttcaatgtcttttttggcatttgtctgaaaatttgaaatatttttcaatttactgaactgattatcgttttgtaaatatcggatactactttaatcatttgtgtattggccttaagattctctatttttaactcttccaccaacatacctttaatctgagaggtgttgtaggggcttcaagatcaaactttccccacagtctctattttcattataaaataccgtgttttaagaaaaaatgtacaaggttgaaagaagtttcactactacgtgttttttttttaatttttattttattttattttattttgagacggagtctcgctctgtcaccaggctggagtgcagtggtgcggtctcggctcactgcaacccccgactccctggttcaggcagttctgccgccgactccctggttcaagcaattctgcctcaacctcccgggtagctgggattaccggcacatgccaccacgcccagctaatttttgtatttttagtagagatggggtttcaccatgttggccaggatggtcttgatttcctgacttcgtgatccacccgcctcagcctcccaaagtgctgggattacaggcgtgagccaccgcgctcggcctctactatgttttaaaacagtggctaggtcatgcttttctgtgtatccttacttcccttattccatcacctcatccatcactttacaactgatcatacaattacaaaattattttactaatcagattaaatgtgtgccttccatttgaagaagaaaggtctactaaaggcttagttttccctaggacactgggagaatacaggatctggtttccagtgccacagtggtgatcacacaggaataaacgggacacaggtcagacaacagccagaaagtcatctgccagtatatgtttcctgtgagatggacacctggtcccaggtcagacacaggtgttagagtgtcagctaggtaaaagaagtaacctgaaagagacacgctgtgaacaactatgtccacctccccttcatttcctagtattggagggctgctagctgctctgttactaggacccagatttagttggggcctctcagaacaggtcagaattgacctatgcacagtacctgtgggagtctggatgagggccatccactgaaagttagtgaatcaaagatttaagattgatctaaatgcaaatagatctgtgtcaaacgactatacgcataattgccttattttatacttattgaaaaaatcctcgtaaaattataaaggcataagatttacttgttatgaaaatgaaggcaataatgaacgtaattcataagtgaatttgcaaatatcttgaaattccaattctgatttttccaaattagattttgattcagagtcatcgatgtcttcacaccaccctctgtggcatgaacagagatggtaatgaagcatttcttagaaaacaaggctggaccactgtctgtgtgatttccacctttcttgctgacaccattctgcatgttttgatgtaagtgatgttaccagaaggaaacagcagaaggttgcaaaacaagtgcaaacaatgaaagccatgtcatggctgccaacaggctaatagtgattgtaacaacacttgacaaaataatttttaaaaattattcaaatatgataactaataacgatacagaattatcaagggaggtccaatttttttttttgtctgagacggagtctctctttgttgtccaggctggagtgcagtggcacgatctcggctctctgcaacctccctgacccaggttcaagcatttctcctgcctcagcctcctgagtagctgggattacaggcggctgccaccacacccagctaatttttgcatttttagtagagacggggtttcaccatgttttttggccaggctggtctcaaactcttgacctcaggtgatccacccgccttggcctcccaatgtactggaattacaggcgtgagccactgcacccggcctaagggagctctattaatggagctgaatctatgaaacaagaacatcttccttcatcaagggagcaaaactgtccagaaaaaaagtacagatgaggtagaaggagcctggtctatgtgttcatctttgtggtggattgagaatagggaggctggagaagaggctgagggggaagtcagggctcactcctgtcctaaaagcaaaagggagcaaaagaaccatgttcatcttcagattcacacattcttcactttgaaagaaaatttaagtttattaggaaaccatatctgtgaggagtttttattttttttttgttttctttttttgaaacagggtcttattttgttgcccaggctggagtgcagtggcatatacactgttcactgcagcctctacctcctgggccctagcagttatcctacctcagcctcccatgtagctgggaccacaggcatatgccaccaagccctgcctattttatttttttgtaaagacgtgtctcactttgttgcccaggctggtggggggaagttttagagattcattaaataatttgtgaaatttaaaataaaggaaaatattctgttttgggttttgcccagtgcatgtttggggctcataggtgaacaacatggacaaaataacctctgatatttcagtccagtagtgattcaaggactgtaacccaaatctcaaatgtaggagttttgggttacaaaacttttgggagctgagagcacaggcatcagacctgaaatggaatggacaaggaaggcctctaggaggaggaacattggaggaggttctggagagcgtggagcagtgaatctggcaaacaggagaaagagaagaggaaaaaatgtgtctgtggcacaggccagggcatgagaaggggacagtggattagaaggactgctgggattagcaacatgtaaggagggcaggagcgggaagggcagaccatggagaggctgtgaaggggagagtgggcaggtcaggaagtgacacagggccggccagcccactaaggaatgcatttgttgtgctggtagttcaaatatcagtctcgttccttgcaacagtacctccaggtcaagaagagtgaggatagcctctgtgtctgaggaggtccctgtgcattatgaggaattggttctaggaagaagggagagtgaagaggaacagagaggaccctccagatccagtacgggccaactaagggaacttggatgctcctgttcatgtccctttctccatcactgagactcgccccatcccaccctgaatgcaggttcctttcccctcggttattttgtgcgtctcagatgatgacatgtattgtaactttattctatcacatatgacttttacattatatcatagaaaaagttacttacataaattacttaatggtggattagtcatagttaaaatgttgtcagcttggtaaacaaatgaaattatcacactttagtttttcttcgttgatcatttatgaagattagtgtctcctcatttcatggatgtcacaactacatgttcttaagtaaggtgtatgcttggggtgttgtgttttccctgttaatgttggatactccagtgttcagcaaactataaacctatcaacacacatttgaaaaatccagttgttttgtgttttatttcgtgtatcctgtctttacaatattatatcttttcttctgcttacttgaaatttaatttgctcttctttttctaggttcctaagatggaaacttaggcgatcattgggcatcatcatagggtctacctgccaaatcaggtcttcttcattctgcaaaagtttctcagtcaccacttatatttcatgactttgacccttgtgaaaataccagtcagatatcttgtggaatgtcccacaatgtgtatttgtctgatggtttctcataattagactagaaacaatgtgtaaattaaacatatttttccaaattagaaaacaagaaaaacagaataacatattagttagaagtattaacatagggctggacgcagtggcttatgcctataatcccaacactttgggaggtgaaggtgggcagattaattgaatccagcaattcagcaattcaagaccaatctgggcaacatggcagaacgctgtttctaaaaaaaatgcaaaaaattagctaggtgttgcagcatatgtctgcagtctcagctactcgggaggctgaggtgggaggattgggagggtggcctgagcttgggaggtcaaggttcactgagctgtgattgtgccatagcgctccaacctgggcaagagagtgagaccatatctcaacaaaaaagagagaaaagaaaaaataacagagaaaaataatttttaaaaatcaggtaatgacaaatagggaattccaaatatattgctaatggtctgttaagcttgacagtgcttttagaaaacttgttctgtttagaatagtgttagactcacagaacaaattggtaatataaagagtttacatataccacacacagttttccttattataaatcttaacattagtgtgttacgcttgttacaattaagaaccaatgttaaacattatcattcactgctatccatgctttattcacatgtccttaatttcacttaatgtccattttttgattctggaatcccatccaggatgacacatcatatttagatgtcattcctctttatgcttcataagctgttgacacttccttcaactttcctggtctttcatgacattgacatacttcattaggaagttgtctgattttttttttttttgagatgactctcgttctgttgcccaggctggagtgcagtgacgcgatctcggcttgctgcaagctccgcctcccaggttcacgccattctcctgcctcagtctcccaagtagctgggactacaggcgcccgccaccacgcccagctaatttttcgtatttttagtggagacggggtttcaccgtgttagccaggctggtctcaatctcctgacctcgtgatctgcccacctcggcctcccaaagtgctgggattacaggcgtgagccaccgtgcccagccataggttttcaaaaggaggactacacagggaaattgccattcttatcacatcataccaatgttacatactaatagcatgtcatatcatgttgaccttaatttgattacctatttgaattacttcttatcagattcttccactgttaaattgctatttgttacacttcctgtgttgtacttttgaaaagaagtcattaggcttagtaagaagtgggaagtcattcttcacctctttatgggaagagtatctgcaaaaataatttggaatccttcaacatgtgaaatgtgtcagttttcctccatttgttttatatattttttcactcatttatttatatcaatatgcaaacatggatctttattttacacttacattttactagtttattttgttgttcaaaattttctactcttggctattggaaggtcttttaattggctactatatcattttcgtatacacactcctagtataatggcatgaatccgtttatgaggctaaagccctcaaggcctaattaccttttaacagccccaccttttaatactgctacagtggcagttagtttccactaactgtaggggacaaaaattcaaaccatagcaagaacataccaaaaccatttttaaaaacaataatgcatttatttctgcaaaaaatggccataaagggccacctttatatgtgatcatgtagatcaccctctatatgataaggaagacaaatggagaacgaattagatagagaactgttgtgaattaaagtattaggtttggaatacaactttttgggttgattgctcatatttcttagaacagaaattctcagtgtacaactttaactctgaagaaagctacccatccaatgaagaagtagcaaagtgactgtttgccatttctatcttccttctcaatagatttattgaaacatagcatatacatcacctctccacatttgttgtacttttgttatttctagttcattcttgaggtttctctttaacacagcgactattaattctagcccagttggccaggagctgtggctcacacctgtaatcccagcacttgaggttgaggtgggtggaatgcttgagctcaggagttcaagacctttgggcaacatggtgaaaccccatctctactaaaaacacaaatttagctgggtgtggtgatgggcacctgcagtcccatcaccatactcgggaggctgaggcaggagaatcacttgaacttgggaagcagaggttgcagcgagccgagattgtgccactgcactccagcctgggtgacagagcgagactccgtctcaaaaaaaaaaaaaaaattctagtgctgctcaagaagcctctagaagatttgttcatggatgtttacattgtgcctttcagggtacacttttttaaatcttattttacagccaaatacataattatctgatttgtcagtggttttattctccattgtgaaatgtaaagtaatgatgcaacctataattgatgtgaataatttattttgcaattactatttatgtcagtatcagcaaatactacattcatttgtatagatgatattaatctacaggttttatggattattagttcatttcatcctcacagcatctcaagaggtcggcactagttttactcccaatcacctagtgaatttgatctaaagccctacaagaaaggaatggatgaaacttgattttgactgagtctatctttgaagtctttacttacatcacgtgttttagaatatctttttttgtatggaaaacacattctaggaccggattaagaaatgttactctagggccaggcgcagtggctcatgcctgtaataccagcattttgggaggttgaggcaggcagatcacgtgaggtcagaagtttgagaccagcctggccaatgtggcaaaataccgtctctactaaaaatacaaaaaaattatccaggcatgctggcgggcacctgtaatcccagctactcaggaagctgaggcaggagaattgcttgaactcaggaggaggaggttgcagtgagccaagattgcaccattgcactccagcctgggcaacagagcgagaatctgtctcaaaaaaaaaaaaaaaaaaaaaaaggtattctaccccggaagtcatgttcccaaattagatgtaaatcctgtgttaaattgatttaatatttaggtctaagatccacctaggaatgattttatgtgtaatgtgaggttatagatcagattttatttttccctgtggatatatttcttgaaatatttatagaaaaattcacatttccccaattaatcttataaattatttgtgtatatatgcttgtgtctgatttgctctctcctttttttttccattggtttatttctctgtgaaaatatcacactattttagtaagacacttcatttaacacagaattttctctctagggccttctcttagccaagtgtgctattatataaagaagaaagagtgaaaacctctatgccttgaacctacaccaatattctcagttgtcccttgaataaagagcagaatttagaactcactattactgatgacacttaggtctttaatgttcttgtgaatcttagacaacccccacaacatcattccctgctttatttgcttagtccattcttggtggattttatgagatgtcaacactcctcattaggattccctccttctgaagcctttgggattttctacccacccagcaaccaccagaggtggcagaaacccctgcagacatccttcttgcgcaagcgcagttgtaccatgaatgcggtcgtcctgctgcagaccacgcccaccaagggcggggccacatccactgcagctgagctcagagccttctgtggggtctgcagtggcaaggccagccgccccctgtcttccctctggagctgtttgaggaatgcagttcttttgcataagaaaggcttttctctccagtcattctgcttgctgatcaagaacacttaacagcttcaggctttcctggtaatattcattcttgcttttgtgtttttgttttaaggtccaaatatctttaatacttgtatgcagttttcttttttataatttcacataaacatcatctaaaaccaacttcgcatgttcgcattctgtattaacaactttcgtttttgtatttaaaaatacattcataatcactttttcaaaatatcttgtcagttattttcatcttttccatgatcattctttaccagtgcaatggaaatattacttttattaggaaaagcagatgtcacgcggtttttagtgttgtcgagaaatttcctatgaaacatctctggttgaaaaggagaggaacaaaattttatgtgaggcacaagatcacatatgctcagaatcgcatgctttaataaaggctgtgattatttgcattatattgtttagcttgttctaattgtaaaaggtagacaaagaattaatttgtgtagacagaacattgcgactcccattctaaatgtagagacagtcactgcactgcgcaaataggaatgtcgtcatgttgtttgcttttctccttaccccaaaactgtagacattggctagagtctttgatttttttcccaacttgcttttgtaattgtcggcatgatgtttgcacagataaccaatgatatagatatatatttttttcttactatttgatgaatgattaatattttgggttttttttatgttttcagtgaatcaaaaatatcattcagaaaatgttgtcatccatatccaggtagcatatagttttataatctgatcttgtaataaggaaattacagtccttattgattttctgttattagttagcattttttaagttttcatgcttgtgagtatttgggaatttttttttttactctgtcaataatttaacacctttgtattggtcatctgggtcgatgtctattgtttaggctcaacctttgacactcctctgaggtagtttttatgtgaatttgtaaccacccaagggattcaccttgccagctgtctagacagagccgatttatcaagacaagggaactataatagagaagcaagaattcacccagagccggctgtgcaggagaccatagttttattattactcaaatcaatctccctgtagggggatcaggggtttctaagaataatttggtgggtagggggtcggaaagtggggagtgctgattggtcatgttggagatgaaatcatagggagtggaagctgtcctcttgcgctgagtcagttccccggttggggccataagatcagatgagtcagtttattgatctgggtggtatcagctgatccatcgggagcagggcctgcaatagatctcaagcactgactgagcttaggtttcacaatagtgatgttatccccaggagcagtttgaggcagtttagagtcctgcagtctccagctggatgaatcctaaaccgtaatttttaatcttgtagctgatttgttattcctacaaaggcatgatggaggggggttgttttgggaaagggctgttactgtcttcatttaaaagctaaactataaaccgaattcctcctgaagttcgcggggaatgaacaagggcagcttggaggttagaagcaagatggagtcagttaggtcagatctctttcactgtaataattttctcagttatgattttttgcaaagatggtttcaaattgatggcttagtgtcctgggtagtgaaaatggaattcctcaacctgaattgaacatggatttcctcctgaagaaacaatttagggctccaaaaagtaaaccaggagcctggcacagtggtcacacctgtaatcccagcactttgggaggctaaggcgggtggatcataaggccaggagtttgatactagcctggacaacatggtgaaaccctgtctacttaaaaaaaaaaaatacaaaaattagccgggcatgctgatatgcacctgtaatcccagctactcgggaggctgaggcaggagaattgcttgaacttgggaggctgaggttgcagtgagtcaacatcgagccactgcactccagtctgggtgacagagaaagactctgtggggtatgatgaggcttctcttcaaatagcctgatcaatcgtttattctttaattaatagtaacccccacccccttttcctttttctcttttttctttctgcctttgttgcatgcccggacatgccacagtagcaggcttatcagtaccagctcacattcctttccttatttggaaaggagactagctctctagctcattgcagacaccccttccccttttcccctctctcccttatgtgcccaccttatctaaagaaagttcaattgtctagccaaccaggattagttcagactgtgcgacctgacctccaccaatgggaaaagggtacaggggcaggacttggggcaggaataaagactcttgtgcccctttgttctggtgtgctttcatggcgactggccaaggagaagcacccctctgcgcagaagtaaaattgctttgctaagaatcctttgtttgagtgttcaatctcccttaggattttgagcattattcccaaccattcaatccaaaaaaaaaagtagaccaggattgatttagggcctgtattataaattgtacaaatgccaacaagattgtattccactagaggaacgcattctctagtgaaggaagcattcctgcaggatgagtccctgagactcactagcaaatttcatacaagtaatgaaatcctcagtctaatggaataaaaacaattccaggggcatttgttaaagatgtataagatgtgagaaaccaacagactaacagcattgatactttatggatatttttattccaaattaatagatgtgttacaggaaaagggtcctgatccagaccccaagagagggttgccgatattcagggccagtctgcagagtaaagtgaaagcaagcttactaagaaagtaaagcagaaaaagaatggttactccatagacagagcagccctgtgggctgctggattcccattttcatggttatttattgattatatgctaaaccaagggtggattatccatgcctcccctttttagaccatataaagtaactttctgatgttgccatggcatttgtaaactgtcgtggtgctggagggatgtagcactgaggacgaccagaggtcactctcgtcaccatcatggttttggtggattttagccggcctctttactgcagcctgttttatcagcaagatctttatgacctgtatcttgtgccagtctcctgatgtgacttaaaatgccttaaccatctgggaatgcagcccagtaggtctcatcctcattttacccagccctattcaagatggagttgctctggttcacatgcctctgacagatggacatttgtttgccaagcaatgctgcaatcaggggctctggatttcagtcctccatacagagaatgtcaagggcagaccttaataaaaataaataaatgaataatcaaatttttaaaattacctctttcattcttttattgtattatgatctgacaccattaactttaattttcttgcatatggagagcaacttgatacaaactggtatttatttagtgaagaaaagagataaggtgattcccaaatttaaaggaaactggaagttttgtgggaaacaaatggaggagataagacttactagtttctacttattttaatgagaattgtgttgttcatttataaatacaaagctccatttaaattacagatgcttttgatttatgatgaggttacttccagataaacccatcacaagttaaaaatgtcatcagtcgaaaatgcattgaatatacctaacttagttaaaatcacagcctagcctatcatccttaagtgtgctcaaaacacttatattagcctaacgtttgggaagatcatccacacaaagcctattttatcataaagtgttgaatatctcatgcaatttattgaatactgtactgaaacagaaaaacagaaagattggacactcaaagtatagtttccattaatgtgtattgcttttatttaatttaaaaattttaagttgaatcatagcaagtgaggaagcccatatattataaaatgtaataagtttaccagccacaaataacaacaaatcataggaaatgcagggattgggttgaggtgaggtggttcaacctattatacccatttccttcatctctaatgggctgcccttcatccttggggttgttgcagggtggctgtgcagtgcaaagggcacacaagaattgcttgaacctgggaggtggaggttgcattgagctgagattgtgccactgcactctagcctgggcaacagagtgagaccccatctcaaaagcataaataaataaaaggataatatctctgtcaaagtacagtgatgcattgcttaatcatggaaataccttctgagaaatgcattgtttggtgatttcatctctgtgcaaacatggagagcattacacaaacctagaaggcatagcctactacacatccaggctacatggtacttactattgctcccaagctataagcctataagcatgtgactgtcctgaatactataagcaattgtaacacaatgataagtatttaaacatgtaacctatctaaacatagaaaacataaaaagatggtataaaacaaaaaatattgttcagttgtatagggcagttgccatgcctggagcttgcaggactggaagttcttctgggtgagtcagtgagtgagtggtgagtgaatgtgaagacctaggacattactgtatgctactgcagactttagaaacactgtaaactaaggctacacttaatttattaaaaactaaagtaattgtgctatggcatcgtgacagctttgacatctctaggtgataggaagttctcaggtcaattataaccttatgagagtaccctcctatatgttgtctttccttgacagaataaaatatcattttgagagccatgactaataaacacataagagtcgatttaatatttattttaaaagcccttccatagttataaaagcataagttttagtcacatcaaaatataaacaatcttgaaattaattcataagtaaatcaatagatatcttgaaattgtgcttatgatagttctaaaccagactttaatgcagaatcttggatatcttaatcgcactgtgtggcaggaagactgatggcaataaaacatttcttaaaaaagaggctgcagcattttctgtgcaatttgcaccattcctgttcacacctgttctgtaagtgttgctgcaggcgatcctgtaagaaatgacagcgggttgcagcgcaagttcatgcaaacaatgaaaagcatgtcatggctaccactaggctaacgctattgtaataaaatttgaaataaaatagactagaaatgatgaaatatgagaacaacattggaaatatttatcaagggaaccatattaatgtaagcgaattttagagaacaaaatacttttcctaggtctgcaaggacaaaactgtccagaagaacagaagagggacagatgaggtagaagcagcatggcccatgagaggggctctgcagtggattgagggtggggaggctggcaaaaaggctgggcagaatcagggctcacatcctgacctgagaacagaagagagcacaagaaacaggttcatcttcaggcacaaatcctcttcagattgaaagagagatggagtgtctagggaagtaggcaagcatttggggaaggagagtcactgattcattagtgaaacacaacaaaaaaacaaaatcttctgtgttgctgtttgtccactgcatgtgtggggctcacaggggaacaacatagacaaagtttccaaattctcaggtgtttaagacgagtgaggattcagaaaacttaacagaaactaaactgcaagtgcaagagctgcccttaggaactcaggggacaggcatcaggcctgggatgggatggacaaggggggccttcaggaggaggagcattggaggagatgctgaagagtgaggggcaggggatccaccagacaggggaggtaaagggaagaggaaacagtgtgtctggcacagttcagggcatgagataagggcagtgggttggaaggatcgctgggatgaataatatatgaggaggcaggagcaggaaggacagaccataaagggcctgagcaggggagggaggacagctctggaagtgatgcagaggctgctccctgcggactgccttctgtggggaggagttcgaatgccttttcttcttttaagtgttactcacaatccatgagatctactgacaaggaagacagttggaacaagtaagaatagtccttgtttgatgggaaggagcagtagcattaccaggaggggttggtgttggggaggggcaagggtggggaagggcagagaagtttctgtcccctcagccattttgcagatgtaggttggatcactggatcacaaattcacagtggctggctcatggccaccttgcatcacagggtgagagcagcctcacaggaaactgcagataaggggggttcccagctgcacagaagaaggacagcaggtaactttcagtcaaggttggcagggggctgcagaggtggcagcaatgatggtggtgggcagtgtgcagccttgtaggccactgtctccatggacatacagatttgcacgcatctgtgtctgcgtgtcctctcggtgtgctgacattcttacaaaatcctcatgaatttctcattgttctgagaccataacatgtattttgacttttttctaccacatgtaccctttcatgtgtacctagcaaaattgaccaaaattccttattggtggattattcatagctacagtattttccaacttaataactaaatgaattgccctgctttgtatatgtttgcctaatcattcctgaagattcatgtctcctcatttcagggggagccacccctgcatgttcataagcaggagttcagtttagggtgttctgttttcctagttaactgtggacacatctgcgttctggaaactattaaactctcaatactcatttgaaaattccagttactttatcttttacttagctttcactttatttacagtactctctcttttctcctgcttactttggatttcgtttgctctacttttaagtttcctatggaggaaatttagattatcgatttttagatgttttttcttttttaaattttatttatttatttatttttattttattattatttttttttttggagagggagtctctctctgtcgcccaggctggagtgccatggcgtgaactctgcttactgcaagctccgcctcccgggttcacactattctcctgcctcagcctcccaagtagctgggactacaggcgcccaccacaacgcccggctaattttttttgtatttttagtagagacggggtttcaccatgttagccaggatggtctcgatctcctgaccttgtgatccgcccgcctcggcctcccaaagtgctaggattacaggcaagaaccgccgctcccggcccctcttcttttctttttttttttttttttttttttggtggaattttgcttttgtcacacaggctagaatacaatggcgcaatctcggctcgctgcaacctctgcctcccgggttcaagcgattctcctgccttagcctccctagtagctgggattacaggcgcccgccaccacgcccagctaatttttgtatttttagtagaaacggggtttcgccatgttggtcaggctggtctccaactcctgacctcaggtaatctgcccacctcagcctcccaaagttctgggattacaggtgtgagccactgtgcctggccaatgtttttttttgtttgtttgctttgtttttaatagatacatttcccccctatgctccctcactgcattctacaaattttgataagatgcattttaatttaaacttagttcaaaatgttgtttaattttctcttgagatttcttgcatcatgtgttatttaaaagtgtgttagttaatctccatgtattttgaagtttaccagttatgtgccttttattgatttctatcttaattttattggggttttagggtatatatttgttaacataaaaatcatgagatctataaatttggaaagaaaaagagctataaatattcttgaaggtagccctacagcatgtatactgaacaaacatgcacgtaacctatgacccatgttcaccttggtgtggagactgagcttttttttttttttttttgagacagagtcttactctgtcccccaggctggagtgccatggtaccatcgtggctcactgcaacctctgcctcccaggttcaagcgattcacctgcctcagcctcccaaataactgggattacgggcacctgccaccatgtccagctaatttttgtatttttagtagagacagggtttcaccatgttggccaggctggtcttgaactcctgacctcaggtaatccacccgccttggcctcccaaagtgctatgattacaggtgtgagccaccacgcccagctgagacttaacatttaaatgtattacagttaggccctacacacaaaagcccctttcaggacacaaaggcagacaagtacacaatctctagaaaccagtcagacccagtccatgtttggtgggctcttatcaggagaaagttactgaaatcagtctcttgtgcaatcaaggctgtagcgatggctgttggaacagaggctggagttagcgtctggcggtggatgagctgcaaattgttttaagattgtttatgtggaagtcagtgcttgcttagctgctagagaaaaagataaacctcctgtcagttagaacatagtttattcttcaactataggggtgagtgacttaacccttgcctgtcatggccttaggtcttatttataatttgatatcttattgccaccaagaagagttcattccttcattcttatgatctctattttaatatgaatgctggtcagttgttgtgtctaaactgcaaaagagacagatgataacgaggcatgtcccacttcctgtcccatcatgactggaaactcagtttgtatggtttccctgcggtcctgtctgttcagtcagttggggggcttaggattttatttttaattctcatagaggagtgttgaagtcaccgaccgtaatagtggattcatctatttttcctgttttaacggtttctgcctcgtagttttatgttctgttgctacatgttagaattattatatcttcttggaaaattgaccccactattattatgtaatgcctttctatttccctgataatttttctgactgtatagtcagctttttctgaaattaatatagctactcctgctttttctatttgcttgctatattttgttccatctatttactttcagttaatatgtctccatttttattaaataacagataaaatgagatgtatgtactatgtataacatgaggtttgaataataatgtgcattgtggaatggctaaatccagctaattaacatgtgtattacctcacatagttatcatttttgtggagagaacactttctatccactttttaagcatttttttaaatagacacaggctctcgctctgcacctaggctggagtgcagtggtttgatcacagctcactgcagtgtagacctcctgagctcaagcaatcctcctgcctcagcttcctgagtagctgggactacaggtgcacaccaccatgcccagctaatctttagcgttttaaaaataagacttatgtttttaactagagaaaccatatggtacaatagatctcttgaaattattcctcctctctgactgaaattttgtatccatccacaaaacttctgcccaaccccaccctcaaccccaggctctggtaactaccgttctacatccccacttgtatgaaatcacattttttagatttcacatgagtaagatcttgaggtatttatctttgtatgcttaacatttcagttaacataatgtactccaggttcaaccatgttgtcgcaaatgacaggatttcctttttatatgcctcagtagtattccattggggattatatatataattttctttatctgtcaacggacacataggttgattccgtatgtttgctattgtgaacaatgttaaacacttctcattgaggagtgttgaagtcaccaactataatagtggattcatctatttttcctgttttaacaatttctgcctcatagtggtttgaacactgctaaaatatacatgagtgtaggtatctcttcaacatactgatttcattttctttggatatatagccagcgttgggattgctagatcttatggtagttctatttttaattttttgaggggcctctatacttttttcgataatggctgtaccgattaacattctcatcaacagtgtgcaggggtttcctttacaacacctgttatctttactctttttaataatagccttgtaacaggtataatatctcattttgattttaatttacatttccctgtatctgtctttatatttaaataagttttttttttttgggggggacggagtctcactctgtcgcccaggctggagtgcagtggtgtgatctcggctcactgcaagctccgcctccctggttcacgccattctcctgcctcagcctcccgagtagctgggactacaggcgcccgccaccacgctcagctaattttttgtatttttagtagagacagggtttcaccatgttagccaggatggtcccgatctcctgacctcatgatccacccgcctcggcctcccaaagtgctgggattacaggcgtgagccactgcgcccggccttaaataagttttctctagagaacatatggttaagtcttgttttttgatccactccaacagtctgtgtcttttcattggtggttttgagccattgaaagtcaatgtgattattgataatagcagattgctatctaccatgtttatttctgcttttcatttgctgcccttgttctttgttcctcctcctgtcttccatttgtttgcttccctttatggttttaattgagaatttcatatgatccaattttctcttcttagcatatcattatattttctttttatttttaaatattttagtagttgccatatgaaataaaaactttttcatattttagttgatataacagataacagtttgttaaaaacaaaaattgtagccatttatttgatgaggtattcttatgtttatagtttgagtgtgtgtgcatgtatatgggtgtgtgtgtgtatatatatatatatacacacacacatatacatatgcatgaatgctcatatataaatgcaatgaatgacagcaatagtacaaattaccaaagtacaaatgactattgtttccttattataggcaactcacactacttgtgaactgatagagtgttatttgaaagggagtttgaattaactgtaaatttagggactggctattggattaagatcctccattccttggctggctgttgtccagaggctgcattcagctccttcccatgttggcttctcccacatggcagaatgctccatcaaagctacaaggggagagtttgctagcaagacagaagtaatgattttacatagcataattacccatgtgatgtaccttcagctgtgctctattctcttgtttcaaaataagtcaaggttgctgcccacacttacagggagaggattagaatgcaaggttgtgttcaccagcaggtgggaatcactgggtgccaatctagggtctgcttgctgtgtcagatcttctccaacctgcaacagtttctcagtgttcaattattttgtataacctgaattcttttgaaaagtaccagtcaggtgttttgtggaatttcctacaaaatggattagtctcatgggtctcattattacaatagagatatgcattaatttagacacatgtatgtgggtgttaagaaaaactgaacaatgtattacttagaaatacaaaaggagagaccaggtgcaatagctcacaccggtaatcccagcactttgggaggacgaggtgggaggatcacttgaggccaggagttccagactagcctaggcaacatagccagaccctatctctaaccacaacaacaaaaatttaaaattagccaggcatggtggtgcacacctgtggtccaagctactagggaggctgaggcagcaggatgtcttgagcccgggaggtcgaggctaaagtgagccatgatcacaccacagcgctccagcctgagctacagagtgataccgtgtctcaaaaaaaatggggatatgcactcaggggttttcaacaatattgacaaggtttggcttattatactgggaagggaatttataaaaaagaaacttgttaaattttagaatagtttagatatacacagcagttgccaagataatacagatcatttccttatgcttagcatatagtttcccttattattaatcccttacattagtgggtgatatttgtcacaattcataattcagtagtatacattatccttctctatgattcacattttatttagaatttttcttctaccgaatgaacactttgtgttccaggattccctccaggagaccacatcacatttagaaatcccatctcattaggttccttctgcctgtgacagtttctcagactttccttgttattgatgacattaacatccccaatttgggatttctctgacatttttctcatgattatactggagttgggtttggggaaggaagatcactgagagaaaatgtcattgtaaccacatcatatcacgggtgtctactatcaacatgattcatgcctgttgatagcaatttgattacctggacaagttagcctttgtcaaatttctttactgtaaaattatttctttctccactttccctgtttcactttttgaaaataagtcagcatacatagcacatacttaagaacaagaaagttatgctctacctccttatgaactgaggacctaaaacaagagttgagaactctttactgtatacagttggcctgttctccaccatgatttcataccatttatttatactgtattgaatatgatatgaaattagatatattcagttcacatctcccttatactcctttatttcatagctcgaattgttccattgttggccattggaaggtctctcagttggctcccatatcattttgaaatagccacattattttggttagattttgcttgtttggtggttcaattgtaatgtttcatagtttcttactttcaggcactacagggtcctccaggccaattgtgtttatttcgtgcccaagcctggtacccatcatttcttcaagggtcctagtttcttttattggaaaatggcttttaaaacaaagatacagacccaggtatattcactgatactgggtcatctgtcgatttgaggagtagtcagctgacaaaacaatgaaacgtacctgtgtatactaacccacacatatacacatatgtgtaaatatttcctcatatgttcatatataacctgattaacttaaacataaattcctactaatgtctccagcactacatgaatataatataacttgaatcaatctccccattcccactacttggttgtaacccccactctaacagtgagtgagttggccttgttaacttaatcaccaagttagaggctacatgcatagtggcttcagaattgttcatccacactctcatgaagaacaacattaccaactaaagtacagtgctcatagacaacttcttggacctttagatgcagaatcttcactttgtacccaagttacttaggtcagttctttcccccgcctcccagcttcctttagtgaggttatatcatacatttcttattcatttttcttattttctctgtattcctctatgggatccctcaacctacaaataattattttctctgtattcctctatgggatccctcaacctacaaataattttttttttttggttttttgtttgtttgtttctttgttttttgagatagagtctcactctgtcacccagcctggagtgcaatggtgtgttcttggctcactgcagcctccgcctcccaggttccagcaattatcttgcttcagcttcccaggtagctgagattacaggcacgcaccaccacgcccggctaattatttggtatttttagcagagatggggtttcactatgttggccaagctggtctcaaatacctgacctcaggtaatccacccacctcggtctcccaagtctcccaagtgctaggattacaggcgtgagccaccatgcctggcttacaaataatatttttaatttccgtacatttaggttcactgtttgtattataaagttatgcagggtttcaaaaacaatatgatgtagcgaccatgcaggaagtttttattaccctaaagaaattccatctacttcacctatttcactgtcctccttggagagtccctagttagcattaatctgtttactatctctattattttacctttcccagggtgtcatatacatggaattgcacagtctgtcatcttttcaaactggcttccttaacttaaaaatatgcctttaattttatgaagtatatcttacggtgatttagatttgcattgctgaaggactaatgatgtcaatcatctttttatgtgccctttggggatacatattctttgaagaaatgtctatttatacaatttacccatttttagttggtatttgtcttttattttttgagatgtgacaatcttttatatattctgaacagtagaccctcattacctatatgactagcaaatattttgtctcttttttttttgagacaaagtctcgctctgttgcccaggctagagtgcagtggtgcaatcttggctcactgcaagctccgcctccccggttcacaccattctcctgcctcagcctcccaagcagctgggactacaggcgcccaccaccacgcctggctaatttttttgtacttttagcagagacggggtttcaccatgttagccaggatggtctcgatctcctgacttcatgattcgcccacctcagcctcccaaagtgctaggattacaggcgtaagccaccacgcccggccttttgtcctctttttagggttgttttatacttcttgatagtatatgttgaatgacaaacattttaaaaaatagatgaatttatctatttttgcttctgttacttgtgttttttgtgttatatcttagaaaccattaatttcagaccatgaagatacatttttaaaataactttttttttgagacatgagtatcacttttgttgcccaggttggagtgcagtggcacaatctcagctcactgcaacctctgcctcctgggttcaagtgattctcctgcctcagcctcccaagaggctaggattacaggtgcctgccaccacactaggctaattttgtatttttagtagagacagggtttcaccattttggccaggctggtctcaaactcctgacctcagatgatccacccacctaccatacccagtcaaaaatacatttttttttggaaaatatagtttaggctgggcgcagtggctcacgcctgtaatcccagcactgtgggaggccaaggcgggcggatcacctgaggttgggagttcgagaccagcctgaccaacatggagaaaccccgtctctactaacaataaaaaaattagctgagtgtgatgaaacatgcctgtaatcccacctacttggcaggctgagacagcagaatcgcttgaacctgggaagcagaggttgtggtgagctgagatcccaccattacactccagcctgggcaataagagtgaaactccgtctcgaaaaaaaaaaaaaaaaaaaaagctgggtgcggtggcttacgcctgtaatcccagcactttgtgaggctgaggcgggcggatcacactgcactccagcctgggtgacagagcgagactccgtctcaaaaaaaaaaaaaaaaaaaaaaaaatagttttcctcattgaattgccttggcaacttttgcaatccatagaccataaatgtcagggttaatctttggacagtcacttatattccattgacctatatcactgtccttatgccagtaccacaatgtcctcattactatcactttatattgtttagaaatcccataatccaactttgttctgcttctcattaccagtgtggttcttttagatctcatgaatttccatatgaattttagaatcagcttaccaattactcccgccttgcccgcaaaaaaaaagcaacagggattcccatagcacaacgacatcactctgctggacagcaagagggtgtgttcaggaaccatacctagtctacaaagccatgggactacataccacagtcccagggacaaccacaaaatcaagactcttcttttgtttttgtttcttttttttttttttgaaacggagtattgctcagtcacccaggctggagtgcaatggcacgatcccgactcactgcaacctctgcctcctgggttcaagcaattctcctgcaaatattttgtctctctttttttttgagacaaagtctcgctctgttgcccaggctagagtgcagtggtgcaatcttggctcactgcaagctccgcctccccggttcacaccattctcctgcctcagcctcccaagcagctgggaccacaagtgcccaccaccacgcctgcctaattttttgtatttttagtagagacggggtttcaccgtgttagccaggatggtctcgatctcctgacctcgtgatccacctgcctcggcctctcaaagtgctgggattacagacgtgagccaccgtgcctggccaactcttctttttatggtctgaaatcacggagtatattctctacatctcattcctaccttcaatgaggaaattagttcctgggatctgatgacctggagtgagagatgcagctgatctagaccacatttctcacttctgagatcagaatagcaaatatgtatgtactagtaatttggacatttgcaattcaagaaacctcgcacctcccacagcatacttcattcactccatgagaaaaaaacaaactcacttaaatattcatcttcagaaaaaaaaaaaaaaggctgcccgctgcggtggctcacgcctgtaatccactttgggaggccaaggctggcagatcacgaggtcaggaaatcgagattatcctggctaacacagtgaaacctcgtctctactaaaaatacaaaaaattagccgggcgtggtggcaggcgcctgtagtcccagctacttgggaggctgaggcaggagaatggcatgaacccgggaggtggagcttgcagtgagccaagatcgcaccactgcactccagcctgggtgacagagtgagactctgtctcaaaaaaaaaaaaaaaaaaaaaaaaggcagagtggcagaccaaaaacgagccatatgtcaatctggagtaggagtgaccaatgtcagagtggaaaatgagggctgatgagctttggttctcaggctttagagtaaaggtggtagatgcaaaactgtctatccaccgtgggtttatactgataagtgggcagtaaatgaaagaatagtgtaatcagctgatgttagagtgcaccttttaacaacgttcaagtacagatgcatcttaaaattgacattgtaaaaacaaagtttgccagaatctagtcataatatggctgtccttgtctgcacatgcatgaacttgatctgaaaacctttgattgacgtcttctggtgatatgatcaccatcaaaacttacagagatgctgtcagtaggttgaataatctcataaataggagagtaggactctgtcaagaaatgtgatgtcaccaaagttcctgattagcaaagatgatgacaatgtggggtaaatcatggacagggtgtgttgaaggtgattcagaagagtttgatctgagtgacaggaattttaggaatgctgttgttagtgtattctgcttatattttccatctttgtcatcatagaagtgatataagactaatacctgcatttatagtagttgaaagtttttttcagtaataatataaaattgtaagtgataagatgtatttgtcctatagtctacgaatttattcctatattgtgacataaaataatgatgcattttacaattgactcaaataataactatttcaattccttagaaaacactgtatgagaaaatgctgacttcatgtttagtatagatgtgctattagtctacaggttttaagtattattagttcattcaattctcacaacatttcaagaggtaggcaatattaccactcccaagttccagttgtgaatctgagctaaagccttacaggaaaagagtagaaaaacctgagcttgactttgtctgtctccagaatctttgtttacatcaactatgttagaatatcttttctatgataaatacatcctaagtctagtttcagaaattgtgctttacacaatagtcatgaaattatttttctcaatttcaatctaaatgctacattaaatcgtttttaagttcaggtcaatgaaccatctggtgatcattttgtatgtaatgtgaggtcaaaggtgagatttttattccctcccccaccgcaacagaagaatattcaatttcctagaacattgatagaaaaatcaattttccccccattgaactttaatatgtatgtataagagttttccactgggcatggtagctcacacctgtaatcccagcaatttaagtggctgtggtgtgaggactgcttgagcccaggagtttgagaaaggcctaggcaacatagcaaaacactgtctctacagaaataaaaattttaggccgggtgcggtagttcatgcctgtaatcccagcactttgggaggctgaggcgggcagatcacctgaggtcaggtgttcgagaccagcctggccaacatagtgaaaccccatctctaccaaaaatacaaaaactagccagacatggtggcacatgcctgcagtcctagctactcgggaggctgaggcaggagaatcgcttgaacctggcaagtggaggttgcagtgagccgagactgtgccactgcactccagcttgggcagcagagtgatactttgtctcaaaaaaaaaagaaaaaaaacaaaaaaaataaaaattttaaaaataaggagtgttcaacactctttctacttgctaacacttatgcaggttcaaatcttgccttttaatatttgtttttaatttgtcttgcagactaatgtctttatcacttgtgtacattttttttcctttggccacataagtatcatctacaacccaaaatacatttctcctttatttaaagcacaagtcaagcagacgttcaacaaataggcaataaaaatcagattaaagatactgtaggtccaggagctgtggctcatgcctttaatctcaacactttgggaagctgagatggtggatcacctgaggtcaggagtttgagaccagcctggccaacatggtgaaacgtcttctctgctaaaaatacaaaaattagctgagtgtggtggcgtgcgcctgtaatccaagctactcaggaggccgaggcaggagaatcgcttgagcccaggaggcagaggttgcagtgagctgagattgctccactgcgctccagcctgggccacagagcgagactccatctcaaaaaaaaaaaaaaaaaagatgctgtagtaggaaatgtgcattactctgttgaaatccacaaaatgcatgagcatacaacccaaatttaagtggtaattgaaggtttcctcgaagaggcagtttgtgattgaatagatgaagaataagcagctgaaaaccatgtaaattagaactaataaataacaaaggatgattagtattgaggtagagaatgggaatgtatagaatgcaaaaaaaattgagacatcgcaaggagagcagcaatttcagtacacttgaaggaagctagaaatatataccagggctagatttttaagatatttaatgccgtgtcaatgtgttggtattttataattttctgtagttccagacattagctagggtgtgctcacttaggaacacagctgttgaaattgtaaaatgagaatttgggtctcatacatttgaagaaaaaaatatatggggtttaggttcagattctgtacagacaaaggaaaagtatgggtggggaaaatgtgagacagcctgaggtccaggaaaaatggccacagaaaattttcgtattttcagataaaatctactcttcaagttagacctccctacgaaagatgctagttcaataatgaattctccacctggaaaaggacatttcagctccaagtccaggttgctttcatgccttaaagtcaccttatttgtatttcagaagcacgtgctacactagctttagggaatgaagaaccatgtgctgacagtgccatctagcatcaacagaaacaggaaccaatggcaacctaaataagtacagaaaaaaaggtggggtccaggaaccaagaatgactgctgatttgagcaggatttttacaatttgttttaaaacttaaacataatgcatagatgctgtggaattaaaaaatgcaacctaggccgggcgcggtggctgacgcctgtaatcccagcactttgggaggccaaggccggcggatcacctgaggtcaggagttcaagaccagcctggccaatatggtgaaacatctctacaaaacacacacacacacacacacacacacacacacacaaacacactagccgggcgcagtggcgcgcgcctgtaatcccagctactcgggaggttggggcaggagaatcgcttgaacccgggaggaggatgttgtggtaagccaagatcgggccactgcctggcgacagagcgaaactccgtctaaaaaagaaaaaaaatgcaatctaataatgtccagcaacgatacagggaagcctggcccatgctcacttttccagtcacctgctcttaagtagtgcacgggttaaagaacgatgtgagtgctagtggctgattctttcacttacaaacatgcatgtacacgattgtgttaccatggacaaacacataaaatttgattgtaaaactagttgactcttaactgtgacacattaaatccttgagtaaatgagtgtgtgtttccatacatatattcagtaccactacagttcacaaaatgaacgggacttcttaggttaaagccttgttaagttattctttaaaacgctttccaatctgatagagagctctggcgtattcgctcaagtttccgtggcgggtctagggctcctgaagccccacgggtctcactgctacccacatggctattaccgcaaccaccgctgccacgcagcccgcaagaaatgtgccaccgttctgagcggccgacaaacccgcagtgcgctacgggaaggtcacctgacagttggggagaacggcagcccgcaggggccgatcttcggcgcgcctgcacagcgcaggcggaattggggcgccttttctccttccggtttccgtttccgtgcgccccgagggtctgttccgcttatggcgcccgccgggagtctccctttcttcgcaagcgttaacctgcgttttactcgtaaaaatttgctttctaggcttcgtataattgttctggtcttgcactttatgtgtgcattagccttgagtttgcttgttgttttcccatgaaaaattgtattgtatttctgtaacagcccctcctcttgttacataaacattgaccagtaattgtatatccttccctctcaatattaacaattttatcttttttgcgttctttgaaaaaaacgaaatccttttcaaaaatactgaacttgtcatttttaagaaatgagatactactttaatcatttctgtattgtccttaagattctttatatattctttattgtttatcttttccactaatatacctttaatatgagaggacttgtagaggcttcagggtcacactttcgaaacccagagttttagtatctccttatagaatatttgtaatttaagaaaaattatacaaggttgaattttcaaaaatatatttttaaaatatatttaaaaaagtatttttaaatatagtcctccggaatgcaaaaggacaatactactttcagctagtactttttaagtgattattttccgccacgtattcttttgaaattatgcatttaggccgggtgcggtggctcacgcctgtaatcctagcactttgggcggccgaggcaggcagattgcctgagctcgggggttcgagaccagcctgggcaacacggtgaaacctcgtctctactaaaatacaaaagaaattacccgggggtggtggtgttcgcctgtagtcctagctactcgggaggctgaggcaggagaattgcttgaacctgggaggcggtggttgcagtgagccgagatcccgccactgcactctagcctggaggacagagtgcgattctgtctctacaaaaaaaaaagaaagaaagaaattatacatttaattgaagctcagaaaatatatgtgtgatgttttctatgaaatgaaacattgtttagatgagaaaataaatgtaaaatgcatttgccttttcaaagcagcaattagtggcgaagtgtgaatacaaaaccagtcttctttctgcagagaccatgtctgtcacccttgtgctggaatgaacaacatcacatatttttttgtttgcatatggcctgagggtcaaattctgcccagcatgtttgctttcttttttaaataaatatttattggaacacagctatgctgttcatttttgtattgccgatagctgccttaatgctacaatggcagtagttgcaagagacagaatgacccataaaaccaaaattatatactctctagccttcctatcacccactgttctgtctggtgttggggcaattcagtctttggtatgctaatttggatgagattcacacttgggctgttggagaggagtgggtgaacctgttgagttaatcagcaactccaagaggtccatttcccaagcatctttccttccataacttcacagtaattttcgtttccttatgtctcctctggccaatatttttctacttctggggtaggcggtcagaggaaagagaaaaaaaggaaaatggtgaagttggacccactgtcttggacctatgacgactcctggcagagaaaggttttcccacttttcgtttttgttcttgtgaactccctgagcagccactgtcatgacaacatgatggtctgagaggtggagtagaagagattggagaaaagggcgacagagtgagaccttgcctctaaaagaggggggtggtggtggagggatgggaggaaagggggattcttcactcttgagttccgttttcaatcctcgaacttttcctggagcccgcagtctgcaccacagcctcacttctgggtttctgcctgtcttaaattcaggcctggggataagtgagtggtaaaaattaaaattcatcaccaatttagtagtacttcacagtccagtgttattccttcatttctgttactacttagtcctcaaacagctgttccatacattttatccaagttttatagctatattcagtaggagagacagggcagaaaatactttttctttcctgaaaatggaaccctaatgggagcctgatgaattttttaattgaagccaaaataaaaaaattaatatgtgctcataaattcatatttatactcataaaatatgacattcaacccaagttcttcattttaacacttacgcctttttttttgagacagagtcttgctctgttgtccaggctggagtggaatggcatgatcttggctcactgcaacctctgtcatcagcgttcaagcaattcttgtgcctcactaccgggtcttactacattgcccaggctggtctcgaacttctgggctcaagtgatcctcccgccttggcctcccgcagtgctgtgattacaggcataaacctctacaaattttaatctacaaaaaacaaaattatattcgctttacctgtgtgacatttgaataatgacggtccatgcaggctttacatttcacttttatgaactaaaaaaaaattgagcctccacagggcaagtcctctgctgtgcatggaagataggcaggtgttcaaagcatagaaaggtactgctgccccaggtaatgcagtcaagagggaattcaagcatatggaggtgattttcattgctatcaagagtgtggtttaaaaagtcacagtaagggctggatgtggtggctcatgcctgtaatctcagcactttgggacgccaaggcaggtggatcacctgaggtcaggagttcgagaccagcctggccaacatggtgaaaccttgtctctactaaaaatacaaaaaaaaaacaatgagctgggcatgggggtggacacctgtaatcccagctacttgggaggctgaggcaggagaattgcttgaacctgggaggcagaggttgcaatgtgctgagattgtgccattgcactccagcctgggcaacaagagcgaaactccgagagagagagagagagagagagagagagggagggagggagggagggagggagggagggagagagagagagagagagagagagagagagagagaaagtcacagtaaggcaccctagcagagtgaaacaaaaactaaaaaaaaatcgtgttccagcataggcctgagcatttaaaaatcgaagaaccgtggaaatattaacaattacataaagtgcatctagattttgaagtcatttcatgcaatattcatgagttctgggtttatcagttattcctcagctttatttggtgtatcagttttaggaatgtgtatgtataatcgtcaagtcttctatctgaaaggtaccagaacaaagcctggctttaggatcagatcctgggcaggcaaaagagcgctagaggcggaacaagatatccttcctatctgaagtggccatgggttttcaactgacagccttctcctcatccacttccaccttccccgatgctctcagaggtagactatgaaggcctctccctaaccactttctagctgcctcttcatatccttagtgtatcatttctccaagctgtaggtgtcctgctaattgattttgaatttttatgttcttctgtgtgcgaatgattaaatattaaatacaaaagtcggttcatttgtttgttttttccaggcttgtaatctctaactttcatttttgctacaaagcctttaaaaaaaaaattcagttactctagattcagattttaattaaaatttatttttgaaggtaaacatcttacataaaatttggctaaaagggaagaaaaaaaactacctaaagtttatgtggtcatcctacttgcaatattttagcaagcatgatttttatttaatgagtttcaaaaattttgacaatgaatactatcacagagactaagagtgtgtgatttcttccactttcatagcacagatgctcctcgacttacaatggggttatgtccccaataaacccatcataaattgaaagtatcttaagttggccaggcacggtggcttacgcctgtaattccagcactttgggaggctgaggcaggtggatcatgaggtcaggagttcgagaccagcctgaccaacatggttaaatcctgtctctactaaaaatacaaaaattagctgggcgtggtggtgcacatctgtaatcccagctactcaggaggctgaggagaagaatcgcttgaacccaggaggcagatgttgcagtgagccgagatcataccactgcactccagcttgggcgacagagcgagactccatctcaaaaaaaaaaatatatatatatatagtgagttgaaatgcatttaatatatctaatctattgaatatcattgattggcccagccttgagcacttaaatttgctcaaaacacttacattagcctacatttgggcaaaatcatcaaacacaaagtctattttataataaagtgttgaatatctcatgtaattcataaaatactggaagtgaaaaacaatggttgtgtgaattctcaaagttcagtttctactgaatgcttatcactgtcacaccatcataaagttgaaaaattgtaagttgaaccatcttaagttggggactatctgtactgtgaaattccaacttctggacagtcaagaaggaagccagtaaaatcagaaaccagcggctttgcagccaagtaagcagggaggccaagcgtattccttggatggtctgcggtgggcagtctctgccaggatgtgcccacttagcacacacagccctgtacatcagcctgcaggaaaggcaccttggccagagcctcgggctcaccctagagcactatagaaaggtcatctggctgtctgggaggacagtagcccacaggggctgaagctgggcacacccactgggtggctcagggccagttttataatccctaccccctcaacaaacacactccactcttgaccactgcactccaacctctgtccctgcatcctccaccaggctttacacctgcaattgcactttggataataacaggcatcattggcaatatcttacactctatcatttcagataaagccttgaaaaatatgtgcaattatatctgtgcttctttgtggatatatgttttattatattcactatatgattataataatattagttactactagtatttatcaagaatgtagggctgaagctgggcacagtggctcatgcctgtaattccagcattttgggaggctgaagcaggtgtatcacttgaggtcaggaatttgagactagcctggccaacatggtgaaacctgatctctactgaaaatacaaaaattaaccgggcatttatgcctgtagtctcagctactcgggaggctgaggcacgagaattgcttgagcctgggaggtggaggttgcagtgagctgagatcgtgtcactgcactccagctgggacaacagagccccactctgtctaaaaaaaaaaaaaaaaagaatgtagggctgggcatggtggctcacgcctgtaatcccagcattttgggaggctgaagcaggaagattgcttgagctcaggagttcaagaccagcctgggcaacatggcataaccctgcctctacaaaaaaaaaaaaaaaagatctatatacacacacacaaatgccaggcatggtgacacatgcctgtggtcccaactacttgaaaggttgaggtgggaggatcgcttgagcccagaaggtcaaggctgccgtgaggcatgatggatccacggcacttcagcctgggtgaaagagcgagaccctgtctcaaaacacaaacaaacaaaaagggtgtagtatattcctggtattgattgtgcttttcatagtttaaaagtaagacttggtgtaaaggtatgcattgtgtagtataaatgcacagagaggaaaggagagattgggtacaaattcaggaaggcatgaagtgttgatgtcatgacacttagcccatccttgctctgcacagaccacgtttctcaccactgtgctggtatgtagacaccagcatgatcttctgaagcctcggataatttggtgtggatagctttcttttggattcttttaaattttgttatcttaaagctttccatagtatttcatatggataggccacagttactttccatttactattatacttttatatattttttcttattttgatatgagaaacaatgttggaataatcatgcctagacataaataagccaatttcaaaatgtttgtaggggagactcatagtgttgccagaaaaaggggccctgacccagaccccaaaagagggttcttggatctctagcaggaaggaattcaaggcgagatgcagagtgcactgaaaagagagagtttattgaaagctactcagctatagagtagagcatcctcagaaagcaagaggagaaatgccttgtatttaagttttttttatgtaagtgtcttgtctatgtaaagactaaactaagctgtgtctacgtgcagatgggttgagagcatgacaaaatttactattctgttgatttaaagaaaatggtccttgacattttagtaagtacatcaaagccataactgtaagtaacttgaaagcatatattgttatgggtattgggacatctggattttgtgttgttgtaggagtgtatccttgcaccggtagcctaggtattgttaagctgtttcctcaattataaacatgactatgggttgtgaccagcaaggaatgtgccttagttaatctcaagatggagctgaacttaaaatgccattactttggctctaaccagctcctgcttccataacagtggggtcaaaaggtgttcctttaaaatcttcctagacactgccaaattgcttttggaaacttctcacctggtgagatggcatgagtatctttggctcatttttctacatagacttggaaacagttttatgtttataaaatatgtatcacctcatttataaatttgtttgaataatttaaccattttgcttttattagctattttgctactctctgttttccttgcctgagtctttcccacatctctgcaacattgtatcatttcccacacctaaaaccaaagagggacaggcaagccagtggagagagcagaggctgatgagaacgaaggattttccaggaaggaatctggggctgtgtgtgtgtgtgtgtgtgtgtgtgtgtgtgtgtgtatgtctgggtgtgtgaatattgtttttattagcctgtagcccacgtgttgcatggccatatttttactatcaggatataaaacacacttacacacagctgcatacaaatgcaatgagtttatttttcatatacatttcaaaataatagcgtgaacagaccagaactcttcttcaaagttcaagaatgtcctcatggatccagcatccgtctggtttctgtttctgcattctcagtacatagcctcacttctctttctccaattttggaggatgtgtaaaaaattttattcttaaccaaacattagtcaggctccggaacgttctcttaactccatccatgcactttcttgtaaaatgcagttttaacaagaacactgctaagttagtttagcaagacccccacaccttagacatctgatcaccttctatatcttatcaggttcctcatcctccaccatcccttaagtgatcatcccagcttgtcttcagcaagaatcctattagatcaatttagccagaatccctcttgcccctgatgttaattcttagtaattttccaaccactagtccccaccctgttccttggctataaattgccacttgcccatgctgtacttagagttacttagagttgagtctcactctctcccacactgcaaggccccattacggcggtccctaaatctattgcagtggtcccgaataaagtcttccttactatgcattaacacgtatcattgaatatgactttttctttaacagatactttgacgaaggtaattgggactcccatcaagtctccacacagctagcagccacgtggggcacttctccaggtaaggattgtccctgttccacttatgttcctgtcagtaaaatggtaggttcagtgtcaggctttaccattttcttcagggagagacccatctgatatttagtcagccatcagatgggtccagccatagcacacattagctgtgacatgacgtcgtttatgacaatgactttgagcagagttgcacacctaaaaagggactcaattaaaattatcattcattttagttatttctcagatgcatttattatttccattttccaaaactcctaatgttacatttcttcttcacatgttagatatgaacaaagtaagactaactgtggccacatcctctttacttaggaccctacccaaagtggcaggaatgggatgtaaagtgacataatcagacacagtcaaactggcttttaatcgttaagtatcattgtcatctcaaagcacttggcatagttactgaccccttaaatgtcctttctccatcttatcttctcctttgttctctgtatcatcttccggtcctatagaaatatatccccacgagcacacactgaggtctttttttttttttttttttgagacggagtcttgctctgttgcccagactggagtgcagtggcatgatctcagctcactgcaacctctgcctctcgagttcaagcgattctcctgcctcaggctcccatgtagctgggattacaggcatgcgccaccatgcctggctaatttttgtatttttagtagagacaaggtttcaccatgttggccaggctgctctcaaactcctgacctcaggttatcctccggcctcggcctcccaaagtgctgggattaccagcatgagccatcgcacctggcctcactgaggtcttaatgctgagttgaactttgtctctggccatgagcatcagtccatgtattataataggtttgggttgggtgtggtggctcacacctgtaatcccagcactttgggaggccgaggcaggctcacaggtaaacaatttagacaaagttttcacattctctgagatttgtatacattggagattcagaaaaatgtaaccgaaaattaaactataggtggaatagctgcctttgggggctgagaagacaggcatcagacctgggatagacaagggaggcctcttgttccttgaaatgataccccagcccatgaggtctgcatgccaggaagccaaatgagtgaggatggtctgtgtccgctggggaggtccctggatgttgccaagagggatagggtctgggaaagagtgaggatggagtcaggcagagaggaccccccaggctcatggatggactgacctgaggacttatattaagtcataggacagtagagaaagtaagagccaagcataatgtaatcctaacaatgtaaaaagtattaatcattttattattagttaatgtcactgaactgtacacttaaaatggctaaaaaggtaaattttaggttacatatattttaccgtaatataaaatgacaaatatattagaaatgacttttttttttttttgagatgtagtcttgctctgttgcccgggctagaatgcagtggcacaatctcggctcaccacaacctccgcctcccaggttcaagtgattctcctgcctcagcctcccaaatagctgggattacaggtgtccgccaccatgtccaactaatttttgtatttttagtagagacaggtttcactgtcttggccaggctggtctcgaactccagacctcgtgatccacccacctcgggttcccaaagtgctgagattacaggcgtgacccaccacgcctggccaggaatgactgtcaactatattttcttaacatatgtattcctacacaacatcagttttgtaatagtttatttttgttttgttttgcaatttttttcttttattgtaaggaaagaagtacattttttcagcgtgtaagaatgcaaaagtaattatcagatgtttgtcacatcttaacaaaataggaccttattttcctagatgttgctgcattcagtccctttcttggtatggtaaaagcatcaatcagccagggaggcaactataaatacagaagagcagtttcctacagatagtcaaccatgctacccctcttactgacttaattttaatattggagcctggcacaattaacctagtttcctcgtaaacacaagaacaacgtactgcaatcaatgtaggcatatacaggctcttaaagttctgagaagcagcaagtaagttcatcatttactaagatccttgacattcttctgtttctgtgaaatttatgcatctgtgagaagtttcttttctttttttatttttttttgagacagagtctcgctctgtcacccaggctggagtgctgtggcacaatcttggctcactgcaacctgaacctctggggttcatgccattctcttgcctcagcctcccgagtagctggaactacaggcacacgccaccacacctggctaatttttatatttttaatagagacagggtttcaccatgttggccaggctggtctcgaactcctgacctcaggtgatccacccaccttggccttccaaagtgctgggattacaggcgtgagccaccgtgcccagctgagaagtttcttatactagaagaaaaagaaaatttgatttattttaaaatataatggtttagtctgtagcaagtaatattaatttttttatttttttatttttgagacggagtctcattctgtcacccagactggagttcaatggcacgatctccgctcactgcaagctccgcctcccgggttcaggccattctcttgcctcagcctcctgagtagctgggactacaggcgcctgccaccacgcccagctaatttttttttgtatttttagtagagacagggtttcaccgtgttagccaggatggtcttgatctcctgacctcgtgattcacccgcctcggcctcccaaagtgctgggattacaggcatgagccaccgtgcccggccctaacacgaattcttaagagaggtgaaccagggatgggattgtggatcaatcatgcaaagaccgactcctctgggcttcatttcctccatactgaatgtgcatccctacatgttcatgttgttgtttcataggtagtgcagggggtcagaataggatacccctggctgggtgtggtggctcacgcctgtaatctcagcactttgggaggccaaggcaggtggatcacctcagatcaggagtttgaaaccagcctggccaacatggtgaaaccccttctctactaaaaatacaaaaattagccgggtgtggtggtacacgcttgtagtcccagctactcaggagactgaggcaggagaatggcttgaacccgagaggcagaggttgcagtgagctgagatcgcacctctgcactccagcctaggtgagattgaaactccatttcaaaaaaaaaaaaaaaaaaaggatatcctcaattgcggtgccctggcatactgagtattttaagctgaaggaaattgagaaaaccatggaagcaggaaggccactctctgatttgctcccacttttctcccctgaagcaggtcataaaagaattatctgccctacctgtcctgaaagtaggtcataatgggaccctcatttcagaggagttctgccctatccctggataccaacaaagatctgaacaaacaggtcttatgaatttctccccaggtaattactattagatgataccctttgttccccaaagctatttcttcaaaactgtccataaaaatacacctatccagctgggcacagtggctcacacctgtaatcccagtactttgggaggctgaggcgggtggatcacgaggtcaggagttcaagacaagcctgaccaacatggtgaaaccccacctctactaaaaatacaaaaaacaactagctgggtgtggtggcacaagcctgtagtcccagctactcaggaggctgaggcaggagaatcgcttgaacccaggaggtggaggttgcagtgagccgagatcgcgccattgcactccagcctgggcaacagagcgagactctgtctcaaaaaacaaaaacaaaaacaaaaaaacaaaaaagccccacctatcccttggcctttgcatcttgatttctgaagactcacatgtcatgtaaaacttacgttaagtaaatatattatgtttttctcttgtaaatctgtcttttgtaatcaggatctcagccatgatgcattttggcttgtcagaaataatcacaacatgtggagaaatagataaaatgccatttttaaaattattattattttttatttttttgatagagtctcgttctatcgcccaggctgcagtgcagtgtcatgatctcagctcactgcaacctccaccacccaggtccaatcagttcttgtgactcagcctccccagtagctgtgatttcaggcatgcaccaccacgcttggctaatgtttgtatttttagtagagatgggatcttgctatgttggccaggctagcctgaaactcctggcctcaagtgatctgcccgccttcgcctccttaaatgctgggaatacagttgtgtaatggtatttttttttgagacaaggtctcaaaatggcattttttttgagacagggttgttgctctatttaccaaagactatacaagattatgtgaacttaaaataatattcgggttaatttctgtatttctaagttttaggaatacttagttatgtaagcatttacttccctttaagtcaattaaatcctcttttaaggaactttataaattaatttggtagtatcattgggcccagtagagttttttttttcttttttttgagacggattctcgctgtgttgcccaggctggagtgcaatggcgcaatctcagctcactgcaacttctgcctcctgggttcaagcgattctcctgcctcaccctcccaagtagctgggattgtaggctcccgccaccatgtccagctaatttttgtatttttagtagaaatggtgtttcaccatgttgatcaggctggtttccaactcctgacctcaggttatccaccctcctcggcctcccaaagtgttgggattacagggatgagccaccacacccggcaaatttcttttaagatattttataaattaatttggtaataccatcagaggcagaaaaatttcacacagatggagagacatacataaacatacaggcaaatatcaaaagagatcttctagctatcattctaaaatcttagccatgaatcagaaacacatagtaatacaaagtcactgttttatatgtaacagttatctctcatattttctccatttcatattttttccctattgtccctggtaaatgggacaagttaaggctatgtactaaatattaggcctaatgctttttaccaatattcatggagaaggtttttaagatcttcatttgccctgtgaagcccttttgaaggctgtggactaaatgttaaatgagtcactgcaaagacatctaacagctatcgaaatgtctccaccacccatctgagtggataaaatatccagtctatttccaaatagtctttttttcctcttcagccttggtacttacttttggaggactctgagtcccttgacagcagggtggactaaagtttaagagaagaagtctgacaggggaggaagacagagagatggagaaggtaggagtttgaagggatcatatccaggactcaaaggaactgaatggaagattgaaagtggcaagagtaggaaggaggaacagaaagagggggaaggaagaggtcttaagggaaccagctgggggagatattaaattccccaaagaggctagtgaagctccaaattatccttagcaaaatcaggccgggtgtggtggatcacttgaggtcaggagtttgagaccagcctggccaacatggtgaaaccctatctctactaaaaatacaaaaattagttgggtgtggtggcacatgcctgtaatcccagctactcgggaggctgaggcaggagaatcgcttgaacctgggaggtggaagctgcagtaagccaagatagcaccactgtacttcagtctgggtggcagagtgagactccatctcaacaaataaataaataaataaataaatatccttagcaaaatcatgccaaaaagagggaggtaggcagaattgtgaaagcttatagccaacagaggttcaagaaaaggctttttgtcaatggataagtttacatgggaagatccggatcaaaaggagagaacagagaggacttaagaaaattgttcctattggctgggtgtggtggcttatgcctgtaatcccagcactttgggaggctgaggcaggcggatcacctaaggtcaggagttcaagaccagcctgatcaacatggtgaaaccccgtctctactaaaaatacaaaaattagctgggcatggaggtgcacgtctgtaatcccagttattcggaggctgaggcaggagaattgcttgaatctgggaggcagaggttgcagtgagccgaaatcgagccactgcactccagcctgggtgacagagtgagactctgtctcaaaacaaacaaacaaacaaacaaacaaaaacagaaaagaagaaaagaaagtttttcctataagtctgtaactatcagcttcccattaggccaactattgatcatagaggtcttaaaaaatcctttcaggctgggtgccgtggctcatgcctgtaatcccagcacattgggaacctaaggcggtaggattggttgagcccaggagttccacaccagcctgggcaacgtattgagacctcatctttactaaaaataaacaaaattagctgggtgtggtggcatgctcctgtagtcccagctactcgggaggctgaggtgagaggatcacctgagcccaggaggtcaaggctgcagtgagctgtgattgtgccactacactccagcctgggtgacagagcaagacactgtctcaaatatatataatttttttcaaatatcttatcaggttttggtcaagaggaaaggtaaatattcctgatagtacattcccattaaaaaaaaatgtacccgttacaagtgacttggaaccaaaatccatagattctttcatggttctttatcggtatggtgatagggttttcatattcatgtgtgagatgtgcctccctcagtccttgttatgacatcattacgtgtctgacatgacaaaaaggaaaagagaaaaaggtggagaaaggtaaaaaataggaaaagaaaaactgaaggaaaaaggaaaaaaacccaatccgtaagccttttatgacttacccatgaatgcagaggcatcttcaaagagggtgcaaaaaatgcagccctctaaagatgccaaaccactctcaaagatagccaaaagaaaggcaggcctagatactccccctgagagctggcaatagatgttagctgcaaatgggttgcaacccacatgtctgtccagctgtattcccacagccccccaacctgatggttggctgcttgcacacacaagaaccaacaacttgtacgccccatcaagtggaaaaccaagccaaattcttttttttttttttcctttgagacggagtctcgctctgtcgcccaggctggagcgcagtggtgtgatctcggctcactgcaagctctgcctcccaggttcacgccattctcccgcctcagcctcccaagtagctgggactacaggtgcccgccaccacgcctggctaattttttgtatttttagtagagacgggctttcaccatgttagccaggatgtgtcttgatctcctgacctcgtgatccgcccgcctcggcctcccaaagtgctgggattacaggcgtgagccaccgtgcccagccgaaacaaagccaaattcttgacacaaaatgacagaaacagaaaagcaatagctgctcctgggagggaaaggatcaataaccaataggcaccacaaaatcaagctacagtcacaatctagataatgaatttttataatttttttcctatccatctgcattgggaaaataagggacaaggagtttttactttcttctcttgaccaggaactactgacagagatctgggagagctgactttggtgaaaattctcaccttgcacaggcttgtgtctgttttccagaatcctacctgcagactccagaatgaagtgtcccagctgtccctttctcgttgccagaaacttctacccttctcattcctttgcttgtccccctgtaacaagagacagattaatgagagaaaatcatgcaagttgatttactgtatgttttatgtaacatgagtcttcataagaaaactaagcccaaaagaagcagttaaacctgagtgttttttttgctggtctgatgaagagcgaagagtcatggagaaatgtaatgggaccaaaaggtgtcagctaagtgtaataaactgggggaaacagcaagggctattccttcagattcctctcagtgtccctgtgtcttcagagataaagatcttttcctctgggtaaagcgtggcagctctcacatgagggttttattacttgcttcagcagaaagtcaaaaagcccttcccaggttttatgacctctttcagcgaaaggtgagaaagtccttcctacacatttggtttctgaaattccttcagcttaaaatattcattatgccaactttccatattttgggttggcatgtcctgaatatattgtcagagcattacagaaaaaatacacccaaacacacacacacacacacacacacacacacacacacacacggacaacacattccctatgactatcttaaaattgattaacctcaaacatttaattttggatgactgagtcaaaaagagaattgaaattgccatcacatatctggtcaagctgaaagatggcatttggtattggaaattgatggctgctggtcatttaacacccatgcctcagttacatatctggctcatgagataagaatgctaaacagtataaacaagacacctcagtatgaaaacgttctgccgttacaaaggtactctctttgtgttactctgcattctctcccagccctgtagcaatttatcctttgtccatatattgaagatagatttgtttacatctactcttagccttcctgaatatcctttgctccaggagagccttaagccaagggtagaaatgacaagacagactctatgtttgcagaacaccacatagtcacagcgatgcaaatggaaaggaaaatatgagaacaaggtctttcaatccagatttggcctatgtttgtattaaaggtgttattcccatgtaagaccttaagacataatattaataataattcagctatgaaaggttcatgttgagttctacttgcatgggcaagctattaggtagaagttaaagatgcacagaacacattagttctttctaggtatatccttagcagagcaaaattgcaacccaagttagaacaggaaaaacttgatgaagcatgaaattaccagctggtctgatgggagatatgatgtggccctgaggtacagtaggtggtgcctgaagcatggtgacagtagtggaaacaccttagggtgacccacaattagtcactctcattcaattccctttccttgggtgtgggaagaacctgccaatagcatgtggcaaaggatatcgttactgtgtttatgctatgttatatgtcaaaagtgaagatatagtgcagatgtaattaaagaaatcagttggctttgagttcattaaaaggcagaatagcctatgtagacctccccttatcagatgagccacttaaaatggctcctaggcagatcacaaggtcaggagatcgagacccccccgccggctaacacggtgaaacctcatctctactaaaaatacaaaaaaactagctaggtgtggtggcgggcgcctgtagttccagctactcgggagactgaggcaggagaatggtgtaaacctgggaggcggagcttgcagtgagccgagatcgtgccactgcactccagcctgggcaacagagcgagactccgtctaaaaaaaaaatggctcctaggccttccctgatgtcagggaaaatagaaaagactctgtctcttcactgttgcctttgaagaagcaagctgccatgaattctatagccattgtaaaatgaattctgccaacaagcaaatgagcttaaaaagtaacagagtctgcgcacagtggttcacgcctgtaatcccatcactttgggaggctgaggtgggtagactgcttgagcccaggagtttgagaccagcctgggcaacatggtaaaacttcatctctatagtaaaatacaaaaattacccgggcacagtggcatgcacctgtagtcctagctgctcaggaggctgaggtgaaaggatggtttgggtccaggaggcagaggttgcagtgagtcaaaatcacccctctgcactccagcctgagtgagagccagactctatctaaaataaacaaaaacaaaaacaaaaacgtaatacaggccactgacaccttgactgaatccctgtgaaatatttcacctgaaaatccagctaacctgtgcccactgacccacaggaatggagataatatatttacattgttgtaaactgctaaattgactggatgtggtggctcacacctgtaatcccagcatcttgggaaaccaaggtggggggaatcacttgaggccaggagtttgagactagcctgagcaacgtagcaagaccctgtctctacaaaattaaaaaattagccgagtgtggtggtgtgtgcttgtagtcctagctattctggaggttgaatgggaagatttctttagcccaggagttcgtggttacagtgagctatgatcacaccactgcactccagaatggatgacaacgtgagaccttgtgatatggtttggctgtgtctccacccaaatctcaccttgaattataatcccatgtgtcaagggtggggccaggtggagataattgaaacatggggggtggtttcccctatactgttctcttggtcatgaataagtctcattagatctgatgcttttataaatgggagttcccctgcacaagcgctcttgcctgccaccatgtaacatgtgcctttgcttctcctttgctttcctccatgatggtgagggcttcctagccatgtggaactgtgagtccatgaaacctctttctttataaattacccagtctcagatatgtctttattagcaggctgagaatcaactaatacaccctgtattaatgtattaatacatgaataaaaaaagttgctaaatatgtagaactacactctgtgtcttccctttagtgttaggaagatcaaataggcactacaagagcattttcttggtaaatggtatctaaattccctcttatcaatggcaattactcatttggactgctaacaccataggggcaaaaatcctgacatgtatgaatcttgtgggagaagcacttggaaaaaaaacaaaaacaaaaacaaaaaacagagacaaacatttctgagcaaaaatgcaagctttttaaaaaaaatagtttgttttgatcagttcacatcatgtaggtcatttcatccggcctcattggcatataagtagtatatattgagctaggcgtggtggcttacgcctgtaatcgcagcactttgggaggccgaggcaggcggatcacgaggtgaagagatcgagaccatcctggccaacatggtaaaaccccgtctctactaaaaatacaaaaattagctgggcatggtggcgggctcctgtagtcccagctactcgggagagtgaggcaggagaatcacttgaacccgggaggcagaggttgcaatgagcgaagatcgcaccactgcaccccatcctggcgacagagtgagatctgtctaaaaaaaaaaaaagtagtatatattgaaagtataaaggggtgaaccactttgaattgcgtatgacaaaagaagctcagagttcaggtgaaaaatgtgttattacaaactcaactatcaatttaatctgtctttaatgtatgagtcaaaattaagtgttttctgttggggtgatcggacccaacaccaggccgtgggggcgatgaagtcccacggagtcaaaggaatgagaaaagacaagttaagagagaaactgggaccaggggccaatgctagtatggaggctgcgaaggccccaagctctgggaccccatgctatttattggtgatcaaacaaagaaacaggtggcgaggctgtgggggttgaaaggaagtggtgtatcaagcaaatgagctacagctgtgatggtttagcattttctttgaaacatatggctacttgagataatgggagtgctagaagcaaggagccagcaagtctagacacattccaaaggccacaaggggttttagaccctggaccccagacacgttccaagactcttttacattatgtcagacatccaggccctgcctcaaattctctcccaacactcagcttttctcccaacactttctattacaaacatcaacggaaaaatcaatgatctgtttaaaatattgtaaataccatcactatgtttgaagatatgttttaattttttattattcctttaattaaaagaactgtatgccaattaataagctgttgccttttagatcaaaattaatcattcattgcctgctctgtgaaaattgagtcagatacccttaaaaatatattgtgttgcaatagtaagttttttcagtaattgaaggtggttggacattgtaaaaagagattttcctttctgattccactgtggtctctcagccgtttcccatagcatgcatgcctttctccagcactatatttctacagtatgcatgagcaatcctgcagcaacaatggcttttctagcatcaggctcctacaacgcatgacagtcagcagcactagtggtcagccacttcctatatcccctacccttaggtggtttctagtgtagtgcttccaataatatacctacctgtgaacacctttccctggcacctaagtgggaagatttctggaaagttccactggtgccgcacactgtgactattctgtgtagcctctaacaagctctggattgcaatccacttatagtaaataaatgtccacttcaaacattccctcctcaaattcttgtgttttgtctgcctcctgattggaccctcactgaaagaattaatgctggcattgttccaagagatatttccacagagatgaatctgggaggttgtgttggtcattcctttatgtttgggcacattccacagctccttgtcaatgtgcaatgggatactagcaacctatgacatgcagtggtatcacaattaatcaagcaatgacctgtggttgattgtggcaaagtgccaactgaaacacgtgccttgggagcccgagtgactgctgcactgaatgttatggcagtcaagataactgtaaggactgtggggtggaatggattcagttgagggtccttgagtgattacgaacagaaaataacaagcttaggttccttaattctcagttcaagccacggtttgaaaacctgagaacttccatggcgactataaaggaaattcatttgttgtagctgcagggctgatattgttaaatatcaaaaccaagaatgagatcctgaaacttggaatgggtcaggaaacttggaatgggggaatctgtttagactcagttgaaactgaccatctggaaacagaaagtcaggctgagcctttcttaccagtttaagtagcttgtctctattgtttgaagaaaatatctttcccttgcacaaaagctgggttagataccattaaaggggatgcccatttttcttaaagtcccctacaaatcatcactttttgctagtagcatgactagaccccataactaggattgaatagcaacctattcctaagggataggtacacactatgacctgtaggaaacagctacatgcaaaaggaactgtgacatatattggaagaaacctggggaatgttggaagagcattctaaggccgttatactaaggaggacaaaatataacagtagattgggttaattaatctcagtgctattactggggattcaagatttattgtgctgcaggcatgtggctcacacctataatcccagcactttggatgccaaggcaggaggataagatgagtccataaatttaagaccggtttgggcaacataaagagaccttgtatctacaaaaaataaataaataaataatccagtgagagtggtgcacctgtagtcccagctacttgggggctgagatcagaggatcacttgagccctggaggttgagggtgcagtgagctgtgatcatgcaactgcagtccagcctgggcaacagagccagaccctgtctcaaaaaattaacaaaaaaagatttattttgtagttctcctggtagagatctttcatctccttggttagatgtattccttggtattgccgtcttaggtagaggaagagggctcaaacatcttgcttatgtgataactttgccaaagacacaatgtacaatttgttttaaaggccagtgagggatgtaccagtaatcagaatgttttggcaaacagaagactttggtggtagctaactgatcacagggtccctagaatgaaatagatgagaagcatacttagagtattgtttgatctctatatcaagaaaagttccgggtctggtagtcaaatgttcaacagatgcctacctagctttcaaccctaagtcaattcacagttgcagagtgataccacacggaccatgaaaagaacacttgtttgtatgactgagacaaaaaagaatgtcatcgtgttctaccttacctgggaatatgctcaattggtgacaaaattgttgccactctgtgcatgaccacaaaagtaccgcaggtattgattttgaagttacacataaactttagtgagtgggcatatttgcaaatatgtaacctgagaataatgaagattaactatctttaaacaacataaggagtcaacatcagtttctgaagtaaaataatgactaagttaaattttcaagggcaaattcagattccaagtgcacagaacataggaagaaaaggacatgcaaatcagaaaaattcacaagtgtaatgaggcgagaagggacatggcgcaccaattacaaaggaatcagaatgatctgttcatagagttgtaaatggggttgtggaggaagaaatgaggatgaacagataggcaagacaagttcttttccttctatgtaaataagagaaactgagaaattgtaacgtaagacaagatctaatattatttttggacttcagaatggtattgcataaatgcttaattgttcctgatttcgggaggggaaaatggaaatagcatttccgttgcatttttgtgaacaaaatttgagtgatcatgttctttgttgcatgtggtagatggagaggtgaatgaaagattcagctttcttcctgtacttgaggcatctgtgaattgggaattcagacaaacagataagcaactaattctggatataaaatttgtgatttaggctatgcattctactggggaatttcagatgtataggaatgtagttgaaatttaagtggtcagggaatgctatctagaggaagaaaattatgactagagacaagaataaatagtagtaacttaaaaaaatatatatcagggaagaaaaaatggatttttgttccaggaaagaaactaagtatgaacagatgatgaactatttcaggaactgtgtctgcaattcgttccttccagtgggttcttggtcttgctgacttcaagaatgaagccgtgcaccctggcagtgagtgttacagttcttaaagatggtgtgtccagagtttgttccttcagatgctcagatgtgtccagagtttcttccttctggtgggttcgtggtcttgctgacttcaggagtgaagccacagaccttcgcagtcagtgttacagctctcagtccggagttgttccttcctccaggtgggttcatggtctcgccggcttcaggagtgaagctgcagacctttgcggtgttacaagcgttacaagctcgtaaaggtagtgtggacccaaagagtgagcagcagcaagatttattgcaaagagcaaaagaacaatgcttccacagcgtggaaagggaccccagtgggttgccactgctggctccggtggccagcttttattcccttatttggccctgcccatgtcctgctgattggttcattttacagagtgctgactggtccatttttacagagtgctgattggtgcgtttacaaacctttagctagacacagagcactgattgttgtgtttacaatcctttaggtagacagaaaagttttccaagtccccacccaacccagaagcccagctggcttcacctctcagaaccacagatacaaattattttatttacctgaatcaatctgaaagcatatgctggggctggatgttgaggatacttaatggcacattaattctttgattttgtatatgtttagatacattcattagctacagtttgcagcttcctaacagggattccacagatatgactgtaaattgagaattttggtttcccagtgtctgaaaagtggttaacccaaagttttggctttagagaaagagtctatacaggcaaaagcgtagagggtttggcagagaaaaaacaaaaacaaaaacaaaacatcctaagggccaaaggaaatggttgcaaggaaaacggtcaaaaacttgcatcattctcttcatccactcacaccactctatgcaggatcccaaatcagtccttgaatgtttcggcacaggttccattcatgctttccaatggaaacttcatttggtttataggattcaggattgtggaaccatccggtatcaagaaaataaaaggccatgaaaaagtttacagaatgttggtataagcagctgctagggatattactgagttttaatgggagagatagtcccagaaagctggaagaagaaagatcagggccaagcgcggtggctcacacttgtaatcccatcactttggaggcagagaggggcggatcacttgagtccaggagttcgagaccagcttgggcaatgtggataaaccccatctctacaaaaacatacaaaaaattgctgtgtgtggtggtgcacgcctgtggtcccaggtatttgggagactgaggtgggaagatcacctgagcccaggaggtggcagttgcagtgagcagagctgaggtctggccactgcattccagcctgggctacaaagcaaagtcctgtctcaaaaaaaaaaaaaagatcggagcaagaaaaaggaaaaagatgggtaaaaacatagaaacgactaagttcatttcagcaggaatatatttttaaatatatttcaaaactgaaacaatgctatgttttgctgcagtgtgtgagggaacacaattcaggctaatgcacagtaaaaatgcagggaagcctggccccgtaaccacttttaataccacatactacagttaacagttggtgagaaccctattaggctgatttcaattacaaacatggatgtacaggagtatgttttaatggcacacatgcatagttcatattttattagaaaatctgttcaggccggctacagtggctaacgcctgtaatcctagcactttggaaggctgaggcgggtggatcacctgaggttaggagctcaagaccggcctggccaacatggtgaaaccccgtctctactaaaaatacaaaaattagctaggcatggtgccgcgcgcctgtaatcccagctactcaggaggctgaagcaggagaatcgcatgaacccgggaggcagaggttgcagtgagccaagatcgggccactgcactccagcctgggcaacagagcaagactccctcttgggaaaaagaaaagaaaagaaaagaaagaaagaaaatccgggctgggcacagtggctcacttctgtaatcccaacattttgggaggatcacttgagatcaggagttcaagactagccttgccaacatggtgaaaccttgtctctactaaaaatacaaaaattagctgggcatcagctactcttgaggctgaggcaggagaaaggcgtgaacccgggaagtggagcttgcagtgagccgagatcgcgccactgcactccagcctgggcaacagggcaagactccgtctcaaaaaaaaaaaaaaaaaaaaattagctgggcgtggtggcatgtgcctgtaatcctagctacttgggaggctgaggcaggagaatcgcttgaacccagaattcagaggttgcagtaaactgagatcctgccactgcactccaggctgggtgagagagcaagactccgtctcaaaaaaaaaaaaaaaaaattaaaaattaaatccaccaaattagctcaagaacacttccttgactggctcagaaatcccatccgattttaagatagatgttaaaaaataacagggaggaccgggtgcggtggctcagacctgtaaacccagcactttgggaggccgaggtggggggattatgaggtcagcagttcgagaccagcctggccaatatggtaaaaccctgtctctactaaatatacaaaaattaactgggcatggtggcgtgcgcctgtagtcttagcagctcaggaggctgaggcaggagagtcgcttgaacccgggaggcggaggtggcagtgagccgagatcaagccactgcactcgagcctgggtgacagagtgagactccatctcaaaaaaaaaaaaaaaaagacacattatttcattttaataatgttagtcaattttttttgttgtcgatgagttgcgttttgttcattaagaatcagctgtaacatttgttgggacttggtagaagataactgctaggtggttgtagctgccaggcttttaatgagaggagcttagtttagcgaaaataaaagaaaaacaaagattaatatttggaataaactgtaaactcagcttctgagtccagagatcagccagtcaagattgtttagacttgagcttatctttagatggtgaagttaggaaggtagtgacagtctaatgagttttcctagtttacagtttgtatgtctttggtgattacatccagtgttctggtgaacttcctgaggggcccacccagcaacagacacaaaggtgatttatttgaaactgtaggaacgaaaaagtaatatattttcatcacccattacaaggttaacgagtgagactcctataacaaaagacatattaataagaaaaaataatatcaaatgtagttactaaaagtattatgtgacatgggagcttttagaaatgaagatcaaaagaaccagggagaatcctgggtttttttgtttttgtttttgtttttaattgagacaaggtctggctttgtcaccctggctggagttcagtgacacgatcccaggtcacttcaacctccacctccatgggctcaagccatattccacctcagcctcccgagtagctgggactacaggtgggtgccactgcacctggctaatttttgttttgttttgtttttgtagagatggggttttgccttgttgcccaggctggtcttgagctcccaagctcaactgattcacccaccttgacctcccaaagtgctgggattacagacatgagccaccgtacatggctggaaaaatctatttttacagagagctatgcaaatgtgtgattggaaaacaaatgggtatgacctagtggcaataatctgaggagaaattagccagatctgttcagattcttcttggtctctgcgtatagaaaaggactgctcctgagtgaggaatttatgacctactttccggggaggtaggtcagagaattcttttgtgacccacttcagggggaagaggtcaaagactgtgcttcctgcatctattatctcaatttctgaggtgccatatttgggggcattatttacagagactcaagggggtgtaagtgcctattatcagaggtcattcttacggaggctattaacgaaattttaggtgaatggctgagcagacatctagaagttgtcatccagtctatttctaattaggttttttcttttctgacgcaggtagttgattttgcaggatctgctgtcccttaggagaagagggccctaaagttcaagtgattgtgggactggaggagataaaaggctggcaggggagggcagagggagggaggatgaagcagttaggggcttgaagggggaaatatcaaaggaggcaagagaactgaagggtaaaataatgccaaaaaagaggtggacagagttggcaaagcatatcgtaagcagggatttgagaagaggggattcagatgacagagaacatcccaagggagaagcagaatccaatatagagaatggattggtcttaaatagagctgggagtaaaagattcgcagcccaggaagtcagggaataatacctacggaggaaggacttccaggccaagtatccagggaataatccccactgctatggttctaatgatggtgccctctcaaaaattcgtgttgaggccgggcatggtggcttatgcctgtaatcccagcactttgggaggccgaggcaggcggatcacaaggtcaggagatcgagaccatcctgactaacatggtgaaaccccgtctctactaaaaatatagaaaaattagccaggcgtggtggcggtcgcctgtagtcccagctactcgggaggctgaggcaggagaatggcatgaacccaggaggcagagcttgcagtgagccgagatcgtgccactgcactccagcctgggtgacagagcgagactccatctcaaaaaaaagaaaaaaatcatgttgaaatgtaatcttcagtgaaatagtatgttgcccaggctggtcttaaactcctgggctcaagtgatcctcccacctcggcctcccaaaatgctggcactataggcataagccaccacgcctggccaagacactaccttgaaagcacagagtaggccaggcgcggtggctcacacttgtaatcccagcactttgggaggccaaggtaggcagatcatgaggtcaggaattcgagaccagcctgtccaacacagtgaaaccctatctctactaaaaatacaaaaattagctgggcatggtggtgggcacctgtaatgccagctactcggggggctgaggcaggagaatcacttgaacccgggaggtggaggttgtggtgagccaagattgcaccactgccctccagcctgggcaacagagctagactccatctcaaaaaaaaaaaaaaaaaaaaaaaaaagaataagaaagaaagaaagcacagagcagcccttactagacacaaattatgccagtgacttgatggcgtaattggacttcctgactccagaactgtgagaaacaaatttctgttctttatagatttcctaggctcagttattatgcttagcggcacaactgactaagatagaaattggtactgagaagtggcagtgttgcaataacaaatacctaaaaatgtagaggctgctttggaactgagtaatgggtagaggctggaagagtttggaagtgcatgctagaagaaggctagtttgccatgcattaaggcgattctgacgaggcttcagaagatgaaaagccatagagaaagcctccgtctttgagattatctaggtggttgtgaacagaatgttagaaagaatatggacagtaaaggacattctgatgaagtcttagatggaaatgagggatatcttattggaaactggaggaaaagccatccttgttacaaagtggcagaggatttgttcctggaaagaacagaacaaggtctgggaaagaagggagtttatttctgcagctggttacagggagaaggccggagtaactcaccataccaactcaaagttacaagtttttttctagtgcttatatacattttaagctcccatgctaggagtggaattgcacctccaagcaggagtgtttccttcaatctatatctaaactttaactaggacctagggtctggaaatctttctctagagtcttggaaagctttttaatctttttttctttttctttttttttgctgtccataagtttattgtctgtatctgaaaaatcatcatagaaaattgtttggtttagctctcagcagcctgcttctgagctctgaggaagcttgcattcttttgagctacccaatccttcttctgagcaagggacattttgggatggttccacctcttctttttaacttctttcttgggcttattttcatagactggattctctcgtatagcagcatgagcttccttatacatttcctccatcatgtctggagttaccctgttctttatgtattgagagaactgtttcttgtaagcattttcatcttcttccattaagtagcacatgtaatcggcaacattctggcccatgatgtgcttccggtgtacttctgcattaaattccttgctttcagaaccataaccagggaattgtttggtactgtgagggatagacaagcctccatccacagctcccttcagggcaccaaaaactttattgccagtggtagttctggcaaggcctgcatccaaatagcaggtaaaggcacttggctgaccatcaatgctttccacaatgtattcatcgccagtcacctccacttggccttcatagatcttgtccatgccaaacctactgagaagcctgcgggccagcggcaggccagtacaatatgctgcagcataatttgtcgggccaaccttcacaccatattttggcagttcgtgtgcatatgctgtgcagactatcatatccccctctatatgggcataagcaatctgacaaatgatatctctgtttgttacacgaactatcatcctgtatttgagtgtgttgtatttatttttatcctgtatcaccaagcgtttccgagtatcgtaatcagttttaccctctcatcatcgtcttctaaatttcacttggtatctcttaaagtaggccttattcttaacaactttaacaaaccccatcctgcagaacagagacccgcgtccacagctcaacagagaccagcaggcacagcggcgctggggcagggagaaggggaaagctttttaatcttcagtgggtacctggaacaaggtatctgtgtaaaatgcttttattattcaaccagactttaggctaagaaagcccattttaatgggtttattttaatattccagccctcatgctcagtcacctgtttctccagttctttaatgtttaacttatacattcattagaattataatagagggtcagtggaaactgactgttctggttgctaatgggagcctgccctgccacaaacttggtggaagtatttctgtgtcttaatagttttttggagggtagaatgtaagagcgatgaactaggacatttggcagaagaaatctctaagccaagttttcagggtactgcatagcttctcttaactgcttatagtaaactgtgagaagagaaaagataggacttctaatcaaaagggaagcagattagctgggcatggtggcacacacctgtagtcccagctactctgcaggctgaggtaggagggttgcttcagcacaggaggtcgaggcggcagtgagctatgatcgtaccacagtctgggcaacagagtgagatcccatctcaaaaaaaaatgctaattattattattattatcattgagatggagtcttgctctgtcgcccaggcaggagtgcaatggtgcgatctcggctcactgcaacctctgcctcctcccgggttcaagtgattctcctgactcagcctcctgagcagctgggattacaggcgcccgccaccacacccggctaatttttgtatttttagtagagatggggtttcatcatattggccaggctggtctcgaactcctgacttcgtgttccacccacctcagcctcccaaagtgctggaactacaggcgtgaggcacctcacctggccaaagactattattatcattattttatccaaaatgtgtttattgagatggtttcccactcatcttgattcagggtgcttttagtgctgctttctcctgaaggaccatccttccataagccttgcttttcctcctgtaggctggcagaggaaagtgcagcagccaacacccaaaaccactgttggcacatggctaaagaccgtggtgattttatagcatcctgggcatttcacatccatgaagtaggaattggggctctgcaccaggtgtttcttcttgtgtttcctcttctcctcttctggagagggatgaaggagatcctttgcaagaagcatgttcttgtgggtaggtcgtcagtgctggaaagggccaaagaaaattatttttaaagggaagttgaacataaagatttggaaaattaacagcctggccttgtaaagaattttttaaataagttcaggagacaaaaccaactgtgtggccaactgaccgtttcataaggagattagtatgactagaatgccagatgctattcattaagacaatgggagaatgaccctgaagacatttcagagagcactgagaatgccacaaccatcacaggcccaaagtgccaggtccttgagggaataacaattttaaggaaggagcccaggattccagtgcaacccaagatgcctgtgggaacttggggctcactgactatgctgcctcatgtatctgctccctgaagtcaagcaaagcttccccatctgtggttcaggtgggcccaggtacagctcagatcactcctccagaaaacacaagtagtaaaacatggggcagcatgcatgtggtgctaactgcaggcatgctaaatccacagctgtgaaggcatggctttctccacctaatttccaaggaagccttgaagaatgcctcagggcccaatcagagaactgctgtaggggcagggctgccatagaaagttcccactagggcaatgtccagcagaactattgggttggggccaccacagagtgccctcactagggcaatactcagtggagccatagggacagggccacccctgagttcctagacccagacctgtagatccggtagtgcgtattccaacctgtaatagacatagacacctgactacaacctgtagaactgtggcatgggctgactccagcagtcatggcagcagggtcccctgggggcttgggaacctaagcactaccccagtgtctctgtaaggtgagaggtagaatcaaaaaagctgactctcacacctcaagattgaattttgttggccttgttgggttttgaagttatgtgggacatgttacccctatcttcttgcctatttcctccaccaaccttttgtttttgccatggggtcgagctatgtcacccaggctggtctcaaattcctgggctcaagagatcctcctgtctcagcctcctgaatagctaagactgcaggcaccatgcctggcttatttctgacttttataaagggaatgtttatcctgtgcctgtccaaccattgtattttggaaacacataatctgtttgacttcacaggttcacagctggagagccattgtctcgggattaattgtaccttgagcatcacctatatctgatttagatgatatttacatgcgactttcgacttacacttgaaagttgatgctggaatgagttaagacattttggagttactaagatggaatggacatattcttgtgggtgagaacgacatgaattctcatgtcatggcaagggtggagtgctatggtttgaataatggtgtcccttctaaaattagtgtggaaatttaatgcccaatgcaacagtattaagaggtttggcaattgcgtggtgactaagccatgagggctctgctctaatgcatgagattaacatctctataaaagtgtattaatttaaagggagtactttcttgcccttctgccccattcaccatgtgaggacatagtcatggctcctccacaggatgcagcaacaagacatcatcttggaaacagacagcagccccgtttagacctccttctgctgctttgatcttggacctctcatcctccagaaacacgacaaataagtttatgttctttataagttactcattatcaggtatttatttatttatttttttgagacagagtctcgctttgtcgcccaggctggagtacagtggtgtgatctcagctcactgcaacctccgcctcctgggttcaagtgattctcctgcctcagcctcctgagtagctgggattacaggcatgcactaccacacctggctaactttggtattttcagtagagacagggtttcaccatgtttgccagtctgatctcgaacccctgaccttaggtgatctggccccatctgcctcccaaagtgctgggattacagacgtgagccactgtgcgtggccaatatcaggtatttctaatagcagtacaacggactaagatactcaggaaaacagagccaggaggaaaaatattctatctcagggagttaaggaatcatgcccactcaagaaagagtataagggctgggcatagtggctcacgcctgtaatctcagcactttgggacgacaaggtgggcagatcacttgaggtcaggagtttgagaccagcctggccaacatggtgaaagaccacctctactaaaaatacaaaaattagccaggcgtggtggcacatgcctgtaatcccagctacttgacaggctaaggctggagaatcgcttaaacctggtgggaggcagaggctacagtgagccaagatcacgccactgcacttcagcctgggtgacatagtgagactccgtctcaaaaaaacaaaacaaaacaaaacaaaaaaaacaaagaaaaagagtgtaggggaaaaataacactcagtttattttttagtccaaacagacccctttaacaaaataaagattaacaagagaaaagcaaacaagtttattaatgtgtgtatttcatctacacatggaaaatacccagagaatgaatagttatcaaagaagtgctttgaattccagcatatatagcatcttcagcagagaaccgtacatttttagagaagtgaaaagataaagaaaaaggagattgtgtccgtaggggtgacaacttacggaaaggcaaataaattgcagataaattcagttactaagcatgttgctataaattcctttggtatcatttccaggctgaccagggtctaaagttttcttcagtggttagcctttgttctccctggtaaaagcgtgagtgtggagagtggggagggagagggtaccttttgtcttcgcaactctatatcttgcttttcggccagtaaaggaagaacaaaaaacttccctgcatctgcttcttcttaattgtcttcagctcaacaatgcttccagttttagggtggcatattctggcctcccacaagagccaggaagaacagatgtgcagcccaacggtgaggaaataattttcaccctacaaagagccaggaaaaagaccttccattccaggaagtacctttcaaaagatacctgggagtctaatccagcttcaaactatactctgaattcttaagaatcaaggccaggtgtggtggcttatgcctgtaatcccagcattttgggaggctgaggcaaggggatcgatcacttgagcccagggtttgagaccagtctgggcaacatagcgggatagtgagatcctctccacacacaaaaattaaaaataaaaataaataaaaaaaattaaaacctatccttacaagcttcagtggacacttgtccagagcaatcaatggctccagagtctaattcaccagtggatccccaatcaacttattaggaataaagacaaggtttcaaaggtgcaccctgaggtcctgggtgagaggtccaggggaccaaaaatgaataactgaaaaaattatatattcagtgatacttattaaagcatggtaaagaaaactttattcaggaccattgtgatagatacagggaccaatgcaatgggattttgcaatggaatagagagattgctctgaactccaaatagatcatgggaaaaagggacgttataaccaagaagcagggttggggtgtagtgggtgaaggaatggaaaattactaaaaggaaacatcagggataagggggattctggctaaactgacacctaacaagattcttgttaaagatgggccagagtggtcatgtatcacttggaagatggtggaagatgaacctgatcagatatcaagggtgatcagatatcaaggagaagagggttcttttttatatttatttatttatttatttttgagacagagtctcgctctgtcatccaggctggagtgtagtggcgtgatctcggctcactgtaacctccgcctcctgggttcaagtgattctcctgcctcagcctcctgagtagctgggattacaggcgtgcaccaccatacccggctaatttttgtatttttagtagagatagggtttcaccatgttggtcaggctggtctcaaactcctgacatcgtgatctgcccgcttcggccacccaaggtgctgggattatgggggtgagccaccttgcccggccgagaagagagttcttgataaacagacttccttgttaaaactagattttataatgaggtccacagatgggtggaggagaagcctgagtaaattttggttaagcagagaaactttgtcatccctcctgtatgcattatgctcccttttctccagtggagctctcttcaaccttgatgttattgtccaatcagtttgttttcccagtgttgatgttctgatttcatcctacaaaaatatagcataaacttgtatttgttgcattctacaacataagcctgacaatataacaaactgttcccaaagttataaattcctcgtctttttatttgtaatttgacttttaaaaatctatgtaattatagaagaatgttgctactataaaaattttaaggggtggcagggaataattccaaaattataaaactccttgtgacaaatttaggaatgatattcagctagttctatagttttttattccttgaataatcagcgatatacatctgattatatacacacattgtggtttttttttggccaggttgactttttttttttttttttttttgagatggagtctcactctgccacccaggctggagtgcaatggcacaatctcggctcactgtaacctctgcctcccggattcaagtgattctcctgcctcagcctcccattacaggcacccgccaccaagcctggctaacttttgtatttttagtagataatggggtttcactacgtgggccgggctagtcttgaactcctgacctcgtgatccacccacctcggcctcccaaagtgctgggattacaggcgtgagccaccgcgcccagccttggttgacttattcttttaaggagcaatgtgggttaatgtttcaaagtgaaaaaatttaaaaacttaggggaaagtggggggagagagagacaaagacagagacagaaagagagacagagtgagagatggagagagatcagataggtacataagcttagtgactcagcctgtagtcccagttacttaggaggctaaggcaggaggattgcttgagcccagaaactcaagttttcagtgagcagtgatctgcaacactgcactccagcccatgtgatagaaccagatcgtctctagaagaaaaaaaaagaagaaaaaaatacatatacatacatacattggtgtttgtttctacatatgcttcatagtatatgtgtacatggattataggtagatcatataatggtaacagtattaaattaggtgtcagcatttgttgaggaagtagtacgctcgtgtttgaaattttaattaagaattgtgtacggagttggttccttccggtgggtttgtgggtttgtggtctcactgacttcaagaatgaagccacaagccttctgaaccttcgtggtgagtgttacaactcttaaaggtggcacagacccaaggagtgagccgcagcaagatttattgtgaagatcgaaagaacaaaatttccacagcatagaagcagactgagcaggttgccactggtggctggggtggagtggccagcttttattccttatttgtccccacccatatcctgctgattggtccattttacagagtgctgactggtccattttacagggtgctgattggtccattttacaaacctctagctacagagcatcgattggtgcatttttacagagcactgattggtgcattttacaaacctgttgtaagacagaaaagttctccaaggccccacctgacctacgaagtccaggtggcttcatctctcagaatcagcttttaaaggccataaatttccaggtaagtaggaatagaagaaatgaacatttcctttgagatctatgatgtcatatttttttctccatcaacgatttagttccttctggatcaaatactttttaaatggatgtatgttttatagtagatgttatgttgtcttaattattttaaaactcctattcctggactctcctgaagaggagaatttagtaatttcgaagtattttttgaggctagggaagaaaaaccaagattactgcataaggtttcaggggatgttccatgcctgccacctggtgaaaatgagggagctttcctcctacctgccaccattacacctgcctgcaggtaataacgccatcatttcaacgcggcctggggtattctgggaaggtgacgtgtgggggcgcagtgaccgctagcaggggccaaacccgccctggtctgcgctgcagtgcgcagtgaggatgttggtgctgctcttcagggttttctttccgcagccacgggaagcccgtgttccatatttgtttttcatgttctctcgtttttatgttgtggatttagttttttaaaaaccataaatgttcctctacagtcttaacaatgtaccctgtaaaataagattttaaaagagccaacttccctattaatcttatacttttttcttttcgttctggctttaacaaatgtgacctaaagagagctcttgattttatgtagaacaatacaagaatagttttacattaatcttatggttagaaaaatcatttatgggcaaatttgttcccatgccttacttttaaaatattgtgttgtctttaattttcaaaatactttaaatatttttcagtaagtttgagggtagaatttattttaatgagactcctcttataaaaagtacgtatctgtatgtgcatatgtgtatactgaatttgctttgcttttgattctatcattctgtcacttttctatcaaaatatctctaatggacagaggccagagacaaggacttttacagcaaatttgccacagtaccacacattttatcttaaaagatggtatggattttgcataacatatatatgcaaacatatatatatataacataatatatatgtgtatatatatataacattatatatatgtgtatatatataacataatatatatgtgtatatatataacataatatatatgtgtatatataacataatatatatgtgtatatatataacataatatatatgtgtatatatataacataatatatatgtgtgtatatataacataatatatatatgtgtatatataacataatatatatgtgtgtatatataacataatatatatgtatatatataacataatatatatgtatatatataacataatatatatgtgtgtatatataacataatatatatgtgtgcatatatataacataatatatatgtgtgcatatatataacataatatatatgtgtgcatatatataacataatatatatgtgtgcatatatataacataatatatatgtgtgcatatatatataacataatatatatgtgtgcatatatatatataacaatatatatatgtgcgcatatatataatatatatatgcgcacatatatataacaatatatatatgtgcatatatatataacataatatatatatgtgcacatatatataacataatatatatatgcgcacatatatataacataatatatatgcgcgcatatatatataacataatatatatgtgcgcatatatatataacataatatatatgtgcgcatatatatataacataatatatatgtgcgcatatatatataacataatatatatgtgcgcatatatatataacatagccgtttggtttattttatgtgtgtgcgttaaaaagttattcaattgctgggcgtggtggctcacgcctgtaatcccagcactttgggaggccgaggcgggcggatcacgaggtcaggagattaagaccatcctggctaacacggtgaaaccccgtctctactaaaaatacacaaaaaattagccgggcgtcgtggcgggcacctgtagtcccagctactcgggaggctgaggcaggagaatggcgtgaacccgggaggcggagcttggagtgagccgagatagcgccactgcattccagcctgggcgacagagcgagactctgtctcaaaaaaaaaaaaaaaatattcaattatgcttgttaaagcaaggtaagggtcaccatggtgataggtacagggacctctgcagatagagattgggctaactccaaacagcgtaggcaagcggaaatttataaccaaagagcaggctgggaggtctgtgaatggaaaattaccaatgagaaacctcaaaggttagggggattctggctaaaccagcctaacaggatttttgctgaagacaggccagggtgatcaaacatcacttgggggatggtgcaggatgatgaacctggtaagatattaagggtgatcagatatcaaaggtaaggaagttcttgctaaagctggatttgacaaggaagtgcacagactggagaaggttcaggtgcctgactaatgtttgatcaagcaaagaatctttgtcagtgtacagaacgctatgtttttataaaatgttcctctgccccatttgtatctccccttttcatggaacacaaagcacgttttgcataacttctagatacatgtacttctattttgaatgacctgatatatcttttttctttacaattctcaacctcagcatatgtaagtggaactcagaaggcaacattccctgaacatactcttccaccagaatctcctctacagatttttgctgccccttttaccagtggctgaatctactttctcttatgtaagtagaaattttatatatctccagcctcttcctccttaccttccacttgcatgcacatcctgtctagtctgtgacctcctctgttataaatgcttgtaaacctttttttctgaatcagaaacgtgttgtgttgctcaagccgtgttcattttaattacgatttaactgcataatttaattatttccccattttttggatacagtgtttgcttttctccggttactttgttctagtatatccctctggcaagagcagtcatttccccacttgagtgtgcattagtatcacctgggggcttgttaaacacagcgtgcaagctccatcccagggtttctaattctcagggtttggtttgcggcagaagaatctgcatttcgaacaagtgccaggactggtctgaggaacacacgttgagagaggtgggattcgggttcactaacctgggttagagaaaattacagtaatgtgccaaatctgaggagggagcagagctgaagcccagtttcaatatgtgaatgagtgctttatacactcaaaccccctcaagggctggggagtaagggagaacgtgggcgggcagcgggcgtgtatagaggcataaactcaatcccagacctatggattcagaatcacatgttaacaattcttccagtgttttgtatgtttattatagtttgagaatgactggaccaaattgcctccaaaatcttaagtcccagcagtgaagcgaagctcagacatcatttgcatagctattgctttgtgtctgtgttttaggtcagctgctgttaaaggtttgtttcggagagttacccaggtgtagtacccttccaagtagataatgattgaaagagtatgtgctggaggtgtatgatattttccatccacttcagcccatttttctgatgggtcagtgacagtccatgatttgtctggtgtaatacaaattctggaagtggcatatatccaaggacagccataatattccacttggccaaggctcttctgacaggctcatgttcatgcaggatcagatctgacccagaatcaacagaactgaagctgcaaattcagctttgtgaaggcttcagatgtagccatggttaaagaagattgacattaagcaggtgagcagagtttgcttgaggttcacccagggaattcgtgaggatgcaggtgcgtttttttatggcctgaaaagcccagtttttgaggagttacagtccctctcagaaactgttcctgcagagtagccctggaaacatgtttgtctgcattcaagaaagatcttccttctgttcatataaaggaagccaaacttatttcccaggtaagggagtggaagcaactgtgatacggaatcctaaggcatgggggttagttgtaatccaggcaatatgtagggtcaggttctccaagtcctcctgtggttaaagggctccaccctaggaaagtgagccacccagggcttggtaaatgaccttatgatcagcccttggcctgttaacatgtcgtaactgaggcacaggactgggttcttggtttgaatttgctagtcagatggccattgcagaaagggaagagagcacagtccttcaggccaactcacttggcctattgaaactggcttttctgagcacagtctagtattgttgcgaattaaatacagcagaggatgtaagttaccagtattagtcactatcagttgagtacttattctgtatcagccactgttcctcttttccatttccacctgttatatgttagtgacgataaaaatgccatacagaccgggcacggtggctcacgcctgtaatcccagcactttgggaggccaaggcaagtggaccacctgaggtcaggagtttgagaccagcctggccaacatggtgaaacctccgtctctactaaaaaaaaaaaaaaaaaaaaaaaaaattagccgggcaccgtggcgggctcctgtaatcccagctactagggagactaaggcaggagaatcgcttgaacctgggaggcggaggttgcagtgagccaagatcgtgccattgcactctagcatgggcgacaaaagcaaaactccgtctcaaaaaagagaaaagaaaaagccatacaaaaaggctaagagccttgttcaacctcacacatgaaagtggcagggctggggtattaattcaggcattcacaatccagatcctctacacatttcactgacatgaaacccagaaatttcaggtctactaccttgaacccagaactatttttctcaaacttgttttcttgtgagctatatatagggaaaaattgcatacaatacagtactgctttacaaatatatcatctaatacccaagtcaagaaagacatgatcctgagctccctcaaaactcgtgggtatcccttctgaatcttgaccttttattctgactgagatgaatcctccatgctgctctttgtaattttattcctcgtgattacatacttaagctacaggaatacatcttacgtagttttgtttattcttaactgtatgtatttttttgtcttttccacttgatattgcattttctgtatttatccatgttgtgtgtaattccagcttcttaatttttattgatggtgttctctcattatatataatatatacagcatgtagcatgtatctttctcactgtgtatgtatacagagtgtatgcatatcactataggtatacagacatatcattatcctagtatttccatatctatgccacagtaggcagatccttttttttttttttttttttttttttgggaagacagagtctcgctctattgctcaagctggatggagtgcagtggcgcaatctcagctcactgcaacctccgccttctgcattgaagcgattctcctgcctcagacccccatgtaactgggactacaggcacctgccaccacacccagctaatttttgtatttttagcagagatggggttttaccatgttgtccaggctggtctcgaactcctgacctcgggtgatctgcctgcctcagcctcccaaagtgctgggattacaggtgtgagacaccatgcgcggctgcagatcccttctatacctgatgattgtttgggttgtgtctagtctgcagttatcaccaacactgcaatcgtaatcactgaagtatgtgtatcctgatttatataggtacacatctctcaaggatctgtaactggtagtggaattcatggatcttcaattcaaatgttgctcatggcagtgttaattataacaaccactttggtaaactacctgctattacctacaaaaccatgtgtaccttacacacgcaccatccattctactgtgtggagtaggccacggaaaagtacatgcacagttgatgaaaagacatgtatttaaatgtttatagcagcattatttgtaatagccaaaactggaaataaagcagagtgggtaagtaaatggtggtataggaattcaatggaattcaactataaataaaaaataatgaactgtatctacatgtaaaaaccttgatgaattttataaacacaaagttgagcaaaataatctaggcaaaaacatacttgtctgagcccatctctgtaacattcagaagtcagtatgacaagtcaggatggtggttacctgtgacaggagagaggctgttttgggaagggctcacttgggtcttctcagttgctggagttcactgtgataaatttaggatttgtttctttttagtgccgtgtatgtgtgtgtgtgtgtgtgtgtgtgtgtgtgtgtatataaacatttttttttttttttttttttttttgagatggagtctcactctgtcacccaggctggatgcctggctttttgtagtttagtagaaatgaggtttcagcatgtagctctggctgatctcaagctcctgaactcaggagtctttcctcctgtacaggagggaagacctttcctctactttctgagaattcaataattgagtccttgaaagaaattgacagtagtcagattaatgggagaaaaggtatacaaattagatatggacacagggacatcacatgaaagaaaagcgaatatcccagaacccagtgagattcagaagcttatgtaccctcttcttaggacagagggtataggtgattaggtaacttaggggagagtaaacagtttgggggaaagataaatggactgtcagaagaacaggtaacagccggtgacaaagtctgcgtgtgttatcaaggtctactctcctctcctgtgataggagccaatcttccctggttagtgagtttcctggggaggggattcatgacaattaagttccttttagataatctgtctttagataaggaagctcagagaaaacctctgcctgtatgagctgctccccacataacctcagttgaaagtaatcagcacaccaaagcatcatattttggggtggagatcctcccgcctcagtctctcaagtagctaggaccagaggcatgcaccatcatgcccggctactttttttttttttatttcttgcagagacagagtctcaccatgttgcctaggctggtctccaattcctgacctcaagtgatcctcctatctctgtctcccaaacagctgggattacaggcatgagttaccatgcccaggctaggggtggcatttcctgaactccttcagccctcttgggaaatgtgcaggcaggaagaaagaaaagaatacccttgtccacagccaggtcttgttgagcttatgcttggcagaatagaaccttacacccagccacgtgaaaactgggatgataaatgtctgcatgtctgacagaaggtttggcctctgattcagctgtggtgatttttccatctacttaactccaaattctattagctagtataaactctctattggactatgaacacagtaagtacacaatcatatgattattttatctattgacttaaatagaattgtgtatgaaggctgtactgaagttattcagggttgagtcaggaaaagctaaatttcaacctcttttaagaaaaatattgatgcctccaaatccatagtatatatgttgcttactagcttataaagggcccctggaagaaaggacatttccggtgttttatgtcaatcataggaaaataagctataagcttttttttaattctttgattctcaaaagtaggattgtggccaggcatggtggctcacacttgtacagcactttgggaggctgagatgggaagatcgctcaaggccaggagttcgagaccagcctgggtaacaaagcaagaccccatctctacaaaaagaaaaatgtatgattgcgtccccctaccactccccaacacttccctggctccacaccccagttcctctgctctcatttctgctgtgtcttactccatgaagctttcaaaactgcttttatagagtcctccttttcttttttataaatttattattgttgttgtttaattaaaagacaggatctcactctgttgtgcagttgtgcgatcactacagcctcaatctccaagcgatcctcccatctcagcctccccagtggctgggaccataggtgcataccaccatgcccagctaattttttttttttttgagacagagtctcgcactcttgcccaggctggagtgcagtggcgcgatctcggctcactgcaagctctgcctcccaggttcacgccattctctggcctcagcctcccgagtagcggtagcgcccgcaaccacacccggctaattttttgaatttttagtagaaatggagtttcactgtgttaggcaggatggtctcgatctcctgaccttgtgatccgcccgcctcggcctcccaaagtgctgggattacaggcctgagccaccgtgcccggcccactaatttttaaatctttttgtagagatgggatctaactatgttaaccaatctagtttcaaactcctggcatcaagcagtccttctgtccaaagtgctgagattgcaggcatgagccactgtgccaggcccctcattctttaaatagctactttagattctattgtaaggatattttaataattttccaacttttattatattgagtaggtgattcctttttaaattatatatgtaaatttttatttatatatttgaataatatgtttacatagttaaaaatcaaaatatacgaaaggcatacagtaagaagtcatctctttccacccgtaatgacaatatatccccttttgcctggcacagatgcacacataaattattgtcctgacatgattatgaataatcctgctttctctcagaagtgtgctagtttgaatgataaattatgcagacattctgcttgtatccctgcttcttcaccatgctgttatattccttccaattcagaggcaaatgtgatatcattgcctatgtgtcttccagaggaattttatttatattttgtaagtacatacatggattctggttttttttttgcactttttaacaaatagatgtatccatgctattttattttaaatttttactttgaaacaaccttaaacttacagaagttaaaagaatattagtagcaggtgtgctggctcacgggtataatcccagcaccgtgggaggctgagatgggtggattgcttgaggccaggagtttgagaccagcctgggtagcataatgagacctcctctctacagaaaaaaaaaatgtaaaagttagttgggtgtggtgttgcatgcctatcgtcccagccactcaggaggctgaggcaggaggatcgcttgggtacaggagttagaggctgcactagaccatgatcacaccactgcactccagcctgggtgacagagtgagaccctgttgcttaaaagaatattttaaaaaaaacctaccctttatccagattcacaaatactaatattttttcacattatttaatcaatttttctccttccctccctctttcatttctcccccttttctttttttttggagacatgatcttggtttgtcacccaggctggggtgcaatggcataatcatagctcaatggcatttcaaactcctgggttcaaagaaacctcctgcctgagcctccagaatagctgggactacagtcatatgctaccgtacctggctaatttttaaaattttttatagagacaggatcttgccatgttgcctaggctggtctcaaactcctaggctcaagtgatcctcccaccttgacatcccaaagtgttttgattacaggcatgagccaccaagcctggcctcctttccctcttttttttctccctctgtttcccactgcttataaagtttttaaattttttttttttttttttttttttttttttttttttttttttacttttgaccactttgagagaaggttgcagacatcatgtccctaatgcatttcctgagaaccgggatatacgtttggataatcatagtaaagatattaattcaggaaatataacatttatacaattattttatctaatctacaggccataacccagtttcttcatttgccccaataatgttttttatagctttttcatgttaaatatcttgtttggcactaagtatcttatcagtctgccataatgtttaatatctttcctctgaaatggttcctctgcctgcctttgcctttcatgtgtttgtgacttttgaagcatgcatgctaggtatgttacggaatgtcctcagcttgagtccatctgaagtgttcttaagactggattctactgatgctgttttggttggcacaacacggtgtttactattgtggtcgtcaaaatgatgttttatggctaaaccattctttcaacatttaatcatcaaggaaatataaatcaaaaccacaatgagatatcatctcatcccagttagaatttgctgttatcacaaagacataaaaataaatgctgatgaggatgcagatgacagggaactctcctatacttttggtgggaatgtgaattagtatagtcattatggaaaacagtatgcagagtcctcaaaaaactacaaatggaactaccctgtgaaccagcaattccactactgagtatttatccaaagttaaatcagtgtattgaagagagagctgcactcttgtgttcattgcagcattattcacgatagccaagatatggaatccaccgaagtgttcatcaacagacaaatggattaaaaaaatgtggtgcatatacacaatggaatactatttagccataaaaaaagaatgagatctggacattcacagcagcatggatggaactggaggacattatgttaaatgaaataagccaggcacagaaatataaatagcttaaaaagttgacctcatagaagtagagagtagaattgtgattaataatcacaattataaataatggtcagtatcaaaaaaaattgtcattctacagtgctgcagaacattagaacttgttttctctatctagctgtaattttccctcttttattttttttgaaacagggtcttgccctgtcacccaggcatggcataagcacggctcactgcagctcaaacaatcctcctgcctcagcttctggagtagctacaggcacatgccatcatgcctagctatttttttttaattttctataaaggtggggtcttgccatgttgcccaggctagtctcaaactcctggcctaaaacaatcttcctgccgtggtctcccaaagtgctaggattacaggtgtgagccatcactcccagctccaatttttagatactgaccccatttagatacatgacctcagaacacattccaagctcatgttgtatctctcttgtccccactattaaatcagctgtgttttttccaaggaatcctgatttctattgtggagaagcgtacttagaaaccaaggtcttggtgctactggtatgttattgcttttaggcccttccagatatacgggatataaagatatagctatatgtatgtgactatatgtattgtgtatatatgtatgtagctatatgtgtgtatgtgtatatatatcttcatgtatttatagtgatattttccatcccaatctacaccgcagggtttttccttgccttcctatttgtagagcttccttccacattaagaaccctctctcccagtgagtgtcaccccatttctgtttcatctctttccctactctcccccttgcctcctagggtcccctttcctctcatcagttgccagacaagaggagcatcatcatacacacatcatagatttaatattaaacttttaaaattttcagataaatgtaagcaggcttctgcagtgaaaggggccaggtctaggaagatggggaatacttgcaggcacctgggaagctcagggaagctgcaggtaccctgtcagttgggtgtcccctcatgagggtggcagactgtctccttgagttctgggtggcagaaatggcccagggccctgggctgagacccagccaactctctatggggctgccacacgacttcctaaaaaggcataaacacattttcttccaagtggagtccagcatattttattttcctgttgaatggtagacagcatgagagcagggtccatgtgatgatttttctgtcagtatcagtttctgcaagagcaaaaattacatatttttatttttcaaataaaatcaattgagacagtaacaaatttgctcaaagaatcaacctgaacacatgtacatctattatgtatcaataaaaaaatggccaggcacggtggctcacacctataatcccagcactttgggaggccaaggcgggtggatcacgaggtcaggagatcaagaccctcctggctaacgcggtgaaaccctgtctccaccaaaaatacaaaaaattctctgggcgtggtggcaggtgcctgtagtgacagggcgagcttgcagtgagccgagattgtgccactgcactccagcctgggtgacagagcgagactccatctcaaaaataaataaataaaaataataaatttttttctagataaaaaatataaaaattacaccacagtccaaaaaaaaaaaaaaaaaaactgttcaagactgatctttcatagtgattgggtctatgagtaaatgttaaatagatgatttattaggtttctttttatttcaatgatgagatggagaaatatattattttacatgagggcaaaaaatattttatgcatagatattttttattttgcctatgtccttaaattctcagaatatagattattgccttcagaaatctgtctaggttcacctataccttattagaactcagctttgctggctgtggtacacctgtaatcccagcactttgggagactgagaagggaggatcacctgagctcaggaatttgagaccggcctgggaaacatagggaaaccctgtctctacaaaaatacaaaaaaaaaaaaaaaaaaagtctgggtgcagtggctcacgcctgtaatcccagtaaatcccagtactttgggaggccgggccgggtggatcccgaggtcaggagttcaagaccagactggccaacatggtgaaaccccgtctctactaaaaataaaaaattagcagggcatggtggtgagcatctgtaagcccagctactcgggaggctgaggcaggagaattgcttgaacctgggaggtggaggttgcagcgagccaagattgtgccactgtactccagcttgggcgacaaagcaagagtctgtctcagaaaaaaaaaaaaaaaattagccaggcatggtggtgcacacctgtagtcccagctactcaagaggctgaggtggggagccctagtgggtgcagtgagccaagatcacaccactgcactccagcctgggcgacagagtgagactctgtctcaaaaaacaaaaaagtgagctttaataaattctataaaacttttttctagttgagagtacgttactacaagctaacttttaaaaaagtcatattatttgattactaggaactttgcaattagttttgcttcttctggtttttatttttgcctggcacaacatttccttccttggcccctgtctgtattaataatgctgccaggatatactgaatgattttattccagttttttctaccttaattatgttaaagaaaaacaaaagctgggtattagttatagtggtaaggacacattttaatcactaataactattgtaatcgtgaagaaagtccagcatgaactgaactcaactttggtgtgtacagaggtgactgggtattttaaaggaagaatgaagctgggtgtctactggacactggaatgaagctactgcagaggctgaggcagaaggattgcttgagccaggggtttgagaccagcctgggcaatacatcaagacctaggctgggcggggtgccacacgcttgtaatcctacactttgggaggtggaggggcggggggtgaatggcttgagttctggagttcgagaccagcctgggcaacatcgtgaaacactgtctctacaaaaatacaaaaattagcagggaatggtggcacatggctgtagtcccagctactcagggggctgaggtgggagaatcccttgaacttgaggagacagaggttgcagtgagccaagatctcaccactttactgtagcctgggtgacagagtgagaacctgtctcaaaaaaaaaaaaaaaaaaaaaaaaaaaaaagactttgcttcacccacaaagggaaaatcagggaataggagggagttgagttgtggggtagggtatgctcagttgagtcagagaagtaaaaatttaccaaaagtggtggttccatgtaaaacctacctgggattgctaactggtgctgtttgaagttagactatgaccctcgcacagaggccaggagacaggggccctatcttctgctgttggctggaacaaagagtaaattcatttgggaggcttcacttttttcaggcaggctatttaagggggatacagtcaaccaggggatatggccttgagatgctagaatctatgttagtattttgttcaaatatttataggccagggttaagactgactttgtttctttgttttttgagatggagttttgctcttgttgcccaggctgaagtgcaatggtgcgatcttggctcactgcaccctccgcctcctgggttcaagtgattctcctgcctcagcctcccgaggagctggcattacaggtgctcgccaccacgactggccaatttttgtactttagtagaaacggggtttcaccatgatgtccaggctggtcttgaactcctgacctcaggtgatccgcctgcctcagcctcctgaagtgctgggattccaggcatgagccactgtgcccagcgtaagacctagttgagaaggcagctcagaggaacctggctagagtttggtcaagaagactatctctgtcaatcataatgtgtattccaccaataagagtcattgagtctgtaaatgtttttttttttttcctttgagacagagtttcactcttgttgcccaggctggagtgcaatgacacaatctcggctcactgcaaccttggcctctcaggttcaagtggttctcttgcctcagcctccaaagtagctgggattacaggcatgtgccgccacacccagctaattttgtatttttagtagagatggggtttcacgatgttggttaggctggtctggaactcctgacctcaggtgacccacctgccgcagcctcccaaagtgctgggattacaggcgtgagcccccatgcctggccaagtctgtaatcttgattgaaagtttacttttgactgggcatggagctcatgcatgtaatcccagcgctttgggaggctggggcaggaggattacttgagtccaggagtttgagaccagcctgggcaacacagggagacctcttctctacaaaaaataaaattagccgggcttggaggtgcgtgctgatagtcctagctacttgacagactgaagtgtgaggatcacttgagcctgggaagttgaggctgcagttagccaagatccatgccactgtgctctagcctgggcgacagaatgagaccctgtctcaaaaaaacaaaaagaaaagaaaagttgactttttgccagctgttaggaaaacatctgtggctctggagggcggctggtttaaagaaaaaaaaaaacaatcagacatacctgatatctacaagaggataatgagcttagtatggtgtgtgtaggagcctagaggagagaggctgggaggggattcttggggaaaacggtggttgagttggggttcagaggcaagcccctaggtcttaggctgggcacggtggctcatgcctgtaatcccagcacttcaggatgctgaggtgggcggatcacctgaggtcaggagttcgagaccaggctggacatcatgatgaaaccctgtttctactaaaaatagaggagaatttgatggccattcacagtcaagggaactgaacacatcaaagggattgccagaagggcagaagtcctgacttacaggtataaggagaaacagaagaggagacaaggtgtggggtctaccaggtgggcaggcccattgagtagagggtacatggcattcattgaaggattttcatcaaggcagtcttctggtaagatacggggaagtccacaggctaattggaaaacagaaagaatgagatcatggagacaaatttagggactgactccgtctgtattaatttataccaggggtcagccaagtgcaacctgtggctaaatttggactgctatgcatacatgtatggcttgtgagctaacaaagttttttatggttttaaatacttgagccaggtgcggtggctcacacctgtaatcccatcactttgggaggccgaggcgggcgaatcacctgagtttgggagttcgagaccagcctggccaacatggtgaaaccccgtctctattaaaaatacaaaaattagctgggtgtggtggtgcatgcctgtagtcccagctactcaggaggctgaggcaggagaatcatttgaacctgggaggcggaggttgcagtgagccgagatcatgccattgcactctagcctgggcaacagagtgagactctgtctcaaaaaataaaataaataaatacttgaaaaaagcaaaagaatagcatttaataaaaattatataagattcaaatttcacggtccataagtgaagttttattggaatacactcatgcccacttgtttacatattgtctgtgactgctttcacacttcacactacaaaggttgagtagttgtgagtgatcgtcctcaaagcctaaaatatttactctctggctctcctctctacagaaaaaggctgctgatctctgcctgattcattgattgattattatttgaaatggggtttcactctgtcatccaggctataaagcagtggcgtcatctcagctcactgcaacctccacccgccgggctcaagcaatcctatctcagccttctgagtagctggaagcagaggcgtgtgcctccgctcccagctaatcttttgtatttttggtagagacggggtttcaccatatttcccaggctggtcttaaactcctgagctcaagtgatctgcctgcctcagcctcccaaagtgctgggattataggcatgagccaccgtgcttggctgacctctgatttatatggccagatgggggcaggtactcagttgcttgtgcatattttgttgggagatcacaagttagcaagataaaagtgctttcatcacagaggtttcagtctagtagaagttaaatttttgtgccgggttcagtggctcacacctgtaatcacagcactttgggaggccgttgcaggccggttgcctgacctcaggagttcgagaccagcctgggcaacacagtcaaaccccatctctactaaaatacaaaaatctagctgggcatggcagcatgcccgtatagtcccagctactcgtgaggctgaggcaggagaattgcctgaacccgggaggttgaggttgcagtgagccgagatcatgccgctacactccagcatgggcaacagagcgagactttgtctccaaaaaaaaaaaagttcgatttttgtttaataggtgagatcatatgaaacataaatataagtactgatgtagggattgtgctttgtgaatgggtctctgcctgcaaaacattcctgagaagctttctgaagggttcaagctgagaacagaaggatggagaaagagattctgtaagttaggaggcaagaatctgagctaagatttggatgtgacaggaccatgagtggatagggaatgttttgtttcttgagtgggaagtgggaagcattttgggaacaaggtaaggaagagagaggaggctgcagtgtttttaaggagtcctgcccacgccaagaagtctggactggaggtcatttgctttaaacatgtcatctcaagcatgtgtgatctatttggagcaaatataatcaagggaagttttaaacaggagagttttcagagcagtggagtctgaaaagttgccctaaaataaggttgagcataagaaagtccttcttgcttctggaaaaagtggactatgggtgctcactctttggggccagacagagaagaattaaaaatcatgggctgggtgcggtggctcacccctgtaatcccagtactttgggaggccaaggtgggtggatcacgaggtcagttcaagaccagcctggccaacatagtgaaaaccacgtctctactaaaaatacaaaaattagctgggcatggtagcgcatgcctgaagtcccagctacttgagaggctgaggcaggagaatcacttgaacccaggaggcggaggttgtggtaagccgagatcatgccactgcactcccgcctgggcaacagagcaagactctgtctcaaaaaaaaaaaaaaattgtgttatttctcccttttgcacctaatctcccactgaagatgactgcaactttcctgtgaattctgaacctgctgccaaaagatacttctttatattccatgattttgtgtaaaactttgtggtgagaattagagaaagcttaatttgctgcttggcatccagaattaggaggccaagttaggctcccatgttaattttcagaaagcccatgttcctgatatctggtagggatggcggtgctgaactgtgaaggtgttggaaaccagaattttggcagaaacggagtcagatttgaacatggtacaaatttggaccaagggcctagtgatagttaggtcaggaaattggggactgtattggtccattcctgcactgctataaagaactacccgagcctgggtaatttataaagaaaagaggtttaattggctaatggttctgaaggctctaaaggaatcatggctggggagtccctaagaaacttgcatcatggcagaaggcagaggggagtcaggcacatctttacatggcagaagcaggagagagagagcaaggggaggaggttccacacactttcagacaaccagatcttgtgatatatcacaagaagagcaccaaaggggaaatccacccctgtgatctagtcacatcccaccaggccccacgtccaacattggggattacaatttgacatgaaatttggatgggggcacagactcaaaccacatcagggaccaaagaaatattttacttattttcagttatcaatggaatttactgctgatgagaaataaatgtatcttgccagtaacttataaagtaataaaaccggccaggtgcgatggctcacgtgtgtaatcccagcactttgggaggctgaggtaggtggatcatgaggtcaggagatcgagacaatcctggccaacgtggtgaaactctctctactaaacatacaaaaattagctgggcatggtggtgcgtgcctctaattccagctacttgggaggctgaggcaggagaatcacttgaaccagggagccggagattgcagcaagacgagatcatgccacaccactccagcctggcgacagagcgagactccgtctaaaacaaacaaacaaacaaaaaaatcaaaacaatttccctagaaatgtataattattgacactttttagtatttaaaaaattttcagtgataccctgtatttacaaaacaaaacaaaacaaaaaaaacgaaaaagcaagacaaaaacaaaacaggcatggtgatgtgcacctgtagtcccagctactcaggaggctgaggtgggaggactgcttgagcctaagagttcaagccatgatctcaccactgtactctagcctggatgacagagcaagactgtctctaaaaatttttttaattaaaaaaaaatttcatcttgacttgcttttcatgtgaatctagtgtatttgctactttttgataatgctttgcactttttaaattgtaaaaacattacataaaattttcatcttacccgtttcaggggcactaagtgcattcacattgatgtgcaaccatcaccactgtctagctctagaactttttgtcttacaaaactgaaaattgcccattaaataataactccgtttcctcctccccacaccccatcccctggcaaccaccattctacttcctgtctccatgacatttgattagtctggatatctcgtataaatggaatcatacagtatttgtccttttgtgacaggcttatttcattctgtgtagtgtttccaaaattcatccatgttgtagcatgcatcagaatgtacttcctttttgaggttgaatgatactccattgcatgtatgcattacattttatttattaatccatcagtggatgtttaggttgcttctgccttttgggtaatgcaaataatgctgctatgaacatgggtgtgcagatacctctttgagtttctgcttctaattcgttttttttttttttgagctggagccttgctctttcgcccaggctggagtccagtgccacgccatgatctcggctcactgcaacctccacctcccaggttcaagcgattttcgcttgattctcctgcctcagcctctcaagtagctggaattacaggctcaaaccaacacaccaggcgaactttttatatttttggtagattgggggtttcaccatgttggccaggcaggtctcaaactcttgaactcaagtgatccacccaccttggcctcccaaagtgctggtattacaggtgtgagccaccatgcctggccttctgcttctaattcttttagatataaccttgaagtgacagtgctaaatctagcactgtctggtcttgaactcctgacctcaagtgatctgcctgccttggcctccgaaagtgctgggattacatgtgtgagccaccatgcctggccaattgaagatttttattacttacattttcccagaaagggggcatgccacactacaccacatcacgtgaggagcactaggttttggtcaggaggcagaagataggagtgaagggaaaaatctagggcaaagcctttactggggactccaagggaaacacagggcaggtttgagcataggatgggttagtttaaataattctggttggctttgggctacagggatggtctctagtgacttggtttgtgccctgggtatatagaatatgggaaatagtggccagcgagagttagctaaggagttggctgggctacagactgggattggttgtttggcatatgaaagacatgcttatagacaaattgttattatattcgagaattagctagctttgggaaggacattctctcccatgatttgcaaggccctcaaaagccagagcaacaaaaatacagaaaataagatatagttaatataattggcttggtgatgaacggatcccaaatagtcaaacacagaagctaagaaaacccagaacacatggtaattcttctgttgcattttttttaggaaaccacatagtgttttgcatagtggctgtaaaaattttccattcctaccaacattatacaaggttttcaattcctctggtcttcaccatgacttacgttctgtttcttctgtgttttatagtagccatccaaatgggtgtgaagtggtatctcactgtgattttgattttgattttgatttccctgatgattagtgatgctgagcatctttggatgtgcttcttggccatttgtatgtctttggagaattcttattaagacgtttgcccatttttatgtatgtatatatgtatgtatttatttattgagatggagtctctttctgttgcccaggctggtgtgcaatggcccaatctcggctcactgcaacctccgtctcctgggatcaagcaattctcctgcctcaacctcatgagtagctgagattacagatgtgcaccaccatgcctggtcaatttttgtatctttagtagagacggggtttcaccgtgttaaccacgctggtctcgaactcctgacttcgaatgatccacccacctcggcctcccaaagtactgggattacaggcgtgagccgctgcacctggcttggcccattttaaaatcaggttttttttttttttaaagttgattatagaattcttctttttttttttttctttttgatacagagtctcactctatcgctcaggctggagtacaatggtgtgatcttggctcactgcaacctccaccttccgggttcaagcaattctcttgcttcagcctcacaagtaactgggattacagacgtgtaccaccatgcccagctaatttttgtatttttattagagatgtgatttcaccatgttggccaggctggtctcaaaccattggcctcctgtgattcactcaccttggcctccccaaatgctaggcttacaggcatgagccactgtgcctggctgaggagtcttatatctattcggactattaacatcttatcaaatatatgatttgcaaatattttctcccattctgtgtgttgccttttcactctgttgattgtgtcctttgatgcacagaaggttttgattttgatatactccagtttatctatttttgtgtttccttagcttttggtgttgtagtcaagaaatcattgccaaatgcaatgttatgaagcgttttttcctgacagttttatagctttaggtcttatatttaggtctctgatccatttcaagttcatttttgtatatgatgtaaggaaagggtccaacttcattcttttgcatgtggatatccagttttcccagtaccacgtgttgaaaaggctgtcctttccccattgaaggtcttggcacaattgttgaaaatcatttgaccatatggaagagtttatttctgggatctctattctattccagttgtctatgttttgcattctttttaaaaaatatttttagtctttacatttcagaatcagtatttcaaatgtgacttgtaggactacgtgcagtgaggaagattgttaatcatcctattctgaccaggagttctgacaactttggtgctgtaggcggtgtctaaggcaggtgtcagcaaattttcctctaaaggagctgtgtgtgtgtgtgtgtgtttgtgtgtgtgagtgaaaaagaggtgagatttattttaaatttattttaagaaattggcttacatgatggtacagtcttgcaagtcaaaaatctgcagactaggctggcagtctggagacccagggaagagttgcggtgttaagtgttaagtctgaaactagtctgaaggcagaattccctctcttcctcaagagatcttaatctgttttcttttgtttttgtttttgttttgagacagagtctcacagcccaggctggagtgcagtggcacaatcttggctcgctgcaaccttcgcctcccaggttcaagcgactctcctacctcagcctcctgagtagctgagaccacaggtgcacactaccatgcctggctaatttttgtatttttagtagatacggggttttaacatgttggctaggctggtcttgaactcctgagctcaggtgatccatctgccttggcctcccaaagtgctgggattataggcgtgagccactgcacccggcctaacaatgacattttatatacacacaggcacatacacaaacctatttataaaagatgaaatactcaagacaattacagttctgatttctgtaactggtcaggtggtcacagctcatatttgtaattacctttgtctactactcattatgtatttccattgtcctcagcaagcaccacggctggttgtgattatttatctggtggggtgacccaaacctttgatttctgaagggtctaggccagtcatagtcctgcctgaatttcgttgttagagttttccatgggctttggtcacagagcttggttaatcctgaaataccctaagggatcccttgtacttcatatgtattcttccttacttcctttgtgaagcagaagtccagtttctccttggtaatcaggatgagtggcactagccagcacaacaattcccttctttgttgattcaaaggcatgaggagcctaaaagggttagatggcagttttttgtttttatttatttatttatttatttattttttagacagagtctcactctgtcacccaggctgcagtgcagtggcgcaatctcagctcactgcaacctctgctgcccggggttcaaacaattcttctgcctcagcctccccagtagttgggattacaggtgcctgccactgtgcccagctaatttttgtattttcagtagagatggggtttcaccatcttggccaggctggtcttgaactcctgacctcgtgatccacccaccttggcctcccaaagtgctgggattacaggcatgagccaccgtgcccggcctagatggcagtcctaacttctacttcagtccaattactgctatatctactgatggaaatattcctgctgttggaactaagactgccagaccagaagagtatgagatcatggggacaggaaacacaaattttgctagttggtcaactagggatatttgtggagggctgccactcccatttctatcttttggtttctagacttgtcaaccccgactatgggagaaacagcaatatattggacactgactcagacagtatacagcctcctgaaaagccttaccccagtcctgtaaagtattaccaaatagctggtactgtaactgaatcttcaaaaggcctttccaccattctatgaaatcatctgccttaggatggcggggaacatggtaagaccaccaaattccatgagcatgggcccattgctgcatttcctttgctatgaagtgagttccttggtcagaagcgatgttgtttggaatactatgatagtggttaaggcattttgtgattttacagagggaacttttgacagaagcattgcatgcagtgtaagcaaatctgtatccagagtaagcatctgttctagtcaggacaaaacactggcccttccatgatggaggggattcagtgtaatcaacctgccaccaggtagctacctgatcactgtggggaatggtaccatagtggagactcagtgttggtctctgctgagggtagattgggcactcagtggtggccatagttaggttggtcttggtgaatgggagttcatgtggccaaacccatgcgtaaccttcatccctgccatcatggccacttcgtttataatcccattgggcaatgacagaaaaatgagcctgactgtacatatgaaacaggtcaccctatccactttgtcataaaaatcctcctctgctgagtgggcattcacatggccacaaatgtctttacctttttttttttttggggctgatttagaggggtctatctataagtccatctatctcttcccaaggcttccttgtcaccaattttccaatcatgctccttccacattactgaccagccaaaccattgaccacggcctataaattggtatataattgtatatctggccatatgtccttccaaacaaaataaacaaccaggaacactgtcccaagctttacccactgggaggatttgtcttcaccactcttcttcagggaggtcttcagaaaggctctgtagtgcagcagttgtccacttctgggtggtatgtgcatgttttgtagaaccatctgtaaaccaggcctgagtcttctctttttccatcatctgattgaagggaaccccccatgagccataggtgcagctgggatagagaaagcagtgtagcaggagtgggggccgtggacatttgagccacttcttcatgtgacttagttgtgtcttcagatcatgttctggctgtgtaggcttaactttacagctgggctggtaagataacacccagttcatgaagggcagcttaggttacatggtaacttggtgtcctatggttaagcctttagtctccactaatgcccagtagcaggccaacagctgtttctcaaaaggagggtagttaactacagaggatagcagggctttgctccaatatcctaaaggcctatgctgcaacttaccaatgggggcctgcaaaaagctccaaaagacattactgtctgctactgacacttcaagcattattggttcttttttttttaatttttttatttttcgagacagggtctcgccctgtttcccaggctggagtgcagtggcatgatcctggctcactgcagccgctgtctcccaggttcaagcaattctcatgcctcagcctcctgagtagctgggattacaggggtgcactaccatactcagctaatttttgtatttttagtagagacggggtttcaccacgttgactaggctggtcttgaactcctgacctcaagtgatctatctgcctcagcctcccagagtgctgggattacaggcatgagccaccacacctggctgcatcattggttcttgcagaatcatgtgaccatagaggcagagaaatttatgttgcagcctggacctgttgcagaagcttctgttgttttgggatccactcaaaactacagcttttcaggtcattaatgtagcacatgagctgggtgtttgaatccctgagctaattttccccctactttgttcagtgaaattaggtgcaactagacagtctcattatacttgttagtttgacaaaatgtttgaaggtatcatacatgttaacccagaaccttgccttttatacttatttaatttaaagtatctgggctgggcgttgtgggatcccagcactttgggaggccaaggtgggtggatcacctgaggtcaggagttcgagagtggcctggccaacatggtgaaatcccatctgtactaaaaatacaaaaagcaattagctagtgttcttttgattactcgtaattaatgcctttaaatctagttagtttagagtaccaatttcagaaaccaaccccagaactaattcagaaaatttattcttaagatctggttcaggtagagctactcttgctaccgaaatctgtgtgtgttagggttctccagaaaaacaaaatgaactaacaggatgtgtatagtctcagtctctgtttctctttctcagaattggtcatgtggttatggaggctggctagtccaaaatcttcagagcaggctatggattcagggaagagttgatgttgtagctctagaccaagggcagtctggagagaatttcatcttctttttctttggtttgttttctcttatgggtttcaattgaatggatgaggtccacccatattaaagaaggtatctgctttactcaaagtctactgatttaaatgttaatcccatctcaaaacatgccatcgtggcaccatccaggttaatgtttgaccaaatatctgggtaccatggcctagccccattgacacataagatcactatcacagtcagataacaaatgtttagctttgtgggtcatatggtttatgttacaactactcaactgtgtggttgtagtcatagacaatacataaacaaatggctgtggctgtgttccaagaacactttatttatagatactaaaatttgaacttcatataatgttcacatcataaaataaacttttccttggatcctttcctcctttcctcctctccccctttcccccacccaccatgtaaaaaaaaaaaaaaaaaaaaaaagtaccacagccagttgcaatggtaggtacctgtgcatatcactatgcctgtaatcccacctacttgagaggctgaggcaggaggatcacttgagcccaggactgcaaggttatattgtgctataattaaacctgtgatcgtgccactgcactccagcctgtgcaatatagaaaggccccatctctttaaaaaaaaaatatacaggcagcaggcaggatttggcatagtttgctgaccgtcaagggctctcttttctaaaacataggcatggtaagaatatgtgcaaaggccatgggtgaagagctttttattttgttgcttgtgttccagttggtgcattctcaagagtaggtactttcttttcttgttcattctcttcctgagcctatcttgggattttctaagaaggttgctattagtctagtctttttccagctgctccctagattgaggcgggagaggagaaattcagcaaagatttctctctcctcatcaaggctgtcccttgcctgctttcctgtgggacagatggtgcatgtaggcaaaaggctggaacatgttggctgctcctgttacttggtgctttgagcagaaaggcctgttgggttagttcctgggctccagtgctcaatgtgtgtgtgtcctgttttgtgtttttacccatctttctgccttggctttaggtttatatgtttgcatttataaaaacttcttatggaatagaattataatgaagaggagcagcaaagagttgtggttgagagctggcagtactggaatcagaatgcttggcttgaatctgggctcaaatgcttgagagctgtgtgactttgagtacggttcttttcttttctgggcatcagtttcctaatctgtaaaagggatggaaatagggccaggcatggttccttatgcctgtaatcccaggtactcagaaggctgaggtgggaggatagcttcagcctaggaggtcgaggctgcagtgacccatgattgtgccactgcactctagcctgggtaacagagtgagaccctgtctctaaaaaaaataaaaagaaaagatggaaatgaaatagtaactcacacggtttttttgttttgttttgtttttttgagacgaagtcttggaatctcactctatcacccagactagagtgcagtgatgtaatcatggctcgttgtagccttgacttcctgtgctcaagcaattttcctgtcccaacttcctgagtggctggagctacaggcacgtgctaccatgcccagctaatttttgtatttttagtagagatggggtctccctatgttatgcaggctagtctctaactccaaggctcaggtgatccctctgctcagcctcccaaaatattgggattataggcatgagcctgcagtggccatcacatggtttttattttttgttttttatttatttttaattttttatggatctagtcctgaatccagaacatgatttttaaatgaactaatgttaaagtacttagaaaagtatctgctgcatagtaaggatatgtggttgtacaataaataaaaataaagagagctgctcacatagagtgcagatttcaaaccatctagtctttctcgttttattacattgaatttctgcttctgaatttttaattttgttataagaaggatgttagtccctctaaagtatcatttccaatattttgtttatgttccataaattttaaggttattttacttcaaattattttataatgtatatgccttttatatttgttttagttatatcaaaatgcagctttcaaaaatattttagtgtgtataattatttcagattactattagtagaagtgcttttttaaaagacaaatattatatttaagagaccctgccacaaaagtactcctcatggaagggaagatggactggggatgatgtggcagttatacagggaaaacttcacattattttgtatttaaaacataacctgaggctgggtgcggtggctcacgcctgtaatcccagcactttgggaggcagaggcaagtggatcacgaggtcaggagttcaagaccagcctgcccactatggtgaatccccgtctctactaaaaatacaaaaattagctgggcatggtgacatgcacctgtagtcccagctgcttgggaggctgaggtagagaattgcctgaacccgggaggcggaggttgcagtgagctgagatcgtgctattgcactccagcctgggcaacagagtgagactctgtctcaaaaagaaaaaaaccaaaacagaaaaacataacctaattttatattttgttttgtcatacagttgtatttgttttaaaatatctttccaccccttccaaaagtattttatccaagtagcagcacatcttatttccatgtctgggttggactttatttatacttgtctgaaactaaggaaaaagaaagtaatttatatcagttaaaagacctctacttctcaataagttagggggcggaggaatgggtctcaatctaccactcacttttctgctagaatttttttttatattgatacctcccattctttttttattttattttatttattattattatactttaagttttagggtacatgtgcacaatgtgcagattagttacataggtatacatgtgccatgctgtagaatttcttaatgttgcatcagtgtttcacaatgtaatcgaaaactcaaaatagcaatcttccttttttattttattttattttatttatgttttgagatggagtctcactctgtcgctcaggctggacagtgcagtggcatgatcttggctcactgcaacctccagctcccaggttcgagtgattctcctgcctcagcctcctgagtagctgggactacagatgcatgccaccatgcccagttaatttttgtatttttagtatagacggggtttcatcatgttggccaggatggtctgaatctcctgacctcgtgatctgcccgcctcggcttcccaaagtgctgggattacaggtgtgagccaccgcacctggcctcagaacagtttatatttaaaaattatttcaaagataggagagagttcccatgtgtctcatatgtttcccctattaacatgttacgcttgtttcattgatgtaccaatattggtacatttttattaactgaaatttatactttatccagatgtctttggtttttctaaaataccctttttctgttccaggatctcacccaggaaatcacagtacagctagtactcatgtgtctcaaggttgttcttggttgtgacattttctcactttgttttgatgaccttgacagttttggggattactggtcgaatgtttgtagaatgtccctcaattagggtttttaaaaactgatttataattcacatagtataaaatttacccttttaaaatatataattcagtgcttttgagtatattcacaacgtttcccaaccatcctatggttggaaaattagataacctactaattccacaaaatccagaatattttgatcatcccagaaagaaacctcataaccaacagcaattactctcctttcactcctctcccatcccctgaaaatcactaatctgctttctgtctatatggatttgcctattctttttttttttttttttttttttttttttgagatagagtctcactctctcacctaggctggagtgcagtggcgcaatctcggctcattgcaacctccgtctcctgggttcaagtgatcctcctgcctcagcctcctgagtagctgggattgcaggcacgtgccaccacacccggctattttttgtatttttagtagagacaaggttttgccatgtcggccaggctggtcttgaactcctgaccttaggtgatccacctgcctcggcctcccaaagtgctgggattacaggcgtgagccaccacacttggcctggatttgccaatccttaacagaacatataaaaagaaccataaaaacgcctgacatgttgcctcatgtctgcaatcccagtactttgggaggccaaagtgggatgattttttgagtgtaggagttggagacctctctgggcaacatagttagaccaggtctctacaaaaaaataaaaaaattacctgggcatggtggtgcatgcctgtagtcccagctactaaggaagctgaggtgggaggattacttgagcccaggagatggaggctgcagtaagccatgattgtgccaatgcactccagcctgggtgacagagtgacactctatctcaaaacaaacaaacaaaaaaccccataatatgtggcctttttctgtctagctgctttcactcagcataatgttgtcagggttcttccatgttgtttcatgaatcaacactccattcctttttatagcagaatgatattccattgtaccatgccatagttgtttcctttttcttttctttctttctttttttttttggagaacgggtctcactctgttgcccaggctaaagtgcaatggtgtaatcatagttcactgcagcctcaacctccctggctcaagcagtcctcccacctcagtttgggtagctgggactagaggtgcacaccactatgcctaactaattaaaaaaaaatttttagtagaaatggagtcttgctatcagggagatcttggactcctgagttcaagcaatcctctcgccttggcttccaaaagtgttgggactgcaggcatgagccattgcacctggcctcacattttgtttattcattcatcagttgatgagcatttgagttgtttccagtttttaactttttttttttttgagacggagtctcactctgtcacccaggctggagtgcaatggcagggtcttggctcactgcaacctccgcctcctgggttcaagcgattctcccacctcagcctcccaagtagctgggactacaggtgcgtgccctcacacccggctaatttttgtatttttagtagagatggggtttcactgtgttggccaggctggtctcgaactcctgacctcgtgatcagccagcctcagcctcctaaagtgctgggattacagtcatgagccaccaccagttttttagctattataaataaggctgctatgaaaatgcatatacatgtttttgcattaagatatgttctcatttcttttttttttttttttttttttggtgacaggttttgctccatcacccaggcggagtgcagtggtgccatcacagcttactgcagtctccacctctcaggctcaagtgattctcctacctcagcctcccgagtagctgggaccagaggtgtgcaacaccacatttggcttttttattttttattttgtagagacgagtcttgctatgttgcccaggctggtctcgaactcctggattcaagcgatctgcctgcctcagcctcccaaaggattgggattacaggcttgagcccctgtgcccggcccctatgttttccttttttttttttttaaatttgaaacggagtcctgctctgtcgcccaggctggagtgcagtggtgcaatctccctcaccgcgacctctgcctcccgggctcaagggagtctttagtctcagtcccaagcagctgggactgcaggcgcccgccaccatgcctggctaatttttgtattttttagtagagacagagttttaccatgttggtcaggctgatcacgaacctcctgatctcaggtgatccacctgtctcggcctcccaaagtgctgatattacaggcgtgtgaaccaccgtgcctggccgttttcatttctttgtgatctgcttaggagtagaattgtaggtcatatggtaacttcagggttaacatttgtaagcattgccaaactcttccactgtggctgtgctgtttcacatcccaatcagcagtgttagagggttccaatttctccacctcctccacaacccttgtcattgtctttttaattctagccccaagtggcatctcattgtggttttcatttgtacttctctaatgacttaacgattgtgtcttttcatgtgcttattggccattggtatttaagaactattttaatcctttgcccattaaaaaaaaatgtttttgtccttttattgttgaatagtaacacttttttttttttttgagacagtctcactctattacccaggctagagtgcagtggcgtgatctgggcttactgcaatctctgcctcctgggttcaagggattctcctgcctcagcctcccgagtagctgggactacagacatgtgccaccatgcccagctaattttcatacttctaataaagacggggtttcaccacgttggccagaatagtctcgaactgctggcctcaagtgatctgcctgcctcagtctcccaaagtgctgggattacacttatgagtcactgcgcccagccaagtactaacacttctttatacattctggatactacactcctagtagctttatgtttagcaaatattttctcccattctcttggctgtcttttcactttcttaatgtcccttgaatcgaaaacttttatgtaactgtgatgaagttcagtttatttattatttttggttgcttttgttttaggtgtcatatctaagaaactgttgcctaattcaaggttacacggatttatatatatacacacatatatttatacatgtatacataagtatacatggaatatatgtgtaaaatatacacatacacaaatgttatatatcacatttatacataggtatatatgtgtacctgtatacatatataacatgtatatatatgttctataacaagtgacttatattttattgatctattttgagttaatttttgtacatggtatgatgcaagggttctgattagtttttctagtctcctttgtctattctgtacagaatagttttattgcagttttagtgtcctttaagtacataaccttaagtgtttggcttggggataaatgtagactttgggaaaattgaattgttgggagacctatcagggtctactagcatgtcatagtggagtttagtggcaatgtctccttctctgtatcttcactccccagttgtaggatatgttgaatcagacctattattaactaacataaaatataagtgagcctaatggcagttctctttagattttctgtaaagcccaggacacccattgtgacctctcagactccaaagcgaatttcctaatggagtagaacaaacaggaaattatgaggaaaggcagtcagagtttgaaaagagaacacaccagaaacaatggaagataggtccaagaaactagataagtgcgagttgagaattgaatataattttatttaattttaataatactttaattgtaaaagtaattcataatcactgcaaaaagtaccaagcactgtaaaaattaaaaatacaaaacaatctcaaattgtgacagccaagagaaacctaaagaaacatgattataatgtttgtggcatgtaagtttggtgtccacaatggaaaaaggatattaggaaaaaaaagaaatataagatatagaaattagttaaaacaatgagaataaaaaatgaacacccaattcctgctcctagaagaagtagtactctaacatttggtgaagttctaagagccaacatttttacccagcttatactaggacctgttctaaatagtattttagctcatttaattgttaagccattgtataaagtaaacagaatcccttcttttgttacagattaggaatttaatgcacagagggttagataacttgctcaaagtaacattgtggtcaagagtcaaagctagaatttgaatcaaaagagcctgagtccaaaggcatggttttcatcactggactataatggtgtgtattctttcataattttttcagtgtaaaactgaacatacagtatgcttttattttatttatttttttgagatggagtcttgccctgtcaccaggctggagtgcagtggtgtgatctcagctcactgcaacctccgcctcccacgttcaagcaattctcctgcctcagcctcccgagtagctaagattacaggcatgtgccatcacgcccagctaatttttctgttttttgtagagatgggtttcaccatgttggccaggatggtctcgatctcctgacctcgtgatctgcccacctcggcctcccaaagtgctgggaatacaggcgtaagccactgtgcccagcctacattttatttttcgattgactcccgtgatcagagtcaacttcccatgttattttatgtgaatatgtatcaatgaactattagaaattgcaatgtttttgtaggtcaaaacaattcaatattgacaattttatatgattcagcctaatacatcattttttccatcagccatattgcatgttattatttatatatacgtttatttagttagcctatctgttctctgtgaggaacattacacagtttctgagattttgttacgatagaagtcagcattgataagcctctgcgcacctgttttaatgtaggatcattgggaactgagcagtagcttacagggcttgggaggggatttaaccatttagtcaacctccactcacatcaccctcccttcttcgataatgggcaattgagaaagggcaaatgtgtgtaaaaactatgcagatgcagtttcaggattattttcttcttttctgcagtgtcttttcccaagctacatcagcgtctaaattttggagttactgatgcttccgttatttctgcagatagaatattatgtcgtaaataatgtttacttgtccattagtattatataaaagtgcctgtttctccccactccagctatcattgattattggtaaaaattttaatgtatccaattctaataggcaaagaaaggctctcctacttagatcttaggtgggggtctaagttcatatttttgttttacaaaaattgaatagccagtgtttttgagttgaatgatctatccattccgtataggagagtttaattatattgtgattttgggggagataattttcacaatttaccccctcaaaatgtagaaagtagaaaaagggtagaaaaatcgcaccaaatttgaacaatgtagcatgcttttagagttagggatattttcttttggaaggatttcaagtctggcgtatttgcattgattgtggttatggcgcatttaacttttccaaaccagcttttttgtaccgcacataggaagacctgagggtgagtgtaaattaggattgtttggccagtggtgtgtgcaaaaatttattgtagaaccaagaattatttctttagtattttacacattttaaaaaacaggtagacatgtccattgatcccaggttgcttatggtttctagaggccccctctcattgcaacagtgctgtggggccctaggggtccagtagccccctccccccaggtcattccggtgagggagggagctgggacccctgcactgcggcaaacaagcacgcctgcgcggccgcagaggcaggctggcgcgcatgctcaggcggggatgtgtgcgaagcctgccgctgctgcagcgagtctggcgcagagtggagcggccgccggagatgcctgacgcatctgtctgaggagcggtcagtgacgcgatggagcgggcaaggtcagctgtgccggtggcttctctcaagagacagcctggggagcggccacttttattcatcagatattccaagtttttaggacttggagtactgaataaacggaatttgggccctaaagtcctttgttctggagaaccagatccggaatgttcagaggcttgctgttgtgccgttctgccccgatggtatcctgtccgctcgcattggggcgcgtcccccatccgcccccaactgtggtgtcgcgacaggtcctattgcgggtgtctgcggtgggaagggcggtggtgactgggagcatgcggggtaaccgcagtgggcaagggacatgggtggaggtgggtacatcagggtgattgcagttccgtgtggcgagggtacgtggggggaccagtgcatagggattttaggcggaggtaggtatattggagtgattgtggcggggcgaaggtacgtgaagtgatcggtatttagggggtgttgagcgcaggtaggtgtataatagtgaccactgcgtggtggagcagggtacgtggggcgactggggggggaattcgtcgcagtgaccgaggcgaggaggctatggcagtggaccagggggatgagtcggtgtgacagtggtgggggttgtgttggtggtcgcggcgcggggagagtccgtaggaagtggctgggaggtagggggaaggcggcgacagtgggtattggcggcggtgggcattggcagcgggtaggcatggcggtggtggactttggcggcggtaggcatggcggcggtgggcatggcatggaggcggtgggcatggcggccgcggggcctgtcgctgtccggagtgactaagggacgctgaatgattgctgtgtagaggagggggcatcagaaggggcagtagcacagtccgcagcctttaattttcctgtgacctgcgatggtcatctggtttgcctactgtggtggtggtgcttttttattaaaactgcgcaatgcctacactgccgcaggggctgcagaaatgcgtggaatccttgcgtaccctttaggaaccctcgctttagaggctatggcataagaagactggaatgatgtgcagaacttgcatttacagatcttttgactgataggccaggtgatgcctgggggttacttttttttcattgtttctctctgttgggaaccaggtcttggaaggctatgtcgaaataacctgggggtctgtgttgcgtcactgccattgtgcagctccttcaagatggccgccgctgcagcggcttagatctgcgcaagcgcttcagcgggggggtggccgcttcctccctgtagagccgccagtggggagggggcaggtggtgtgtgttcagcttctgctgtttcggagtttcagccgtaccctctttagggtgcagtggtaaggagaggaagccggccaaggtgggcggctgccccctccccaaagtgctgcttgggaaaggatgcaggttgcgcagacgcagcagaggtgacagtcgcctccgcttgcagtggggcgagacgtggggcaggggagcgagggcttacgcagcttttgcctggaaggaatggcagccctccccttcacctggctgatacagcagctgttcctttccggttgtggcgcagtagaggggggaggagggagatgggttggcgcaggctccgcctagcaagcttggcagccaccccttacccacggtgcagcagtagaggactggaggggaatgtggctagaggccaggcatttgtaccacctccgcctgtgtgggatggcagctgcactgggctactgcttttcagctctgcagtaaactagagtggtggcggcctggaggccatcaaaggtgcagccaccccaagacctgctgtgctgtttcagcaagcctccattaatgatagagattttaaattggttttctgactccctggaaaatcgtaccttttcatttttgtagttcctctcttggttgtattgtgcgctaattctctattttcaaactggacttgttaaccccttttttttaactccctgtagtctttgatttccattcgacacatttaataaatgtcaccatttaagattcagttatccttcttaatctctggatagtccattctgatgcactgcatactttccttaaatgggttgggggagaggacatcgtgatggctcttcccgactaaggttgaaaggtgtttcaaacactggacctcttcatcttctgggagttgaaagctgcaagttttgtgctcaaagagaataaaagagaaaagtggagacaatcttattggggtggggttgtgctttggatcagttactgtctttttttggatttttaaattaatgatcatttttgaagttggagctactacaaaaatttggtgagaaaggttaatgaataactgcatttttatattccagtacttttttaaaaaatcattttattctaaggattttgtcttcctttgcaggattttcagtgcttgccttttctgtatttacattttccctctatcataactggtatgtctggttgcactgagttgtaattaacagaaaagttaaatctacgaagcccgaaaagccttgttctggaataatctatttttgggtagttttaaaaatagcaggagtctgggattttatatgatatttataatttacccttttttttctgcttgcatgaagatagcagttcacatacatatatttcttggtttaacttctggtcatttggctatttgcaagctgagtatttagtctgatccgccattttgtagtcttgcattcaggcccgggatcctaatatggcagatccctttggaaaggcctcttgaagtttcaaggtctgtgtcctactcagtgaattggctctgtgctagggctttttggaggcagggagtggcagcccttcctgtgatgcagaggaaggaagcttggttgagagacccttatgttgttgtctaaggcagggtactaactgatttggatttattcacagaccttgccttatcttgatttcactattctatctgaccagtgtgtcattgccgaaatgttttccacatttatagttactctgtatctttatgtttcccttaccctgttccttttcctaataaacatctttgttttacaaaaaattttgtttataaggtgtcaaggatgccaagataacctcctttgtttatcagcgccctctgtttagctattttttaggaagaatcatttaagcaggttgtgagtactgccctcaattacttggacaatgaagttttaaaaatcttatttagacctgtcactggtcctgtctcctttttttttttttttgtggcccagggccagaaagcttgagtgagaattgttactacttaaggtagcctctctccatttctggatgctagctggctcaaagttttttttttttttttttttttttttttttttttaaatagaccagggtctccctatgttgtccaggctgaactcgaactgctagactcaagctatatcctctccctcctcagtctctctctggccactgtggctggcccaaattctctttttgttaattctcctcagatttgttttggaggcaatgaggtttcttatattcatggggtacagattagcagcctatcattaaccttatttttttgtttttaggagacagggtctggctatgttgcccaggttggagtgcagtgatgcagttatagctccctgtaacctcaaactcctggatcaatctagactcctgcctcagcctcccaagtgcctgttagtacaggcttgaggtactgtgcccagctaactttttatttttttgtagagaggggtctccttatgttgcccagactggtctcgaactcctggactcaagcagtgcccctgcctaggcctcccaaagtgctggcattgcagccatgagccgctatacctggccaactttgtttatttttattcttgagatcttagttaaattttatggaaaatttaggccgtaataaaattgggattccattgctttttgcttttcaatatatttccggattattactttcagtgtaagtgatctgagggcaaacatttaacaccctttctatatgatgattttttcatgatgtcctcagtttcataaaatgttggtttctgtgttggggatgcagttagataaatgcatgtgtgtgtgtatctagaacattcaataaagtagtgttttcaaaatcttatagatgacattttatatgtagattaaaaataagtagatttaagccaggtgcggtggctcatgtctatagtcccagcacttttggaggccaaggcagaaggatcactggagcctgggagttcaagcttgggtattgagaccccgtctctacatttaaaaaaaggtaaattcagaaagttgaaataatagaatattttggtttgatggctatttcctcagttgacctcagacctttcatattgagcaactgccgaatgggttctttttgttttttggtaagacagtgtttgcagttgtacactattagattaatcatggtttagttgatagtttctttaattgtattatattaaggtactacattattagctgtatttgtgtgcccaccataatgtagcactgatcagtactaaattcctttttatggctgaaagacattcgtttggatatatcatattttcttcattcgtaagttgatggacatttgagttgtttccactctttggctattatgaataatgctactaggaacacgtataatacgtttaatacaaagaattagtttcacaaggttttacttagccctcgtatatgccaggttcttgaaattttgtctttttggaagtatgagagtagtggtagctgggaaggctgcaggtataatagaaagaacatgaactgtctgggcatggtggctcatgcctgtaatcccagcactttgggaggccgaggtgggtagatcacctgagggcaggagctcgacatcagcctggccaacatggtgaaaccctgtctctactataaatacaaaaattagctgggtgtggtggtgcatgcctgtaatcccagctactttggaggctgagtttgggtcttgtaatattacttcatctagcagtagagttagtgtcatatgttactttcatgattaacatttttaggaagttggcaaagtctatatataacactttatgtttccaccagcagtttccccacatcctttacaaatattgtggtgtcagatggtggcatttcagtgggggttttttcattttgaggcagggtctggctctgtcacccaggctggtgtgccagtggcatgatctcaggtcactgcaacctctgcctcctaggctcaagcgccctctcaccttagcctcctgagtagctggtaccacaggcatgcaccaccacacccagctaatttttgtatttttttgtatagatgttgcccaagctggtctcctgagctcaagtgatcgctggcctcagccttccatgaaccattgcgccctgcctcattgggattttgatttgcattttttagtgactaatgttcagcatcatttcatatagattagccacttgtatgtgtttggaggactgtctattcaagtgttttacccatcgtagcaatagaatttgcccttttattgttgagttgtgagagttccttacatattctggataccaaacttgaaaaaatacttttttgaggtgtgagtgacatacaaaagctgtagatagttaatgttaaaagttgatatgctaagagataagtacatgcctttgaaatcattcttatcaaaattagtggcataaatgtgtctgtcacctgaaaaagtttctttgcctctccctaccttcttttttttcattgtttggattttctttttgtttgttttggatactagaaacttagctgtatgttaagcaaatattttttcctattctggttatcctttcactttctttagtgttttcggaactttattttttgatgaagtccactttattttttatactgcttgtaattcaggtgttatatttaatagaccattgtgtaatcaaaagtaataaacattatcagtgtataaaattttaccatttagaaatcaaatatgtgtgtatggcttgattagaacatttaaactcttgaaagaataaaacagctgtgcgttattggtaagctattttaccaatctaaaagtctaacatgacttaaaaacatctagggttcagagaattattaatagcttttggcatgtatctttgaattttgcttttgagatattacttgtgttactttagtgaaaggtcctgctgacctttctgatttatcatctttaaaggttcataggtggtttctgcagtccctaatatggctagtctggtgtgggatttcatgttctgttcccttgagcagccattttatgaggggttctgcagacgtaacatggcgggttttttgtttgtttgtttgtttttgctatgtggatagtttttagcttgagcagctcttctattgctttgcaaatcctaaagaaagcaccatttgcatgtttttttaaagtagatattttataatttaaactatgttctattccactatataagtatgtctactgtatcctaaaaatattttttgaaaccattttggaaatcaggtttactgtttttggggggaaggtgagtagggtagtggtggtatgtatgtatctacatctgcataagtgggaattttatatgtacgtgactacaaatagaggtagatatattattttaatttcattttctgattttttttaaaaccagattttctgatgtcatgggcttctaaaaggagaaaaaagtggttatagcatagattatgactgtttgaaggttaaagatcttgtaataattttaccttgttttaattagatttaaaaatccattatattaaatgtagttctaaatataaccttgacaaatagttatttcatagattgatgcagtctaccaaacaaatgcctctcttttctgtttcagggatcgcttacacctgagacgaactacagaacagcacgtaccagaggtggaagtccaagtcaaacgcagaaggactgcctcactgagcaaccaagagtgagtacagactgtgttgggaacaaatgcaagtcagaatctcctttcagattagaacaaaatatcatgcaatgaggggattaaaatgaacataattgaagaagcagacacatctaatacagaagatgtagtaaaaaagcaatgaaattcttaaccatattatcctaaaataattcaccctcttaaagattttagtataattttcttttttcctatacgtgggtaagtgcattttatctttataaaattttgtaattacccttcaacataagcatacttaaatttttctgcattattaaatcactttgtatgcttgcaaaatgtactgtgcgctgaagtgattaatttacatattcattcttgctctgtgatatttaggtgtttgtttttggttagtgcatttattctgttaaaatttaaaatacatttgtgttttttatcctgttttaagtatatatatgtggaatgtatatataggatgtatacacagacacactcagacacatattttaatttagatttctagaagggaaattttaattaaaaataggtgaacattttaaatgacctaatacatatttagtccacattgaaactttggcattttgtcattgccattaaaattttgatggcattaaaatttgatgccattaaaattttgatcagtaggtagcatttttttcttagctacaattgttttttttaattataagtattaaaaattcatgaagatgattctttttgtaaaacagttttgcataaaaagtaagtctcattttaaagcaactaccaacttaactggccttttcctccccagagataatcattaagtaaatagccatcagaccttgtcctatgcattgtgtgtgtagtggggagagaggaagggaggacatgggacacatttgaagtttgtgtgcatacgacaccgtgctgtctgtattttgacaatatgtcttggtgatcttttcatatcagtacacataaatctaccttattttacaaagtgtgcgtggtgtgataacattattattgtaatcgttagcttgctgctggatatttagtttgtttgcattgtttggctattaacaatgaaaagaacagtcactttgaaaacgcagtgtaggccaggcatggtggcccatgcctgtaatcccagcactttgggaggctaagccaggcggatcacaaggtcaggagttcgagaccagcctggccaacatggtgaaaccccgtctctcctaaaaatacaaaaattaaccgagtgtggtggcacgtgcctgtaatcccagctacttgggaggctgaggcaggagaattgtttgagcccaggagacggaggttgcaatgagctaagatggcaccactgcactctagcctgggtgacagagcaagactccatctcaggaaaaaaaaaaaaagaaaatgcagtgtatgaatactaatttattttatttttttcaaattaaaggtttttcctcatagtaaaaactgagtagtagtttgtgtgtcttttgttatttcctcattttatatgtgaaaagttgagctggatgtggtggctcatgcctctaatcccagcatgttgggaggctgaggtggatcacttgagcccaggaggtggagaccagcctgggcaacatagagagacctcctctctacagaaaaataaattagccaggcgtggtgttgtctacctgtagtctcagctacctgggaggctgaagtggaagggtcacttgatcccaggaggttgaggctgcagtgagccatgtttgtgccactgtactccagtctaggtgacagaatgagatctagtctcaaaaagaaaaaaaaagttgtaaaacatctgttagcaagttttaaattatggtgagggtaaagattttttttttattttttcctatttattttgccgatttttactatagtgagtatatttaagtacattttcattttttaaaattgctttggaagacgtattttatgtacgttttgtttgtatattggtaaatattttgaaagtattttgtgtaatataatttgtcctttatatataataggttattcgatcattcattttatttgatatgaaatctcttttttcatctcttcattctttttgagacggagttttgctcttgttgcccaggatggagtgcaacctccgcctaccaagttcaagtgattctcctgcctcagtctcccaagtaactgggattataggtgtgtgccaccatgcctggctaattttgtatttttttagtagagacagggtttctccatgttggtcaggctgggctcgaactcccgacctcagatgatccgcccgccttggtttctttcccaaagtgctaggattacaggtgtgagccactgcgcccagcctctcccttcattcttttgcagctctgacgtttttttaaagtgccattactattccctgagtttctagaggtagttcagagatggtggtggaggtagggctgaggtttaggactcttaggtttaggactgttaagtgggtgaaggttctatcttgctatatttttgttacagtttttttcctatgtaacctcagtgtggactaaataacaggtagtctcatcctcatcttgttgtgggatgacgttagccttctaggcatcttgtccatatttatggaaacattttgatggttttgaagaagaaataacttgagtttttcttatctgcactgcatatatatgtacaaatactgcagggtcttgagttgggggaatgatctgagtaaagtgtagagttagggaaatagtataatttttcccccttgtgcgttttcattttgagagtaattggattatggaatgggtaagcaggattggttaacactgcctcattgtccatgtgtttaggattctcaggattggtatacttagaatgttatactagaagtgttcaatatttacccattcatctcctacttcctaccaaatcataagtagtattgggaggcagtcttcctggaggagttgtgtggttattagccctaaagatcaatgaaggaggctgggtgcggtggctcacgcctgtaatcccagcactttgggaggcgaaggtgggcagatcacctgaggtcaggagttcaagaccagcctggccaacatggtgaaacctcatctctagaaaaataaaaaaatcagccgggtgtggtagtgtgcacctgtaatcccagctactcaggaggctgaggtggaagaatcgcttgaacctgggaggcaaaggttgcagtgagccgagatggtgccattggctgtgcctgggtgacatagcaagactccatctcaaaataaagtaaaaataaaaagttcactgatttattttaaattttttattctgtctttcagtgtatttgtcactaaattagctcttattctttggggctggatgatgtatcgtgagttcgaagggaaattggaaattggagctggagagttgtcttaatatattttatgctaagcttcacatgtcttttcaaattaatattctgcactctatgaattaaattctgtgtaggctgcctcattttctcagtctttaatcttctattgggttacaggttagatctgagggggacattgcaatagagaattatcttacgtttcaagataacattatatatatttttttttactgaaacactttttagacctttatgaataataatcagaaacttagttgtcatttgtaaacagaggttagagtggagaatgcccaaattaagatttatttattcagtgattagactatgaattagagtataaagtagactatgaattagagtgtgaagatttagaggtatgtgcagtgcaattctgactacttggagttagtgcaaatttcacagttgtctagatgccctccagaacattcccctcaatgcagacaccaactccaagctccagggttggcagggcacccacacttccgaccaacagtctatagattctgaggtcctactattttctcagactttataattgactaaggttttataaatgactagtagatctcaagaaagtgctatacttactagttttttttataaaggatacaaatgaacagatgcatagagcaaaatctgggcaggtcccacacaaatcttccctgtcctcaggatgcattacctgcacattagcgtatatcaccaatcaggaagctcaccagaactccagatgtcgatgatttttgttggggattcattatgttgacaagattgaatcactggacatgtcactgaattcagtcagcaactctcctgccctcccaggagggcttgctcaaaaccccaaccctttagtctttgtttgatcttttgtggcctggttagtcaccatcttgagacatctcattaccaagaactcaggtgtgatcctagggacccaccttgagtaacaaacacatttctttcactgggtaaattccaaggatgtataggatgtataggttacttcccaggaaccaggagcaaaggccagttaaattctttattatacagaagcaattttaaaatgttactgaaaaaccatagaaaaaagtccaatttccaaatccttacatgccaacaagggcagcattgttggtgatcccccagctcctcacctcaaggcaagctgtcatttcctgtatgtcttccttctcatcatcagatttcacagccaggttactgattcataggggtatgtcgagggcttttgtctggaattccctgcttaccagtagatgattggtttacatattttaagagcccttaaatagccctggaagttctatatttcaggtagtgacttgtcaggaggatcaatatgaaggacggcctaaacatctccctgcaaatgctttagcagcatctccctcccctcacccctggggagaaaggattgttcacacaggataatttgaaagtgagtgactatatatggtactgatggtgtttcttcaaggctgccagctcttgtgtttttagttcttttggaaatatttctagacttggtaagtatcttaagtatccactagtcccttgtacaatctctgtgtagagattcctgttttgtgttataatttctcataagatagtgtcatcctctgaccctaaagaaagatcttcttccctgggcgtggtggctcacgcttgtaatcccagcactttgggaggccaaagtgggtggatcacctgaggtcatgagttccagatcagcctggccaacatggtgaaaccccatctctactaaaaatacaaaaaaattagccgagagtggtggcaggcacctgtagtctcagctactcgggaggctgacactggagaatggcgtgaacccaggaggcggagcttgcagtgagcccagatcgtgccactgcactccagcctgggcgacagagtgagactctgtcttaaaaaaaaaaaaaaaaattagctgggtgtggtggtaggtgcctgtaatcccagctacttgggaggctgaggcaggagaatcacttgaaccccgaaggcagtgtttgtggtgagcagaaattgcttcattgcactccagcctgggcaacagaatgagaccctgtctggaaaaaaaaaaaaaaaaaaaaggaatatcttcttaaatgtaagggtacctagttttctttcatatggtttcctataaagacaaatgtatttttatcatttatatatattgtgctcttgttgtaggtgtcagttgtacccgaggcgttctcagcagcagcaagtacctgtggtggatttccaggctgaactgaggcaggcattcttagctgagacaccaagaggtggttaaagccatattggagtagcgaggaatctgattccaagcaaaaaccaggttagagctaatgcagcaatgatcaagaataaagaatcattaaagaatggggtgttgggggttctcttaattatcagtgacacattaatttttttccttagagcttcatacaataaacacattgcagaaagttttagaaagttttgcaggaccttaaattttctgccctgacactttcgtcatgtttctgtattccagttattgtagcgcatgcttttcaggtagttttcttttgcgttttttttaattatataaaaatatttcactataaatggctcttgaataccctgttactgaatgtttataatttccttttgtgggaggtgtcatttttttctgccagtagtttgaacaaagctttagtagatagctttgtataaaacttagaataattttttcaaatatgcagatgtgaaaataaattgaatcaaggaatatgaacttaaggtacatttttctaaattatattgcaaagtattaaattagtattcattgctttcgaaaaataaagggccagttacaacatactttcacagcattattttaattcaaatatggtttatgtcagtgaattataaatacacagcacataattaacaatgagtattagagaatctaaatactttctcatgcttatttactaattcctttttgttttgtctttttctcacttttctgttttaaccaatgtatttcctctttgaatcagcagacaatgtaataaaaatattattcataatttttcaatgtgatgtagatttatttagttctttttatgttgctttcattttttaggaaaaagttattacaaagtcgattttgatttgttttcttgtttttcctctgtgatttttctttttttctactttaagttttagaatgccctcatttctgagagtttactatttactttttacaaagtaagagcagagaggaattgggtttactgataaattccttctagcctttttttaagtctgtttttgaagtattatccttcaacttgaatcagttaggcttgtttatggccaccattttgagttattaattaatttatttatttagagatgaagtttcactctgttgcccaggctggagtgcagtggtatggtttcggctcactgcaacctctgcctcccaggttcaactgattttcctgcctcagcctcccaagtatctgggattataggcacccaccaccacacctggctaatttttgtatttttggtagagacggggtttcaccatgttctccaggctggtctcaaactcctgaactcaggtgatccacctgccttggcctctcaaagtgctgggattacaggcgtgacctaccgcgcccggcccattttgagtttaaatcaaaggagacagaaattttctgagaaatcctcctttcttgaatcctttatacacaacattttctagcaattgcataagcaaattggaatctaatcattgtccaaagcttttcccttgagtaagggaatttttcattgaataggtgtgcacaactgattttttactttttaggaattttttagcttctcagttcagttcacagatttttgtaaatttttaaatacaacatttaagtcatacattatagtctgcaagtaggaccatctaattttatgatacttaattatatcttattctagtctcaactgctagttctacctaaatagtacccattactagtattcctgtagaagaagggttggtaatatatctggaccactacctgtgtctataaatgaaattttattggaacacaactcagttcatttattatgttatctttggccacattggtgctacggtggtgcagctttgagtagttgtgacagattgaatgacaggcaaagcctaaaatacttagtatcttgctatttaaaagaaaataattggctgagttttattttagaggagcagattgaaagaagaaaacaccaaagtgggggccagtcaatatagtcataatgtcatagaaggtgataaagaatagattatagaagtatatacgaagtatacattacagcgtagacaatcagatgaatttcttggggaagggatcagtctaagagtcatgttaaagtctgctgtggaggaagatgggtagtctttaacaacatttaaacacttcgtacccgttttcattaaaaatgtaaggcacacgatggccaggaaaaataagaaaataaactattaatgtggccgggtgtggtggctcacgcctgtcatcctagcacttggggaggctgaggcaggtggatcacctgaggtcagaagttcgagaccaacctggccacatggcgaaaccccatctgttctaaaaatacaaatattagccgggtgtagtgggggacacctgtaatcccagctactcgggaggctgaggcaggagaatttcttgaaccctaggggcagaggttgcattgagcagagattgtgccactgcgcttcagcctgcgtgacagagcaagacttctatctcaaaaaaaaattgtgttatgaatattctgtttttctttggtacctaaatatttaccagggtacatatccaactggatacctacctagtagttgggatgcagggtgtaatattagtatgacttttaaacgtttttgttacattgttttctaaacacatcatgagaagtgctgatggccactaaaaattagtagaccattagtttctcagtaccaccctttgtattctggtgtttttttgtttttgttaaataaacctttccaataaaggaaatttgttttcttgtgtttttaattggaattattgtgtattaatattttgcatttagttttcttttgtcacttgtttttgcatactcttcgatggaggatctctatggagaccctctataattttaaattttaacagatcaatactgatattccatggtgtgtctcatttgctatgtgtgccttggccaaccctagtcatcttattttactatttgctatgtgtgctttggccaaccctagtcatcttattttacttttgaattaaagtagatttacatttttatgtagtttaatcatttgaaagtctacagtttcctaaagtttgaaaacttgtgcttctgtgagggataccagttcgttaatttgcttatgtgccctttgatctcagaagatacactatgactgctcatccatccttgcagtgtgatgttgctactctcgtcgcctttctcatgaagttttgttttcttgtgctgtaaagataaatttgaccactctgcagtgatttattttcttctttcacttacaaggtcatgactacattgtatcacatttagggatgagagagaactgtttctaaattccaaatctgtctcttaagggaatccttttaactgctgtaggaggtcaactcctattgtgagtaaaacatatatctcttctagctatacaggttattattatattatgatatatatataaatataaaataataatctgtccctaattctctaggtcttcagttctttgggccataactcacatccctagatgtgtttcatacctctggaccgctaagcttgtgggagttatttatatcctattgctcaaggtcattgccaaggtctgatttttcacaaaaaaattccaacctctggcataaatgggttaaaaacggctttagtgatgtagtgctgataaacataaaattcacccaatttaagtgcatgaagcaatgatttaagtaaatttacagaactgtgcaatcattgccatgaactactctggaaacattttcatcaccacagtaagatctgtcttgctcattcacagtcatgatccttgttgtctctttggatggctgaaggtcccaagtgttgcagtgctataaaaatggatattgctggctgggcgcagtggctcatgcctgtaatcctagcacttggggaggctgaggccggcaggtcacctgaagtcaggagttcgagactagcctggccaacgtagcgaaattccttctctgctaaaaatacaaaaattagccgggtgtggtggcgggcgcctgtaatcctagctactcaggaggctgaggcaggagaaccacttgaacccgggaagtggaggctgcagtgagccgagatcactccattgcactccagcctgggcaacagagtgagactctgtctcaaaaaaaaaaaaaaaaggatattgctaatgagtctcatataccatgttttcttggatttagactgctttataaagaatcataagataatattcaaaacttctaagttatagtccttaaactcttactcatatttaggacagaaactacatttaatttttgtggaggtctttgtttgcttatttgaaaagttcttttgagatctttataggttttatttaatacattttttaatgtacagacatcagattcatggccactgaatgacagccaggcattagagtattctttttttttttttttttttgagatggagtttcactcttgctgcccaggctggagtgcaatggtgcgatctccgctcaaaaagatacttttgaatccttttcaaaagtaatttgtgtttcattttttaattagtatgataagcacttcaagaccctttacaattctggctagatttggttgccatatttaatagcattttataaataatggagaaaagggaaacattatgcatgcttgattacggtcatgagctgcattaacaattccgttcaacaacagactgcatatgtcagagcagtcccttaagattacaaaaccatgttttcattgtgccttctctctcttccccaccacccccaaccctgagatggagtcttgctctgttgcccaggctggagtacagtggtgccatctcagctcactgcaaactctgcctcctggtttcaagcgattctcctgcctcagcctcctgagtagctgggattacaggcgcctgccaccacacccagctaatgtttgtatttttagtagagatagggttttcgccatgttggccaggctggtcttgaattcttgacctcaggtgatccgcccacctcggtttcccaaagtgttgggattatgggcgtgagccaccacacccagcctcttctctgtttaacattgtattgtgagtgttcatagtatgcaggatagtaacatgatatacaggtttgtagcctaggatctaccatattgcctaagagtatagtagactctgtgtatcctctaggtttgtgtaagtacactgttcatactgtgatgaaatcaccaaatgcatttctcctaatgtgtccccattacgtgacttatttatttattttgagatgaagttttgctcttgtccctccttgttgcccaggctggagtgcagtggcgcgatctcagctcactgcaacctctgcctcccaggttcaagcgattctcctacctcagcctctcaagtagctgggattacaggcacccaccaccatgcctggctaatttttttgtatttctagcagagacgggatttcaccatgttggccaggctggtctcgaactcttgacctcaggtgatccacctgccttggcctcccctggtgctgggattacaggcgtgagccacctcacccggccgttaacgtgatttataactttgtccttcattacttgatctatgaaagttgtttatgtgagtctatatatatatattccatagtcatgtgttctcttttgacatgggaagtcttaggcaggtttataacacacttggctcttagtggggaaagattacctgccatcatcttgaagcgaatttaggggaagaaagaatattgcaaatgacaacataggtatttcagaaaaaaggaaaaatctgaatgaaagagtaattgagatgttgatacagagatgacttcatattaattctgaactagagagagagacactaccttaaataaggatggaaagaaaaatactaaatttgggaaaatgacgcttagtttttgaaacatttaggaattactaggtaaaataaaattcaatgactttcatcagtcctaagtgtgtcaaatgtgagagttaagaatgagggactagggaaatgtggcagtcccttggtgaggaagctagtatgagaggaaggatgtttttgaacgtgtctgtcatagtgattttcatgcaaaattgtctgcctgttttaaaacatggtagattgcagtgcagctttaacatgctttcctctgcaggctccatctactctttgaagcttctgcccagcttgcattgtttctaggagaacctgcgtcatacctttatctatagccttcccctaggtcttcagaagcatcaagttttaactgtggacattggatttggtggaacagcaatcatggtaagctgtatgataaggctgagggttgaaatgtgctgtaagggccgaaagaaatagtttgccagcatgtgcagtgatcttgggttctgaatgttagaaataaggatacatccatggatatggattctcattgcattgagtatcagctgaagatgagctgatttttttatttttatttttttcagacggggtcttgctctgtctcccagtctggagtgcagtggtgcggtcttggctcactgcaaccctgggttcaagagattctcgtgcctcagcctctttattagaaacagggtttcactgtgttggccaggctggtctcaggctcctgacctctggtgatccacccacctcggcctcccaaagtgctgggattacaggcatgagatgagccactgtgcctggccatgagaaatgtttcatgatgtgagaaaatacaggagtttttggtcatgattccaccagtggtgaaggactgtcctgcagatgatggactctcaggtcagattacaatagaaataaagagggctttgaaaatggaagggttttggcattaacagtacagagaaaagcagtctggagagagagaacaccctacatcattgtggtttggtttacttaggggagtggacagtttagagcatgcatcgtcacagagaaggataatcacctgtaaggaggtgaaaattggttcttgagatgtgaaaaaatacttcataatcctttgtggtcctccaaagagccatactaaatatggaagaatgttggtgaaaaaggagagaatatttgtttagttaaggaaaccaggcttagattatgtaagggtggagaagaaacaggagaagattagaagactagggtgttggcaagctgaacatgactcttgtcttactgcttctagactgttggcaagagtagcaagatgctgcagcacattgactatagaatgagatgtatcctgcaagatggccgaatcttcattggcacctttaaggcttttgacaagcatatgaatttgatcctctgtgattgtgatgagttcagaaagatcaagtaaggctgatttgggcaaatgggggttggacacagaggcagtgggaagggaaggccagagctggagtaagggatttccgagggtaactgaagtagttagggaaactatggtagagccagtctattgtttaacctcttgacctgatctctgaattaggtcagagtctgcatctgaactcttttaagtttgtaaaacaatcatggatttattactgggagtaaaagtatatgctatggtcagaatactcgtatttatttttaaaattgagaaaaatgctatattaattaattggttggcttctgcagcagtcttagaccaaatcttggttgaaatggagaagaacagttgttcttcatggttgaggagttgggatatggttgccatttggtatcctctctttgcctatcactgttcccattatttcagttctgtgtcacctgtcattatgatttaattatttaagtaattttttaaagaaatttccattttaatgtggaaacccaggtttcaattttgtttttcttaaaaggtatttcacaaaagaaattagtcttgttgtagtgtaacatcaaaggaacattctgtaaaagactaaagttagattagaaaatagcttcactatttacccttgtatattaactgtgtttacagatattttttggcttgtttttcagtgataactcagtaaatgtttagcatcagttgtcttaattgatacttgaggttgtataaatattttgatgagtgagtgatcactaaaatttatctcactaaaatttaattctgatttgtaggccaaagaatgcgaagcaaccagagcgtgaagaaaagcgggttttgggtctggtgttgctgcgtggggagaacttggtatccatgactgtggaggggccaccccccaaagatgtaaggaagatgtagggcaggacagaactttaatttgcagggacatcatattatgtgagatgtctgaaatcagggtagagcagacacagttcaacatggattgtcaaataaaatgtgccaggcacttaatatcaattgttggttgcctatgctattcgggattaggggatttttggtgaattattctatgtgctgggcattacctaggtaagggtaggagttggtgattcatgtttgcttggtatgtttataaaagaggtgttttcacaatttgacaaataatgtgcattttatacacaagatacctccatggtatacttgcttgtttgttcatttggacacagaactaatatgagataggtgtcatgggaaaatggtggagagaagtgatctctgatgaataagaatactgagaacttgtaaattgtttgattttaggctatgaattttcttgtttcagactggcattgctcgggtaccacttgctggagctgctggaggccctggggttggtagggcagctggtagaggagtaccagctggtgtgccaattccccaggcccctgctggattggcaggccctgtccgaggagttgggggaccatcccagcaggtgaggaaccagcagagggttttatattattgggagaatatgactaagccggaggccgaggagatttaaaaacctaagtgtatgtgtcatacaatgtaaacagcatatggtttaggaggaaccaaaacacagatatatgggaggaagggaataaaactagctgcttaaaatggtcattgggtgattaaagttacccaggttactcttggcaagagtaacttgccactagtggtgagtgaacagaatgcatggatataccacagttgaaaagaccaaagggctttttggatgtcagtgtactaagattagtttttaaaatatgggaataggccgggtgcagtggcttacgcctgtaatccagcactttgggaggccgaggtgggcagatcacttgaggtcaggagttcgacaccagcccggcccacgtggtgaaaaccctatctctactaaaaatacaaaaatcagctgtgtgtggtggtgggtgcctgtaatcccagctaccaggcagggagacaggagaatcgcttgaacccaggagtgggaggctgcagtgagctgagattgcgccattacactccagcctgggtgacaagagtgaaactgtctcaaaaaaaaacatgggaataatgagagaagtacattgcaacagttgtttgtaactaattggtcatttttctcatttattttctgtgtttgaataatgtgaaggtttgcatcgctttgactgtttcccgccctgccttctcaggtaatgactccacagggaagaggcactgtagcagctgctgctgttgctgcgactgccagtattgctggagccccaacacagtacccaccaggacggggcactccgcccccacccgtcggcagagcaaccccacctccaggtaagggattggtgaacacgaagacgaacttgaatctctgatgagagatagcttactgatttaagacacagcctgagagcctaagaatttggggaatatgcttccttcttctagatactggtttttaatgaaagacatagaagagtaattgtcatatagaagttatttgactctatcattgttgtctggcccatttctttagggattatttgggctaaattctaacttttctaagccattttatgaggcctttatttctaccatttttcactgtaggcattatggctcctccacctggtatgagaccacccatgggcccaccaattgggcttccccctgctcgagggacgccaataggcatgccgcctccgggaatgagaccccctccaccaggcattagaggtgagtgggagcataggggtttgatggttcagccaggcccctgaatatgtgtatcctctttttctcaatgtttctatttcctttccaggtccacctcccccaggaatgcgtccaccaagaccttagcatactgttgatccatctcagtcactttttcccctgcaatgcgtcttgtgaaattgtgtagagtgtttgtgagctttttgttccctcattctgcattaataatagctaataataaatgcatagagcaattaaactgtgaggtactgttgtatatatttttttgcctgttgattttgatgagatcttaagttactgtggatgagggtgatgcctattaagcagttgattcaaatcatattctctttaattcttaggataaaaaggttttctgctatctaactttcactttgtgcattgactggtgttggttaataatgttttcatgacccgggggtttaagtggttgtgctgcttcacacatggcctcctgcttctcatgttgctatgtcacattatctgaagggaagtggggatgggatgaaaggccttgtaaggccacctatatactgaaggaagttgtagtgaatcacagtccatgctcattacatatcaaggcatttgaaatagaagttactctttttcttgggatgttgacctcagttgatcaggttttacagtgtcctatgatcagaatagaggatgtgatactggaataatcattttctaccattgagtaagtatttatttataaattactaaatgagtggaagatcctgggtactgggaggcaggaggttgcatatttgagttgataagttgtactactgataataaagataactgacacactaaaacatacttggtacactgaaatacaaattacggttatgtccagtggtatcaccaagtgacaaactgggagctaaatagttcagaaatgccctagtctctaggtccagtttgaattggttatggaacaaagaagccatttataaaagggaagagatttttaggttttgcagctaaggtttatagtaggcagcgagggaatgattcatagtgattgtagcagttggtttaccaagcactaaagagattggtgttaactccataatactgatagactgattggaattacattttttctcttgaatttaccaggagtggttgtgaatgtcaccttttccatcttttaaattacatccttgcaggtggtaatcactcaaggaaaaggaattatcagagtaacaatagttcctgttactgacttgatatggtctctgccagaatagcttctcagattaatggccactctcaggtaaggaaaataaagaggcgaagccttagttgctttaggagatgatataatacaggtgtgacatcagtgttttcagaatttgtaaatgttaaaacaaacttcttgatttaccaaagccacaaccaaagtactttacctggatctttcaagacagagcttctcagttcagacaaattgactgatgataagacaaacacttttcctctacaaaccgtggggtagtatgtagagagacctgtgatttcttcccatactgctctggaactacttctaattatacttttttctttgtttgtttttgaaggggaagcatttctccttgcattggtttgctggtatggatggcccttagattttggcatgagtgattatgcagcctatttgaagaaaacctgttttcaggacctttttaattaaatatggcctgttacatgagttaaaggtaagttataagagctctagattctgcaagatgcttgcttcttgtagttattttgcttggtgataatacattttcttttgtctggagcttcctggactttttgagaatcctgattgtgatgatataataggagaaaacttgggatatagatagtataattgagtgtggtgaatcttttgttatggaatgctagtctaagcttctgtgtgtttccactagggacacacatcaacatatcagtcttaaaacattcttggtagttaatgcttgatgttacttaaaaatcatcctacattcttgcattaaactacatacacgtggctgggcgcggtggctcatgcctgtaatcccagcactttgggaggccgaggcaggcagatcccgaggtcagaagatcgagaccatcctggctaacacggtgaaacctcgtctctacaaaaaattcaaaaaattagccgggcgtggtggcaggcacctgtagtcccagctactcgggagcctgaggcaggagaatggtgtgaacctggtggagcttgcagtgagccgagatcgcgccactgcactccagcctgggcgacagagtaaaactctgtctcaaaaaaaaagaaaaaaaaaaaaaaaagaaaatacatacatgtctcatctaaaacatggttggtcaacaactttctgatttcctgatacacattttattaaccggctccttaaatatatccatgttgcatatcatgtttgacatgctttcattgtagcttatagaataatttcaaatagaattttgggataaaaattatgctaccttaaaataggttatgaagtatttgaggtattctctttttatatgataggtaaacttggcttggaattaaaaagattttgaaagttgcttagggagctccctgcttttgtgaactcattattccttaattatgatgtcaaatttcagaagtttgttattaacataccggtattttgctttttatagattcttgtaatagaatattacaagtagaaactgatttacatagataattatgtgaaatagtgctgcttgactaggattttcatgatctcatttcaaagattagcaaaaacaccctttacctggtatgtttacctctgatactaccttcactgatttcagcaggtagtcagttataatccatggattgaagttttgatttatttatttatttatttgagacagagtctcactctgttgcgcaagctggagtacagtggtgtgatcttggctcactttagcctctgccttccgggctgaagcgattctcctgcctcagcctcctgagtagctgggattacaggtgtgggccaccacacctggctaatttttgtatttttggtagagacagggtttcaccatgttggccaggttggtctcaaactcctgacctcaggtgatccgcccaactcagcctcccgaagtgctgggattacaggtgtgagccaccgcaccccgccatgggttgaagtttttaaatgcatgttttccggtagttaatacattgcttgattctgtcttataattgcatttcagttctcttcatcttgtccatacacataataatgcttagtatataataaagcaaggtatattttcatgggatttttgtagtgggagaatgacatctgagcctgaaataggatatttgtgttgtaactttttcagtgtcatacgataccattttttgaccacttagttgatgcctctgaaaggaagagagaatcagatcgctaaaatttgatgtgtcgtcagtgtggatcctactcagtagtgtcacaacgaggctgaaaatcatattaagtgcttttaggacagaaacgtaaactgctcaggtaaaataaccttataaagagaaataagcatatattgcagaggccttggctaggttcatgatgacacaggaccttgtctgaacataatgatttcaaaatttgagcttaaaaatgacactctgaaatccagtcagtgtgcctcactagacttttcgatttcaagattttctgcagaaaatgttttgaaaactttgaatacttaaaaatggcaggtgtagtattgcactttgctagttgctcagatacccttttttatttgtatagatattctgagttcctttttttttctacatgttgtacgttgtcgaaagctaaaaggaaacttatccttggatcacggaaggcagaggcatttggtgagatggaaacaaggatgtgtaaaaatgagacgaccacctctcggattaaaaaaaaaaagtgccagagttctagggttctaagtgatgtccaggaaggaggaggaataatatttatggagcatatattatggaacacagtgagtatagtacctgcctttaaatgaatactgttggttttttaggacagttgcttttttttcttttttcttcagctgtgtgcagttgattaacttgtacagagcctatcacacaatagatgtttaagaaatattaagtgaatgaatgaggcagcattgctaatttttgtatagtgagacagtatctcacagtccaggctggagttcagtggcattaacataactcactgcagccttgaacacctgagctcaaacgatcctttcaccttatcctccagagtagctgggactacagtcgcgtgtcaacatgcctggctaattttagttttctaatttttttagagttgggatctcactatgttgcttagactggtcttgaactcctggcctcatgccatcctcttgcctcagctggtattgtaggtgtgagccactgtgccaggtactaattttttttatgttagaaaacaagtttttaggtattttatagttacttccttatgacaatatctcatcagaatctaggcctatctgatatctgactccatacgtttataccgtgtagtcagccattcccagatagaggtcatttgagttacttagtgtttaccagcacttgtttactaccttgcgatgatatttacagtgtatttttgggtatggttttggggttatttggttgttgttaaaatgcctgtaatcccggcactttgggaggttgaggcgggtggatcacctgaggtcaggagttcgagcccagcctggccaacatggcgaaaccctacctctactaaaaatacaaaaattagcctggcgtggtggcaggcacctgtaatcccaactacgcaggaggctaaggcaggagaattgcttgaacccgggaggcggaggttgcagtgagccgagatcgcgccaatggcactccattcagcttgagtgacagaggtgagactcccatctcaaggtaaaaaaaaaaaatagaaatcagcaactgctatttgagtttacaggagtgagaagtcctctcttgcatggtgagatggggaacatttaattcaatagaaatatttgagaccaggtatggtggctcaagcctgtaatcccagcactttgggaggctgagttgggtggatcacctgacatcaggagtttgagactagcctggccaacatagcaataccctgtctcaaagatacaaaaattacccaagcttggtggtgtgtgtctgtaatcccagctactcaggaggctgaggcaggagaatcacttgaacctgggcggcaaaggttgcagtgagccgagaccatgccactgcactccagcctgggtgacagagtgagactccgtctggaaaaaaaaagaaaaaaatgagatataaagttcaaaggatgtatttattaagccaatataaagtaaagaggtggggaatgttgtagaagtatatgttgataaagggatcaggtggttgtacaataagaagggggttgcagacatggagaaacagttcttctagctcttccactttcagtatcatctgtgtgggtcactggaatcctttttcacaatgcctgcttgcccatgagttttaagaactagtacagtgtagaaatgattagtaggaaaaacttggctgggttaatttgctttgctgagccgattcaacttaaaaagcgaggtccatactaagtgcccaagaatcaagaaggaggctcacatttgaacttgatgtttagttaatgtgaatcattttctgttgaactaatgagaatacagtgaccttgagggttaggttgtacatctgaattgttcgggctgtttcctgtcttttggatgttttgtttgtatagatattttcattttatgttacatcatttgttctttggtagcaaaaattgagttgaaatgatacagttcctgaaatctatgatttcatgtttcggagatatgtatcaggaataatagtgtgggttctcatgagaaaatctggattgcattactgtgctactttggtttcttgtcagagaagttagtagtttagacctccttcagaatcctttctttggactttgtgtttcttacgttgtgccagccttgattttatttgtctgtcctctgtctttctataccatttgtttacacttaactctagaattttttgatgcatgttttcagtgtactctagtcctaaaattggtttacatttaattattggggagaatagcaagttgtcgatagtatctgtggtggcattagtgtatttctgtttcagttctttggacagtttgctagtggaaatagtcattgtatttagctctgtgagacccgactggcagattgctgtctctctctctctctctctctctctctgtgtgtgtgtgtgtgtgtgtgtgtgtgtgtgtgtgtgtatgcgcgcccgcgtttgtttccttcatgtagattgctgtgtgtgtctttttcttcataattccccttaattctgtgtgctttgaatgacactgttgttgttactgttgttttatatccattgtcacataaaactcttatcatttattcttccaggccagggactgtccttatgggtagagatacactatctgcaggaatttatttttttacgtatttttactagttgatgggaaagacattgggaaagacctgggctggatttgtgatgagctgtgtttactgagcatgatgaagtaaagctcaacgtgattactctgaagtccagccttactgtcagtctaaggactcaggatacaaatactcaaaacataaattcttagactctaaatttcacatggtttttcctatcagtacaggttaaggataatggcgtgttgtaggtttttccagtgcaatacaaggaagttggttctagatcctttagtacagttaatgttttgtagagtgtgttctatgttcactgcattggtatgtctcatctttggcatgatcttggctcaccgcaacctccgcctcttgcattcaagcacttcttgtctcagcctccagagtagctgggattacaagcatgtgccaacatgcccggctaatttttgtatgcttttgtggagacaggctttgccatgtttgccaggttggtctctaagtgatccacccgcctcagccccacaaagtgctgggattacatgcgtgagccaccgtacccagccacacctttgcttatttctactatgcatttcaagtgatcatttcaagagaataagtacttaggagctcctatgctctttttttttttaaccctgttgcttgcatcacccggttccaaccctatatgaaagtttcatgagcatgtttctgtcactgaggcagcttctccatttggcatataattgagaaattgctagtttgtggctgagacattggtttgagaggagacgtaatttatatatttagcagaatgcttaagttacatttccagagattaatttaattctacttttaattaagttaaccctttgctgtatctttacaagacgtaggtggagatttaattttgactcttagattcagttaaggtgatgaaattggcattatatagtttttgatgctgagccccacggagattaaaagatttgctaaacaccatgcaatttttgaatcacatctctaatctcacattattctgtactctattttttgcttgtatgattgatgggtctttcattatctgtgattgacattctatgagtaggtgcttttgctttgcctataagtcgttattatgaaggaggaatggtgaataagaaggtaatttagaaaagcctatattaaatataccatgaacattgaatatagcaagatcttattctctagttgttatcttagttgataaattctgtatgtgttatgtgtttgtgtatacatatgtacatattaatgatgtgggtgttgatactgtgatcacatgacaaatgactggtttatagtgaaaagctgttggggttcagagaaatgaacattcttctaaaagtgaggtagataagttattttatagttcttgcctttgagtctctgttcttctggtagaaatgttagtgtatttataacctctcagatttgtttggttctcttagtgttcttgatccaggcagttagcgatatgttggatgaattgagaaaaatgagtttttcctttcctactaactgaattagattagaaataagcagttaagtgagaaaaatagggaattagtgccagatatgttgaggtgtagtgttgacagggggtcttttaccttcagatgtttggtgcaacttagagaatgcagtggtagttgctggcccagcccatccaaacaacctcatttgtggggtgatacttcacagatgacttaaaataaatcccctgaaaataagaatctctggaagagatgacacgtgtatgtgcgtgtgtgcacgtgtgtgcgtgtgtgcacgtgtgtgtgtgtgtgtgttttggtggagtggtaggaggagggttggcttaatgatgagaatcattatttcttgaattggatgacactttccattcctgcaaagggagcgtgaggtccagccttgctaattcatgatcaaagtaatttgctgagagtagtggaaggaatgagttagcagaagatggcaaattgcattaatgagtagtaggaggaaaacaaataagcaaattttaatgtggttggaacatgttcctgagttgtatgaagggagacaggtaaattgagagtaatgttatgattgtttcatttgttggaaataaggaaaacttgcatggtttgaattgtggaacaataggtggtgtatgttaggagtcagaattatcatttaacatgtaagtttctgttttacttcagataaagaatgtcagctacctttcccatgttagcttctataccttttcttgaggtgaccataaataggtaatattgtctttcactgagattgttttaattagcgaagtgtgctgattaaatgtcttttcttgataaattattagaatgaataaaggatggtatttctagatagccttggttagtcagtgatttgtttaaatttagtgtggataagaatcacctgagggctttttaaacacagtttactgggtcctgaccttagtgtttctggcttattaggtataagtatgagaagttgatttttatcaagtttctagatgctacagatctaggaaccatacttagagtgctattatatgtcttttaatgtacactgatatggaaaaagcaatgatacatcatgttatcgcatattttaaaatgtgatcatgaccagggaatcttgaaagttgtcttatgtaataatgtaaatcaatgtagaataccatatatttttttcttgcaaggttattattaataggaatgactatttgtagccaatgtgttcaaatgcatgggaggacgtaaacacttcataatttcctggaaatacagacatatatcacttaaaataatacatttctaatataaatttaaattatctacgtgatatgaggaaacgagcttatttttgataattttcctagcagtgaatcaactatactcatttgaatctaaattaaattaaatttgagtaaattcagccatttctaaattcagtccatataaattcactttgggtaaaagaagacaaaattcctgaaaacagtagattaaaaaaataacattttaagagcaggtatgatctcaatgaatatagtgtggtaatttctgcctaatacctacccttttggaggaaggaaaggtaatcctgtttgtgtttaatgttaattactgaactctttataacttgttttatttatttattgtttgattttaagcatctgcttctggtggacttacatatgttgggtttgggaaatttcaacatacaggttggcattccagtggctatagttgtttcttgaaatttagtactgttttccaatgatgattctctttgggaataggctgttctcttttacttaaaaactgtaaaattagccacttcagttgagactcctccaggtttggaagtggtgaagaatatggatatattcagatcaaatcagtcattctctgtgatacagcaactgaacaagaaacccagacttcaaacaagcagacttctttgggttggactgaataaaatgagaagaaattacagaggatttgaaaatgtatatggcctaggaattattgaaattattttggagggtggcaacaaatttgggacattgtactttctgttttaatgtcaattgtataatgtgtaactctagtgagcatggctggataccgtggcttcacattttaggtagactgggtgttttatctactgagtgaattacagccttcggcaatgatgtcaaggtagcaacaaaacccaaaaaatccatcctttagaaattgttttaagtcacaatgatgataccttctttaaaagctttgacttactgaaataatgcttttcatttgtccaagatgagtacatagcagaatttggaaatatggttccaaaaggctaaatagactgacttttttgatatttttcccttatagggagaaagaaacattaacggtttatcagatgccttgactgtactttttactgctttgtcttcaaggcctagtgtaataattaacatctagtatgtgtttgatggatagccaatttttgcttcattggtatgttgttaccacagtcattggtagagtcaatatatgaatgaagaaagtataacaaatttgccctctagtagagtacaggcaaagtatggccgtcagtttcaccctgattttttttcctccattcttttttagggtttaggtcaagaacaagggcatttcattgtaccacatagctgagagtagggaattgggacatactgtcttgctttaaattaaagttgtctgtttcatcaagtagagaggttcctaagatattgccagatttctgactcggggtttgttaaaaatagaaaaggtagttccttaaggttgtattttattggatgcctccacctgcttcaggctagctcactggagaataaatattccaggttaaaaaaaaaaaagcatgtgttcacgtgaacttgtcctttgagcaaacctgttggaaatcaagaggtcattgctgttggagaggataagagggtgtacttgttggtgtgttaagagtagttcacaacataaaaataaatgtaaatgcatctattatatttgggttggcaaaatatattggttatttactctgttgattcctgtagtgtacataaatatgatctacaactctgtgaacaaaaaggcttgaaaaattgttctgaaaatggacaaatcatgaacagataattgaacaagaaaataagcagaaagtaaatttgtgaaatatttcaaactcatttacattcagaaacatctttttaagatcactgtgatacattcgactgtcaattctgaagagacgtataaaggaaatgccagctaaggagcaaggaaacagctttcattcatgggctaaattgcagcttaaaaaagatggaccaggattatttcctttagaaacttactgtacaaaagatactgttcaccccattagagaactgatttgaagttactcttccctgtgagggctctgtcatcttaactgtattcacatactttcaactgttccccttgctgctaacctcaggttctttagttcatctatctggcagagctgatttggggaaaacaagacaaaccttctcaggttttcttaataaataagcagttgtcatgtttcaagagttttagaaatgagcaataatcaaggaagaggacaacgattgcatacgtttataatatttagaacatcttttgccacaataaacactggaaaccacccacttgtggacaccaaacatttggatttgtatattttgtggcattccctcactctaatcctctcatccttaaaaattttcagaaatttttgcagcaacaaacactgattgcaacatatgatttagggtagatttatgaaccattttttcactgaaatacatcaacaggagtgagtagtctgagtgaccaccccagcatggagaaaactgtagtttacagattcttctggagcatttttatttctagattgcggtggaagtctaaccccccttggagatgtctgccttaaagggtctttggccagggtcctctgtagagccatagtccagatctactctatttgtgtgctccttacaacatcagaacagcaactctcaatccggattcatccccagaatgccgtctgagtcacagcgtggcaggtgcataaagaattatctactgaattgagaaacatttcaaatatataaaacttgaaatattttgggtagtctgtacaaactcaagttgacaagccaaccctgcaggaatatatggatagaaggggaaggataacatgttgaattcagctacatgcctcatcagctagaaaaccttggaagaaagaaagatagattgatacttgcctgaacttcatcaaccaataatattttttttcttgctatggagagtccactcgcctttggaagatttaccagtaaaagccctgcacatgatatacttgtgtgcacatgcaataaggacatcattccccaactcctgctagcattgtgaaagagctccaaatattcaaataatataaactttttttcgtggacatttagcttacgagtttgtttaaatatgtgggaaaattatgtttagataatagtattgaaatgagaatgtaagatacacattgaatgataaatgtgtatgaattgttcattgtgccttaggtaagccagacagtgaaattaaatgtgtaatagttgtatttttttgcataatcttggaatgtaattagttaaaagcaaacacttagattttgaacatgaatctgttaagcttgttaatgtagttgctgtggctaaataactggtttcctggggaagcttctatttgctagaattttattctggaacagttgttagaaaggaattctcaggtcaccttttaaagatatacacaattctgtattcactttttgagtgcataagggtaatagaaaatgacatgggaagcgttaattagaaaaaaaggcattttgtttatgtgcatttgaggatacagtgtttgaagtttctaaataattgttttatgacattttcttggtacatagatattgctaacaattagtttgctgaagtatgtagaaacattttaagaaatgattttagaaatataattgttaaagtacctctgatgtatattaaaaatccttttattttggtttatattgctatggatgtttttctgggggaacttaatgtatacaacttctaactaagaagttttattaatgctgctttatgtatgaaagtcatggatgtggatgttattttgtcagtggtctttctgttaaaatttacgtggtgtaagattttcttttcatgatggaattgccaaaaaggccagcctctagaacacttacatgttaagggttgggtgggatttgtattactttgtgtatataaccgacaggattgtgttactgaatcttaaccagcatagagatggctgacattttgcattttgggggacattaaattgttacacaatgatgtcattggttactgataggagtgtttagactcttagatggctttgttagtattaggcaaatattagatgtggatttaggagataagagggtggggtgttggagccctgtgtgcacatgagcatatgttgcagggcctccagacctaaatccacgtgaagatggtggtggtggtcttacctatatgttaacattacattgtaaacaggtagactactttccttttgctagtgggagtgttaaatcacctctcagaacattaattcattaaattgcccctaaacattaattgattgctggtggatatgctaaatatttttaacatctatttttctaaatgtatagatgtcatttttaattcataggggatagaaccagttttgcttgcaaaaagcaaactgttcactggatcattgggcttaatttttaggttgtggtagatataatagaaatgttcttacaatttgtagtataatactgtatatctctataaatatatatgtgactgtttttctgatagatgcaacatggtggaaatgtcatcataaatgtcggtctgcctttgtttatagttttcagatgtgtatatgcagttttttatacaacagaaaaattgccacatgagtcaaatagcataggttagaaaagttctcatttgccaaaaatatgtgactttcataatagtgagttgtttttgatttaaaatgtttctatctgtagaggcattttataagtttttatggggatactagcaatgggatgtgaaacctgagttcattagatcattgggtgataatggaacccttatgtgtatacaatatacatggttatatgttttttaaagcataggagctattatgtctgcatggttctaaatatatatacacacacgtaaacacatatctatatatctatctatatagatagatagataaatacatacatatgtagtgaaagcttttgtttcctccctcacataggcagattatttgtgtgtgtaaatgagcagctgaaggggaattttgttacatgtgtataagacagtcacaatatataattgttttgctttaattgtttagtctttgatttgtaggaattgccaacacgtatatttgtgtgtatgcaggtttatatataaatacatatcactgtataaacaacatttattgtcataggatagaaatattcttaagttgccagagatactgtatggctgctaaatgtatagtagaaaaatgttaccttttgctttttagcatctgcatacagattactaataggcgtatattgtgaccagtaaaccactagacaagggcataaacactttagtttgatcagtagaattgctatgccatgtttaaatgggatttatttggttgatgcagaatatataattgtatctagaagataaatattacaaaaatattttaatatacaatttctgtcatatttttggaaatatatttttattcaaaagtagaatcattgttgccaatagagttagcatctttgtgtgcttgtgaggtttgattttgagggttttcttggttttgttttgggttctggagttctaaaaaatgagattgtctttgtctaaacaatttttatataaaaatgtacatttttgtattattttttcttattccaacctaatcggtggcttgtcccttcctgtgtttattgggctgttgggtgcctggatagagctggagaccatttaactgctgtatgaataatagataagcgtcttgaataacatctgaatttcctaggtatgtagaaacacccaccatgcacatatatgaacatacagaatatatgaatgttaaaatatggtgaaaacaatcttttgctaatagaagtgttaacctttatttttaaaaaaaatttggtgtgtatgtagaggtttatttgattgttagttgtgtccatgtataatatgtcatctacctttacagatgtgcagaaatttgttgtatttggtggatatattttacttaaaactatagggcagaagctttttatgtttgttgaagtgaaatggcataccaaacctgtgtggtagagtgggatttttagattgctgtgtgtacagtcaggttatatctttaaaatacctattcgttatatattaatatgtagacattgctgatacatatgtatgtaaaaatcagagtatttttattaatataggcattagcttcttgattcacttgtttgttgggaagcacttggagaaggatgttgaatactttgtcatttcatctctgtgacgtacagttgtcatgtcaaccctcctatctgcgggttttgcatctgcaagcacatgcagctggaaagtacagcattggcagaatctgaaacccgagtaaagagcacctcattttcataaccatgggttctgaagagctaagggagttgaggatgcaccgattttggtatgggggtacggtacaggtacaaatccccgatggatatcactagacaactgtacaatcctctttagctttttttttgttttatagacagtgtggacgtgcatatattgcaagcatcactttgttaaactatgcttaaccctgcaaatgattttaagagctctgtgtgggtggctttcttgggtttactattaaatatctgtgtttatcatagttgttctataacatttcaactttgtaaatatgtagtttgttgataaagaggatagagacatttttcttttgttgatagattgttctttcccctttgcttagtcttcattgtgttgctgggattgtaaaagacaaattacttgcacatatttaagcttatatattaaatgtatatatgctgtcatgttagagagggagagtggttccctcccccacattttgatttaaaagtaaaaattaatttttattaaattgtttgggtcagtttcatgtaagaataatctctacattgaatggtatatcttggccgggtgcggaggctcacgcctgtaatcccagcactttgggaggccgaaggggccagatcacgaggtcaggagttcgaaaccagcctggccaatatggtgaaaccccgtctctactaaaaatacaaaaactagccggccgtggtagtgcacatctgtaatcccagctactcggcagtctgaggcagaagaatagcttgaacccaggaggcagaagttgcagtgagccaagatcgcgccactgcactccagcctgggcgacagagtgagactccctctcaaaaaaaaaaaggtatatcttattttctttgatgtactgaggttcatgatgcaattcattcttaagcatatactatagaatctttaaattatatggttctgtgttcatttgtggcatgacagtaaccaagacaatttagtaaataatcagcaaatgaaatatttaattttgaacatctagtatttctagatgtatagagagtctcacgaagtagattttttaagtatcttgttgtaaatttgttagtactgttgtcttttgcaattaatgtggcaatgaaattgattattgatacacaggctcttggagctaaacaaaatttatcgtgttttaatttggatattagaaggaggaaatgaaaagagactctctacattttacctgttattatatagcttaccattatatcagatatgaattgctttttttaaaaaacttagattaaatgtcatgtaaatgcatttagtctttccagatacacttcttgatatcataatttttatttcctgttaatattcaagatataaatgacttcattaaagagattttctactacctctaggaactatacaatattctgtatgtgttcccttggttgcatgacaatattcaagacaactttgtaaataatagataaaaaattttaatttttaacatctagtctttctagatgtatagagtctcacaaagtataattttgtaaataagtcattgtaaaatttcatggtttcattgtgttttgcaaatgtcttggcaaagaacttgataaaattttgggcttcttgacctatacatattttggtatctctttattgggttgtttagtgtaaggaaaaagttgaaagaatgtattttcaactttgaattgtaatcagaaagaaaatatattttaaccattgtttagtgcttctgttatatattgaaaacttcagtcttaattttttagttacattgttgatagggcattatataaatatacttctatagtcattgtaggaaatgtcttttataaggaaatatttcttctacctctgaattacacagttttgtatttacttggactgcatggcaacattcaaaaaacactttgaataacagataaaaatgacattttctaaagctctaggtttgctagatgcatgaagtctcagcaaagtataaatttgtaaatatttcattgtaaaatatcataaattgactccttcaagtgttcagtagtacaataggtaatcaataattggcctcttgggactgactgtaacgttttggtgtttgtatgttttgagacagagcaatagattgcctccatatcttttaaacattcaggtctcttgtataagaaaaataaccattgtggggtttttgtgcatcttatactaatatgaaacaaacaaaaccccctggatattttatccttagaaagatagaggaagacaggagaagggaatggtcattgtaaattagatagatatattgagtgttagaagattatttaaataattgttcttttgttatttgtactctttgcaaatttatttaaatgcatattcatgtatatcataagtatatattcacatgcatgtctaaatttagtggcatagatctatctcaggggtattaatctttcattcgtgtactgatttgtgttttattttcatttaaaaaattgtggaaccagtggctgggcatggtggctcatgcctgtaatcccagcactttgggaggctgaggcgggtggatcacctgagggtcaggagttcgagaccagcctggccaacatggtgaacccccccgtctctactaaaactacaaaaattagctgggcatggtggtagatgcctgtaatcccagctactcgggaggctgagacaggagaattgcttgaaccctggaggtggaggttgcagtgagccgagattgcaccattgcactccaccctaggcaacaagagcaaaactctgtataaaaaaaaaaattaaaaaaattgtggaactagtgttttatttctaagcttgcagatatttctagaattccacttactgttacatctaaatgtatgctgatttttcgttaaataataagcaggtctgtaaacattttcttttctaacctctttccatatttatatgagtatagaaaaactgtggttatgaatattttttactttttgataacttttaaaaactatcagatatgtgataatcagatagatttcaagtttacttacggtgtaaattaggaaaatttttataaagattctatccagtattgatcaaaagtataaattgtgtgtctttttaagcagcagtttggcaatgacaatcaaattgatactatgtaaaagttttgaaatgttatagctggctactggggtttttatctattccagttctcgaaaatttaccaaatataggttggctgtaaaatcataactatctgaggtatctgtcaataaatcaaagattgcaatgatgatagcttctttaacatgaatgtaattctaacagtaaaaaatttctatatggaatatgttttgtagtcctaaattgatattttatatcatttttcagtgaacaagtagttgtttacaggtgtctgtgcatatgtctcaagtttttctaactaaaatattaatagttaagtctaaaaatatgaattatacgtggggcttgtcattctgacatttaatacttcagcgtggtgataatggtgatataatatactgtttgaaattgtaacacatgagttaaaatcaaaagattgataagtacatatttgtatattgctacatgacaaaaatctaggaagaatatgattcacatgaaaattctttggaaggacatgacagacttttaacagtcctgtatagtgaaaggagaatagaacgactacttctactttctgtatctgaaattttcaaaagctatttcaaaatgaacatttaaacaacaggaaattttagagacaaccactttgtgcctgtcttcatccttgacattcaacatcctaggaacaatgggctgttgtattcaacttcttattcccaacagccattatgaatggtttttgattgatctcacaaagagcatgtgctttagacattaatgcagcgactaccatgaaacagagtattggattacctaaggaaagaagcagaggatggaatttgaggtaggtgtcaaacagtgaaatttcgtttgagaaacagatgagtgaaagaaaatagtaactgaaacattcattctataaggagagtacattttaatactggcgatgctgtatttgtgggtactgactagatcaagatgttagaggaggtgtctcttgggataagttggaagttatccttcattaatttggtataaactgaaaacagattgcttctttccttttaaagtggttgagtctctgatgggtttaaagtaggcctttggggatttatagatcattcaaaattagcaggggaaattttaaatattctctgcatctttctaaaaggtgtggtttaaagttggtgagaaagtgaaatggttgctggttgaacttgattttctctattcactatgcctggctagcctaaaattatcctaatgggtatgttcaggtgcctgatttgtatctaaatgtttctgtattggatactgtttttcttaggcaatcaggatgagtgaaaaattgatttgcagctgacctgcaaatggaatcatcaggaacatccctttctcatggagtcccttaatttacaagttaactgcaaacataggtaagaaggttctggtgctatttgggggtgaggtattggtgaggttttgcctaagctcaggaaaataatactggtacaggtgtatttcttggccaccttggaattatcaaatgagttagtctttaaaatatattttatcgaagtgaaggtatagtttggttcccagaccaaactgagggtcgggctgctatttctcgtgccccaataatgagatgcagatgaacaggggaggaagagttagagctagttacaggaagaaggcctggaaattgtcaccacaccaactcaaaattacaaagtttttcagaacttatataccttctaagctatatgtgtacatgtaagtgtgtatctaaagacataagtgatctataactaaggtctgagtcttcgagaccttcctttggagcctcagtaaatttacattaatttaaatgggtctgggtgctgaggtgattaccattatcttgtttcctactaaatcatggaggtttggggagttcctttagaacccccaataaacttgtttgtggaggcctggagagtttcttcagacccctaataaaacttgtttaatcgtgctttaaggttcaagagaggcctaggtaaaacttggtgggcttttgtgacattccaacctttgtataacaaaatggctctttcagcttttagtatttaacttaaccactccgtcaatactgaaacagttgttatggaggcctccattagagggacctggcctgccacaggtgcgcgcgcacacacagatgagagtacctttaattagtttacttatctatggtcaaacacgacaatataactaataaaagaaatgaccaggcatctaattactagaaattataaaattgacaatatgtgtgttttcataaatgtacagttttcacaaaatgttttcacatacagttctttgataaagggtgaagttcatggaaaccacagaaagatgctgatactgtaaactattaaagtcattactgaggttgtaagttgactttgctataggattgataatgggaagtgtttctaaatgttaacataacctgtaataaagttcaacatgagcattcacttaacctgccgccttagctgtttcattagagtggtatatatctcaccttacagtgtttcttctttttccttgtcaggagatgatagttccaagaaggaacattttatcgtctttgtttttaatctcaagaatggtacctaccatcagtgaatgacctgttgcagtgctttcattgaagtgttcttcgttccctcagcaatatgattgtaagggcagttgagtgctaacttgactgggagaggggcggtttggttagacaggacttgatatattctgtttttcataagcttgatgtttttttctggcagctacttgacattcagatctgattggttacatattgctatgtaataaattatcctgaaacaggggcataaacaatattgttatgtccatggattctgttggtctgaccatgcccaggacagtttaggaattgtatcctctccaaagtttcattgtagcttctgtgtttttagtatagttactatttctttctcatcaaatagactgaactccttttgttattatcatttaaatatttaggcattgttgtcatgtatattgtgcataaatgcatgtatactgcaggtaataattctgtatgtgaacaagtgacctagaggtaaaggaatccaaatacagagacgtgtggataatgtgggagaggtcagtttttcacaagacataggaaagaggctgggcgcggtggctcctgcctgtaatcccagcacgaggccgaggtgggtgtgtcggtcacttgaggtcaagagttcaagaacagcctgaccaacatggtgaaaccccgtctctactaagaatacaaaattagctgggtgtggtagtgtaatcccagctacttgggaggctgaggcaggagaatcgcttgaacccgggaggtgaagattgcagtgagccaagatcacaccattgcactccagcctgggcaacaagagtgaaactccatctcaagaaaaacaaacaacaacaacaacaaaaaagaaggaaagagctaacatctgacctcctttattattagaatactccaaaaggaattttgatccacatgctctttcttcataatagaatgaatgttgcatgtcattttacagacaaattttattagttcttgctgatgatataaactttgcttctaaccttttcccattttcccaactgtgtctctcaggtgatgactgaaaaagggaaactgtgccactatttgtaccatcattttcaccaaaatctaaaaatgctttttatgacgtatggagacattcttcatgtttgtttcagtggacactccttgcagatgtaaaaaactgagaaaactcacttttggaaagtgacctaaagagtgtcattgaagtgaattttaagtaggcacgatgattgttttcatggttgctgttggatcatatctcaggagctggaatgacagacattattgaacaaagaaatcaggatagtggaacttaaagggcttcatctcagtgctttcataagtatgaagtgcatatatttataattttcactaatcacagggtaaatataaaattgattcattaaaaatgtttcataagaattcaaaggacatagaattttgtgaaatgtagtatttttacttaagtgccttttctctgcttctaccccacagccaattttttataaaccagttgataacataagtagtttttgggggatgatacattacttatacattttctatgtagtaaacatgtatgtgtatgtgtgtgggtgtgtgtctaattactttgttggacagattcctgtggtttggaactgctggggccaagtttatacaaaaatctacatttttgagtaaactccccatgactctagtaagtttccacagtatttgagtattctttatttcctaaagctgtacaaacatcagataatcaatatttgtaaggatcgataatataatttataatgaaattgctttatcagctattaatgttaactacatcatcttcatatagccttataactcatttgtgctattccattttcctctgttccttttattttcacttcccttgtaatgttagtctctttgtactgatttctgaagagttcatttatgattaaacatgttaacattttgtctagaattgcaaatatgttttttctcattcattttactatggtgttttattttttggttatacagaagttgtatattgaaatataatcttgttctgttttatgactttggagttttgtggttttttaaaacatgtttacattggtatcatttatttgtattgccttctatttcagcagttagtttgtcatttctttttccattaatcatcattctggtgttaatgaatgcattaaatatttaaagtactcactttgacccgtgtagttatctgttaagttctaccataaagaaaatttccaggtaaaattggctacatttctgttaacttgccttaccattttattgacactttaataattactaatgatttatactgtcttatctattccattgagttctatctcatttctcttctttttcagaatattccctctgtatacttgcatttttttctatcaattgacgcttacaattatttttgcaagttggaaaaaaatgcagtattaatttcatttgcaacaaatttaatagattaattaggagagaatagatatctttaaaattgagtcttctgtccaactgcaaggtaggtctttctatttttaatggaataataatttggggatattgctagtgcagttttttaaagtattttttaatactaggcattttttagttatttgttaatttagtgatttggattagtcattcaacttgtctaattggtatgtgaaaactttttgtatgtcttttctagtaatctttactgaatttctaaaattatgactttcttgaacaatctgtcattttaattaccttgattaaagtacatttgtaagtacttctaggatatatggaagtagaaagtatacttggcaattggactgttaattgcaatccccttaggtcatggttgtttttgttcttattggtattttagtaatcttttagaagaaagatgttttaccaaatttggtgacaggtttaataaaatttctttttgtatagttgaaaaacttgtccttataattattaaggttaaaattaacatattccaaaattgaacattattccatcccatgaatgaagtaaattatattttagtatatactccttaattatagttgttataatttcatttggaatttctgaaatgattcctaaacaaacagctttatacttgttctgttatcagaggtttttaatgttttactggctctttgaaaccattttgagtatttctgacacagactagaaacaagtaatatttttctttaattattttgaaatgttggcttaaaaaggtgttgaaataatagcgtgtttttttttttaaagttatttatcttttgtccaaaatcaactaagcatttatgcaagcatgtgttttttggaacccttttttctgtttccttgttctttgtgtttttctttatgccaatatcacactgttttgataattgtagctttgtagttaacattttgaaattgagaactgtgactcttccacctttgttctttttcaggtttattttgctcatttcagtcctttgaaactctgtatgagttttaggattttttttttaatttttgcaaaaaatgtcatgggaagtttactagggattgagtctgcacattgcatgagtattattgacataaacaatactaactcttccagtccatgaacatgggatgtctttttatttatgtcatttatttctttcagaaatggtttgtaaatttcattgtacaaaaaattttctttgatcttactggttaagttactttctaagtattgtatttttaaaatgctattgcaagtggaattgttctttgaacttcttttgtgaattgttcattgctatttttgcatgctgaatttgtagcctggtattttgtggaatttatcagttctgagatttttttttatgctcccaaggaaaattttagcccgtaataatttttttggagacatagtctcactgttgcccaggctggagtgcaatggcactatctcccaggtttgaacaattctcctgcctcagcctcctgagtaggtgggattacacgtgtctgccaccacgcctggctaatttttgtgtttttagtagagatggggtttcatcgtgttggccaggctggtctcgaactcctgagctcaagtgatcctcctcccttggcctccaaaagtgctgcaattacaggtgtgagtcactgtgcccgaccagcctataaaattttagtggatgccaagagagatacttctacttcttttctgacttgggtgtcatttctttctttttgttacttgattgctgtggcaaggatttgtaatactgtgttgaaaagaagtggcgaaagcaggcatccttgcttttgtaactgatactagaggaaatccttttagtgtttaacctttgagaataatgtttgttttgagtttttcatttatagcttttactatggtgatgtgatttcatctattcctaatttgatgaatgttgaattttttattccttagtctttgtcttgctttggtaagagggtaatgctggccccataaaatgtgttggggagtgtttcctccttgaatttcttagaaaagtttgaaaacacttgttatttgttatataagtatttatttgatggaagattttttttttttttttttttgagactgagtcacgctctgtcgccccaggctggagtgcagtggcgcgatctctgctcactgcaagctccacctcccgggttcacgccattctcctgcctcagcctcccaagtagctgggactacaggtgcccgccaccacacccggctaattttgtgtatattaagtagagatggggtttcaccatgttaggcaggatggtctcgatctcctgaccttgtgattcgcccgcctcagcctcccagagtgctgggtttacaggtgtgagccactgcgcctgaccggaagatttttcattaataattcagtactgttaatagtttcatgcgtgtggttttgttttggtggcctttagtttcctaggtttgtaggaatttgtacatttcatctagattatctaattttttaacattcacttgcttatagtactcttacaatctcttagttctgtagactttatgtttctgatggtagcaatttgagtctgccctctttttttctagtccacttagctgaagctttgtcagttttcttgatttttgtttatgaagaaccaagtggttattttgtgttcattttctgttttattcatctctatatcattctttatgtccttccttttcctctttgtgtttactttgcttgtgtaattctttaatttgtacagttggttgatttgaaattttttttcatgttacattaataggtgtaagattcataagaaaacatgttttattttcattttcattcattcccacatattttctaattttccttataacctcttggtgtactagttgtttgtgttttctcatgtccacaaatgtgtgacttttccaaggctttccttctgttactgatttctaaattcattgtcttgctgtggtcagagaagaggcttctttttctgtctgttttttcaaaatttattgagactgaatttgtgaattaactacatttgttgtgaaaaatatctcatgcacttgaaggggagtgtgcattttgttgttcagagattgttgtgtgcatatctgttagatataattgatttattgtgatattacacacttctattttctctttttttgtggggtgaggggtgagacagagtctggctctatcccccaggctggagtgcagtggtgtgatctcggctcactgcaacctctgcctcccagattcaggcgagtctcctgcctcagcctcccaagtggctgggattacaggtgcctgccaccacacctggttaatttttgtatttttggtagagacagggttttgccatgttggccagggtggtctcaaactcctgaccttgtgatccacctgcctcggcctcccaaagtgctgggattacaggcgtgagccaccacacctggcccacacctctattttcttgttttctggttattctacccatcattgagagtaggttcttgaagtctatatttcttagtgaggaaatgtctatttctcccttcttttatgtcaatttttgtttcatatattttgatggtttactaggatcataaatgttggtcatctttatcttgtaatttttattaatgtataatgtacatttttgtttgttgtaacattttggattaaaagtctgttttgtctgacttaagcagtctacaaaataactgcttctgtaacaccttctctcctacccctttcagttgatgctacaaaattatatgtttaacattgtgtatcaaaatatatatatatatttgagatggagtcttgctctgtcacccaggctggagtgcagtggcgtgatctgggctcactgcaagatccgcctccagggttcatgccattctccttccttagcctcccgagtagctgggactacaggtgctcgccaccacgcctggctaatttttttgtatttttagtagagacggggtttcaccatgttagccaggatgatcttgatctcctgaccttgtgatccgcccgcctcggcctcccaaagtgctgggattacaggcttgagccaccacacccggcccaaaatatattttgtaaaatttattttttgttaaattttttagaagataacttgtagagttataatcaaagttacaataatatttactggttttttgcctaatgtgtggttttataattgatcaattcaagtcatgtagaatctaaaaaaggcaacaggctgggcatagtagctcatgcctgtaatacccagcactttgggaggctaaggaaggaggattgcttgagaccaggagtttgagaccagcctgtgcaacatagcaagaggctgtctctacaaaacaaattttaacaacaaaaaatagctgggtatggtggcatattcctgtagtcccagatactcaggaagctgagatgcaagggtctcttgatccctgaaggttgaggctacggtgagccatgatgatgccactgcattttagcctgtgcaacagaatcagagcctgtttcataatgaaaaacaagtggagggacagtacaccattattaacctctcataattgctcaattatttacctttaaccacatctttatttctttatagggcttccatttactatttatttcaaccttcaggagtcttttcagtgtttctgtttggtgggggagcagatctaatgtaaacaaactcctgttgtttgtacatctgggaacgtatcaatttctcccttactttttaattaacagttttgttggatattagattcttagttgagtatttttttttttttagcacattgaatgtgtcagtccactaccttctggccttatgagaaattgactgataatccctgttacatgatatcgtttttctattgttgctttcagaattctttctcttttgctcttcatagttgaaagatattgtgtctcattgtgggtctttgagttcatcttgcttggagtttgttgaggttcttagatgttagaattcatgtctttcatcaaatttgagaagtttccatctagaatttcttcagatattctttctattgcatgctttctcttttctgggaatcctgcatcgtttgtattggttagcttgggtggtggaccagaagctgtttagactcttacctttcttcaatattttttctttttgttcctcagaattgataaaattctgaagtttgctgatcttttttgttgcctgctgagataatgcatttgaatccctgtagaaaatttttcatttcagttaattgaatgtttcatgttccagaatttcatttggggttcctttttgaaagtttttttatttttgattattgatccttccattttgctcatgcatcattttcttaaccttctctatcacttcctttagttctttgagcaactttaagacagttgttttaaaagctgcttacctgtcttaccatctttgagatcagaagtggtaaactgatgagagcacagcctctcaatgtttgtataacagagtggtgtgttttgttttttgtttatgcctaccatcactccttctgcaagctgtatgtaagttgtccaagaaatgtgtacagctaccttgcgtgagggtgtaggagttagggataggtaatttgtactttgctaagagttgatgttgagtgaaattaacctcaataaatctgaatttagggttaatacaatcctccagagttccaaaccagttatatcataccgattattctggtgtatttatcatctcagggggagaaagagttctgttgcgtcctgctctgccatactcccagaatcctcagctcaccagttttttagtttgtttgttttgtttttgtatggatacagtttctcattctgtctcccaggctgtagtgcagtggcactatcatagctcactgcagcctcgacttgttgggcccaagggaccctcttgcctcagccttctgagtagctgggactatggacatgcccgaataatgtttcttttttaaagagatggggtcttactacattgcatagcctcatctcggagttctgcactcaagcattcccccagtctcagcctcacaacgtcctgggattctaggcgtgagtcactgtgcccagcttgttttacagtagtgaaatgaatctgcccatttatactttctgattatcaatgaaagttgtgttctataattttgttgcttttcagttgtgatagtttatgcatcacataaaatttgccatattaaccagatttaattgtactactcattagcattaaatgcactcacagtgttgtgtaactaacaccatattcaaaacttttgtcatcttaattggaaactctatacctgttactctaatccctagtcccttgtctccccaatcatgttttctgcatttgattttgcctattgtaggtatttcttacaagttgaatcacatagcatgtgttttttggttcctggcctattttacctaatgctttcaagtttcatgtaatacatgagaacttcatttcttattatgaccgagtaaatccattttgtgtatgtatacatgtgtgtatacatgagtgtgtgtgtatacacatataacacaatttttatccatctgctaatggatagaattttaaatctattcctctgctaatggacattttatatgccagtgctcaccaaaacattcacagtgtccattaagagatgaatacatttaaaaatatgtccattaatatttgagtgagcattggcatacaaatatctgagttcatgtcttcgtatctgattatgtatataggggaatgaaattgctgagttatgtggtaatttaatgaactcactttttgaggaaatatttgttatttattatgagaaattgaagtcaccaaaaatgagaactgaataatgaaccttctcatatctagcaactagagttaataactatgaacattttgccatattttgaaaattacagttaccatggtgatttaatcctgaataggtttatatttttatgtatcaatttttaaaataatcacaatatcctatctctacctagtaaaatttactaaaatcccttatgtgtcttctaaacacacaaagaaaaaacaattctcatttaaatttctcaaggttgtgcatggtgtctcaagcctgcaatcatagcatttttggaggccaaggcattttgcttgagcccaggagttccagatgagcgtaggcaaatagtgaaacctgttttcacaggaaaaaaaaaaaatgaggtatggtggcatgcacttgtgaacccaattatttcagaagctgaagcaggaggatcacttaagcagtaggctacaatcacaacactgaactccaggctgggtaacagagtgaaacattggctcaaaaatataaaaaattctcagttgtgcgaatgatacaacagttttttgagcaaatctggatccaagtgagtaattcacttttatctaggctatttttatgttagtcttgactgtattaatttatattcaatcttaaatctctcttaattaaggtatgaaagtcaacccttttttggttctatatttaagtaatttttaaaaaaatcttgaattaaaaacattatttagaagtaactttcatattctactggatttcttatttgctggtttttttggggggattgattctaccctttatttttagtattctgaatgagttttggtgagctactgtggtccaaaatatatattgtgtatacacaatacatagtctgaattcttgtataacaaaagtacagtccatatttgtaaggggtgcttggaaaggtatattaggtatattaccttacatgtgtagatcttcataagtaatagttggcaaggtctgctataaacttgttacatatttctatatttgtcattatattagagacatttttagtctttgatgttatttttcccattaatatggtgtcctgacctggtcatgctttcagtttttcatgagatcatgctaatgaaatttcttaaaagttttgcaaatataatctgataacgtactttgattttttgaaaaaaagtcatctcttacccagtaaatatcaactaattgctggttttcttttgtgatttcttctcaatgtattttatattaaggtttggagataccagtccttttaagcctaatcctcatgctatctggtaaaaattattaacaactaaaaattacttaatgtatattacaaaggaggtagtaccatctatgaaatctttttgataaatcttactccactctgtcttatgtatgtttaaatgagcaccagaagaattatgcattacatttcatttgattggttaatctttgagctcttggtttttaatatttgtttcttgctgttttctctttgaggaaatgagttatttgcgatataaaactttcacatttctacattgtgcccatagtaggatgccacccctgtggtcatgtttaatagttttttctcagtgtttcggtgtttaatattttctatcatttttttaaaaaaatattcaacattgagacatttttctcaatgtattatattctcaagatctgattttttgtctgactagttttatcaaatcattaattcagccatttattatatgaacaccttttgtaaaacagaagaacactaatttatcatgatattttcatatatattttgtgatattgagaatcattaagtattttatcacctgctttttacaaaaacacaatagtctctcatttcactaatagttatacatttgctctaagtatcagtaaatttactctgaatgataagttcttcatttaaataggaacttaatcaacttttttgggatttcagttcaaaaggaaaggtaaataaatgttttttcccttatcttaccatttatataataatgaattgatgtgcaagtaatcttcaaaggtgactagtttttaaattcatgttctttattcagaagacagaaagcattttcaggagatttgaatatttgaagttatattttaaaggtgataatgctaatagcataattaaaaaacagtttctgcatgtaaacacatggtagaatataacaggtaatatatatttgtaattatttttctatttcatgtttattcaaatgtatgtacaatctctgtagcttgtagtttggctgtgttatgctttataaaatttatttatctgagacagggtctcactctgtcgcccaggctggagtgcagaggcatgatgtcagctcacagcctccacctcccaggttcaagtgattctcctgcctcagcctcccaagtagctgggactacaggcgtgcaccaccacatctgactaatgtctatgtatatattttttagtagggtcaggttttcaccatgttggccaggctggtcttgaactactgagctcaagtgattaacctgccttggcctctcatactactggaattataggcatgagcctccacacccggacataacatttattttttattttatattttatattttatattttattttatttttgagatggagttttgctcttgttgcacaggctggagtgcaatggcacgatctcgcatcaccacaacctccagctcccggttgcaagcgattctcctgcccagcctcccaagcagctgggattacagataagtgccaccacgcccggctaatttttttatttttagtagagtcagagtttcgtatgttggtcaggctagtctcaaactcctgacctcaggtgatttgcccgcctcagcctcccaaagtgttaggattacaggcatgagctaccacgcccggcccataaaatttatttttatcccagttgtgtgtacttatttacttatgtatttatttatatttatttatttgagatggagtctgactctcttccccagactggaatgcagtggcacaatcttggctcactgtagcctctgacaccagggttcaagccatcatcccacctcagcctcccaagtagctgggattttaagcatgtaccaccatgcccagctaatttttatattcttagtagagacagggtttcaccatgttggccaggctggtcttgaactcctgacctcaggtgatccacctgcctcggcttcccaaagtgctagaattagagaggtgtgagcctccataaggaatatgatttgaagggaagaggggatatgagtgtgaggtaaatgttttcctatttaaatattgaaatataaaaggctattcagtttccattcaagtaacatttggaagctttttatttcataatactattttgtgtagaaaccattactgtttgttttgtatttgtgtaggtaaaaagtattatgaaattatgtaattacagtattcactctgccaaaaaaaacaaaaataattataactcgggtatctaatgattgaacatttagtaattcttccctgacaaaaagagaaaaatattataactcaggtatctaatgattgaacatttagtaattcttccctgattataaaagtagcacatttatactttggaaaataaaacagcatgtatgggaaaaagtaataaacatagagaaattccatcacctcccttcccctctcctccaagaaaaagtggcttacgcctgtaatccaagttcttagggagccagaggcaggaggatagcttgagcccaggagtttgggacttgcctgggcaatatagcgagaccctgtttccccaccccacccccccaaaaaaagaaaaacgtaattccatattttacaggtttagtgttgacttcataaaagatggaagggaaggttatcagagtatcccattgtagtgattatagtgctcagattctagctccatacctgttagaacacattcgcaattgtcagcttaaactatatttgtatgtattgtttgtctgttttgtattaaaggcaaaagctcattatcaattagttgtatgttttaaagagttggccacaacatccatcataagacctatctaaagaggaatacatgatgtcttagtacaaaggagtagagatacaatgaatgtatttattttcatgtttcttaagagggaatgcactagcaattgacggtaaaatagatacaaatcaagtaaagaaaccagtatatttttagtcattatgtcgctttgaacaacaatttgtttaatcattttgcggtaactggttgcttggaactgccttattttttgtattcaatatatttatttatgggagtgtatacatattccagggtgttctagttcctcagggaaaatctggatgacatagaagaattttgttctttattatgagtcaatttataatttcatctttttttaaaaggcatttttcctacagctagacgttttgattgtcacttttgttgtgagaaaaaaattacaaagacgttgtaaagattgggaatgaggaaggtgacttgatcgggtatcacagacttacaaaatcttgtatgtaattagagttatgttaatggcacatttataagcaaagtaatgtcatggaatggaagacccataagttgacatgagaaacagaaagtgtattaaagttaatctgcattcatgggggcagattgttagccaaatgaataaagaattagattcatcttcatggtatgtagcatgaagaatttaaaatgaatcagaggtttaaattaactgcagaaattatagagtttcagaaaacgaatttctctccaattttgaggaaattactgatgatacacattgtagaagcaacaagaaacacaaagattgatagtaaaaatgaaattacagagttgaaaaagttgtgacatcacataagaagagtgaaacccttggtgtgtaagatataatcggggaaaaataccagttcaaaggaaaagtgacttgagcacatagttcactgaaaaaaatacacaaagtgctgttaatcatataaaaggattcttgggtttgctcataataaggataatgacaattgaaaatacaactaagatataattagtttctctactattagactagcaaaagtccagaagtttgacaacatttttttttttttggcaacatgttcggaattatggaaaatcatacgttgcttctgggcatgtaaaatgtaaaccatatgggtaggaatttaatattttgtaaatttatatctgtggcaaatacatagttcatctcctagtaatatgtagcagtaagaaggattgatggatgtttgtataccactatgtgataatgtcttggatataatgtagaaataggggagaagtcggctacaggaagtaaaaatggcaatatggtgctcagggtgcattcatcactataacagataaccattttgttaatggtgccctgcgcggtaactgaaattgtactgggctttcaacagaattttgtcaaaatgggacgctgcatgagctaataagttgtgaaataaatagggttttattgtggagtaataagtaacacaaagaagggggtttgcagtatcttaggaagaagaacagacgttcttggtaaagttcctttaatatgaaaatagcatttttaaatacttggagtagtgagtgaagaagctttctctatgagagcacggttagttcccaaataaatcccagcctcctctcttctgttaatttcttcggaaggatttgaggtagcttttgaagtatttggtcaaagttgcaaactcctcgggaggaggccaggcatggtacctcacgcctgtaatcccagcattttgggaggctgaggcgggaggatcacctgaggtcaggaggtcaagaccagcctggtcaacatggcgaaaccctgtctctattaaaaatataaaaatgagctgagtatggtgatgcacgcctgtaatcctagctacttgggaggcttgaggcaggagaatcacttgaacccagaaggcagaggttgccgtgagatgagattgtgccactgcactccagcctgtgtgacaaaacaagactcctcctggaaaaaaaaaaaaaaaaaaaaggaaacctgagattctgcttaacaattgtaaagtcagaaggtatgaagagtatttgaagttagacctgtggacaggctgattggatcttcagcagtatgagaaagtttagttaagccaaggtactatgtaaaactccaagctgtacagagctctgcctggccagctggtcagcacttgggtaatgaggaattgataaatggcaaattgcttcattgaatgattggattaatagtagcatgaatggataaattaacgggaatgggtatataaatgggtatgagatcaggaatattaatggagtcacaagtagatgatgcgtaaatgggactatatgtgtggattgatggatggatggaccctgaaatgcatttttgatggaattagggaacaagaataaatataataggaagtgtggtatgcatgtaagcatgtttgtgtgtgtatgtgtatataggttgatgcaagagtggaagggtagtaaggacaaaaactttggacagctatattgacaatgcaaaataaaaacatgaatgtatgaatgtatgaatttgacggatatgtgcttgaaagaatgaagtcagtttaggaaaggataattaacaaatctcagtaatgattgtaatcatgtgattctcacagtaactgttcaacagtgactgttaaggatgctgcgtgctcatggcagtaactcatgggcagatgtcacaaagacagtaatacctcttattgcttttatgacagcataaggttttatttttcactgtggctttgttagagttatggaaagtcatccattgcctcttaaatacgtaatggtaaattgggtaaaggaattgggtaaatcacatggttttccaaaacttcaggagatttagaagctgtattttatgttttctcaaggaaaggatgaaaaggacacgttaaacactgatagtgtctactgtaggatacctttctggtctcacaaactaggtatactttctacttaaatggaaactatccccttcacagtgggaaccaataaaaacctcacccaggtaaaaatccagcgtctcagtgatgctatctccctatcatgaggtaattcacagtaatctgtaccttaagtctcagtgtacctactgttggcccagagataggtgaaacttaaagataattgtaccttggctgcatgtagtggctcatgcctataatcccagcactttgggaagctgaggcgggcagatcacaccgtcaggagttaaagaccagcctggctaacatggtgaaaccctgtctctactaaaaatacaccacaccctggtgtggtggtgtgtgcctgtaataccagctactcagaacgctgaggcaggagaatcgcttgaacccgggaggcagaggttgcagtgagctgagatcgtgccattgcactccagtctgggcaatagggtgagactccatctcaaaaaaataataattgaaccttatttccttttgtacaatgtacaatgagcagagtcagggcaactataatacaactccaaactctaaggtgtcaaatgtgatagaaatcacttttccattgaaattttgaaatccctctggaaatacactgtgaaggctccctatactgtgctagagagtgttttactagggcctggaagatgctcactttttccttgttttccttggctgtagcttttacctctggcacactttcccaatccccttatcctacttaattatttttaaaataggcattgtggaggatgtttgttcatattttaagtcttaatcatgggcttctagtttctttggaagtaaaagtgacccattaaaaatgtaaaatgtgttatgtgcatcatgggcacaggagtttcgtggcctatatgtgattctaacttatatcttaccatggtgatcgtagaaccatgtgttgatatgtaattttcaaaagaggtgaatgcccttggcacagtaatctgtcatatttagcaaagcttccctgagagccatcataacagacccacaggaatattttcattagtaagaagtagatgtgttcagccagtaaaattttgaagtggccatgacttcaatctgagtacagagggaaagttacacacaataattcagtgattggtggataggtgcgttcaaggaggcagggttggattggtgttttcaagcttggtagtagtagtagacaggcagacatgtgagttgatggaaggatgcaagaatggttactgaaattttctttgtattatatggttaatgtggatttaataactagtcattgaaattatgtgggattggatatttaaagcccagaaagatgaatataataatcgtctaatataatttgaaatataataacggatgcatgcaaaattgggtgtattgaataatgtaagaaatagatggaaagtagaatatgagcaaatggctggatgcaagaatggagaatgcaggttttaaaaacctgttgggtgtatgtatggttatatgcacagtggaatcatttagtgaaggtgcagatggttatatgcctaggtgttatcattggatggatcaaaaatggaatgctgtatggatagatctttagattgatgagtacaaatatggctatctaaaaccttggataaatgtagggatcagggttcaggtacattggttgcataagtgatagctgcctgtttggtggctttagagtggcttaatagactgatagatgggttgattcacaaggtgatggtacaggaatttgatgactatgagaatgggctgatgcaataataaagtcatatatgtaaagttgactggaaagatggacatttgaaagccaatggtatattttcacgggcagattcattatgaaattataaaagttttgtttttgcattctcaacatgatgtgttagcaaataagcaaaaactaactgcagtgggttcacaagttagtttaattaaaatgatctttcaatattttaataatttggggactttaggaggttgaggaatgagagaacttcaccttctgtatattaactggtcgtatgtcacaattttcccatatttttcacagttatagctgaggtggtaccagtttaagaagtgagaacttcttcactgactgaaatttgcatatcaatccaaatcattgtgcttatttactatttttgtagacgtcattcttcaaaagtgctggtaagaatcagtaaccctggtgtactgtttatttttgaccagtttgatattgaatctaatttgtaatattttaaaatccaaaactatacatgaattctataaaacacaaagttgtgaatttgtggagtgattatcagttaggtgaaataaaagagataaaagggctccctaaattttgacacagttttgatatgtagtttatgcaggttttgatttaccagtcttatctactctcaccgtagtatgtaatgtcatctggactgagactataactttttatctgtatactcagtaaattttatattatttcagtaaattttattgaataaatgctctggaataaattcatcagctagagggagataagaaggaagtctggcagcctgtggaaaataaagaaaatggataggctattaaaagatgtcagagaccaaagtcattaggaattagaatttactataaatagtatgggttataatgagagtagcaggtttaattttagttccaagtgcatgatttaggatatcatcagtaagtaggtaaggtcagcagataggagttgaggaatatttcaacattgaagtggtaaaagtagggtcttaacaccctttctttcgatgagtgaatgaaaaatcttcaactattttccaacattcctgtttttcttttttttcacaagcatcttcaatagtcaaggaggacaaagacatctttcctgcaggtaaaatcattaaagactatattgtgattttgaagctgttctatttgctacgttgaggatatattagattcttatttgagttctttgaaattaaatttcttttctcatacatcctactttgtggttatgtgattattttgagtcgatattttaatcaaggactttatagttaactcttgttaataaccaacatttaatgaaatcaggcattttcttgactttagtaccacgagaagttgcacaagaagcatacagggtagcaaggagaattgatgggtggatactgggttttagtttgtggaaagatcttaatggaatacacagagtatcttattagtatttccttatattgtgtcttttaaaaaaattcttaacccctgaattggtgtataaattagaatgaagaaactacacaggaaatgctggttcaaagaataaataggtggttggttggcgtgaaaataatttggaataggagataggtattcaaatcacaaaaaaatgtgtagagaaacgaaggaaaatggcagctttatcatttgcatacagtacgtatacctggtttttgtaggttttgggttattccacatcagattgtaggagttcggttttatggagtattacttgacttgaagatgatatatttctgtcaccaggcatggctgtgtcataacctgttgtttatttccatttgcaatctcttcttctgtactctctcaggtggtgaccatgtggataataggatcatagacaaatggtggttccatctacagcatcaccgaaatgctgttgttactgcttctttctgggatcttcttgcatctttgcttctaaaggggcacaccttttatagaagtacgtccaggaatagaagtgacctgctttttcgcaagtaattgcctggaatgtttttatgtacttctctgcactctcaatacatttcatgcttccctctatttttgtatattaactcattgtatttcttaaatttatattttactttatgaatggaagtgagatttgtgtatggtaaatataattaattcaaccccatggatacgttagtcactgtccagatgatggcaagtctttctcagaagcagagggccttggtgtgccagtgattttttttccccatgtgtaagatactttttttcctcatttgaatcaggagcccacagtttttagacaagtcccaaatgaaatcttaagcatttgtgttatctggactagaccttctgtagtatcctttttgttagacctagtatatctcattgcagatcaggatctgagattgactatagttcacctctttccaagtacacaaacttggatgacatgacaactgagtgtgtaagggagagcgagacccttgcactgccatttgagcccttgtgatctcatcttgtagaacatgttgtacaatcattttattggtatcattagtgttatttggggctggaataaaaatctcagtgcaccaaagagatttcccctttatccacgttaccctggttttcctttgttttctgtttaacctaaacgggcttaatataaaatagtgcttatttggtgttttaattgtctgcttctataacataagctgcactgtccattggggaactgctcaccatattgcccaacctgtcttgataggtttatacatgggaggcattcagtaatattaattacctctctagaccagtgttagcaataacaaacacttgctagaattttaagactatataatcaatcactttgatgtcagttaatcctaccaacacaagattaaaggtttaaaaatctcatacgtgtacagccattagtgtctcctttcatactatattattttgttcattggcagctagatttttaggtagaacttgtgttcctttttgcaatgctcatttattttacctggacagaaggtgctcttctgtctcttctccaaagttaatttatctcatactatttcttgtgttaatattttccaagttcagtatgctgttctggttataagaagatcagtgtcctaatcacacacttttacattatatgaaacatcatacagagttttgtagtctgtataacaatacacagaggtagcaaaatttgtaaaagagcagactatatagtccatactgtagtaactactcaacattgccattatacgtgaaatcggctataaccaattcataaacaaatgaatttggccgtgttctagtaaaacttatttacaaaaacatgtgttaggccagatttggaccacaggctgtagatttctgacctctggcttacagcagaagtttattatgatcctggggaaggtggatatacatggaaggcagaagcgagaagatgtattccatcccatgtcatttttctgaaccctcaacgtaggaagttaaactaaaacatggggcagaatctgctttaagcctttgaattcttggctcttaaagccaggttgagggttatgtgtttttattcttttatatctccttttcacttaggcttggcaactagttcattgaaacagagccaacaagaatgagtgagtcactcagtgatatgaagcaagctgtggtcatttatctactaccttccatacctacttcctaggtttgataagtagtgtttgtagtgtagttgtcagtaacttttctcagcttacataagtttatgtggaattcatttacaaatgtgtgattattacgatagatgttattttataaatttcaaggttctttaatacagcatggacatgtttctaaatcaataaatatagcttacccacagactttttatgggatgtaaagtatgtattacaacaggtaaatccatttctctgttttgggaaagcaggttaatgttttgtttgttttgttgctgcatataatgttgcactatatatatattctaatgcagttggtctcctaattctacaggataaatgtctagctgtggcattgttggatcatcagtttcgtttcagttagatgctgtgaaattgctcttgaaaatggtgtcctctgccaccacagaacggtgttgtaatggaagtgccaattttcataaaaacttgtgtgcaacaggtattaagaatttttgaggtcgggcgcagtagctcacgcctgtaatcccagcactttgggaggcctaggcaggtggatcacctgaggtcaggagttccagaccagcctgaccaacatggtgaaatcccatctccactaaatacaaaaaattagctgggcgtggtggcatatacctgtaatcccagctacttgggaggctaagacaggagaattgcttgaacccaggaggcggaggttgcagtgagccgagattgcaccactacactccagcctgggtgatgagcgaaactccatctcaaaaaaaaaaaaaagctttaaatttttagccaatctaataggtgaaaatggcatttttaacataagtctgacttaaacaattaatggccgtggctaaaagaagaatcaaataatgatgtgtgatttataagataaggaggcagtaccccatttttcctcactctacccaaaaatcctgtttatctgagcaagaaatcattaatattttctaaatccgcttggaagttcataaacgccctaagtataccttataccagcgtttttatgactttgtatttttgaaataattttagattcagaatcgcaagaatcatgcagagcgacctgatttacgcttcacctagattgactttttattctgcatcgttgtgttcttcccccacttcctcttcttgctctcgcctccctttatatgtttatacatagcattatcattttatgtactatttgaatgatttgccgacattatcttcctgtaacccaaaacacttcaacatctactttctaagagcctgagcatcttatattgacttcggtaaaaatttcaaaataatgaaatgtgtcaatagtataaaagtataacagtatgcagtccatattcacattttacccatttttccagaggtgttctttatagcagtttcttcccttctacaacatccagaaaaggatcttctattgcattcaattatcatgtctctttagttttgtttaatctgaaacagtttcctggactttgatcacatcagtgttcttaaaaagtaatagctaacagatttaaggagatacctcagattttgaattttgtgtttcctcatgaaaaggtttaagatactcattttgagcagaaataattcagtattctcagtcttccttagtgaatcatctcaggtgacaaataatgtcactttgtctcactttgaattactttgatctcttggttcgattggtgtccactggacttttccactatagttaacattccttcataattaatttggaactatacaggtattctatttttcatcaaacttccacatagtaggtttaatatgcacaggtgacttttacctgaatcagtgttgattagaaaaaaatctgttattgcttagatgcattatttagtatcttgtactgtaaggaagagtttgtatatcatggcctgtcagaacagtcccgcaatgtgttttatgaactgaaaattctgaaagaataaggtagtgatttatatgagaatacagggaaagggttacccaaagagtctaatgaatttatgtctaaaccatagagtggaatgtgagagacacacagaactccagagttgtgatgcaaatacactgcacagtggaaggagaagaggaagtttttggtaatagtgtttcatctaatgtagctctgtaatgtatgtgtgccttcattattggaagagtgttcaacagttcacagttgaatagactgaagcatgatgctggaatctgggttcagattctagatccgtatcctacatatcaccaatgcttgtttctcaatttttgtttgtcattactttaagtctctttaatgcattagagtatccaaggttgacagtgaagggactgcatttgggagctatctgaagacaaaaacagctttttgaagtttctttcatacgtcaccttacatggcctctcgcattctctgtggagaagtttgtgtagattattcagactaccgtgcagtgactgtgttgtttaaaacctatacatatccaaactctgttttgtgttctctataactagggcattagtctcccaatagtaatcctgcatcttatgctatttaaagaaggttcccagaatacagacattcttacttttgaacaatgacttgggtagattgaggaagtggttttaataatcactttgatatatttcaaaatctggttcattattggtgaggtgcaggccacctggtattaatgaaaatgtgtaattaggaaccagtgcagtggaatcagaggcttgaacatgacctaaggcttggtcaaaagtggtgatctgaatgttccctgctctctgtatgtaactttgtacttagtcttcagtggcagggttgcagcagaggcccagtaaatattgttcattcaacgtatgaaggagaaaatggaagtaaggccaaaaattactgattgtaaacaaatgaagcaccaagtgaataaatgtacaaatagacaagtagccagtaggaaaaaaaacaataattgttacctaaagaatgaaaaccaagtggaaaaggccgccagggacattttaatatgcatattgttgctttcacatataatacagtaagggagtatcagaaaacctgaatctgcctgactaaaacataccctgttccacaaagctatatatatgagagtattgaaggtggtttaataccaaattcaaaaattcagcctcagtgtagcaaacttttaaattttccatgatataaagtaagttttaaccaacaatggaagtcacagcactaaagtacattactattatatgattctctgatggtaatagaaactgtgctgcaggacacgttttgattcaggaagaaatgtggagtaactccacagaggaattcatcctttctaagtttaaatctgaacggaacccatatgcccataccctgaagatgcatgtaagggaacaacatggcttggtctgttgaaaaaagaaaagaaccttcaattaagcattctgtgaacttgataagaggatgcagaggaacgtaaatgcactctgcatatctgtgattgaccttggaacacagtgattgccctctaaagaatagccgagtaagtactgttatcattccaccgatcaaattagagcctcttccttccagtgggagcagagtgacatagaccaaggaaagccgaggagaagattgtagccttttatttctccttatatttgttgaggttcactgctgactgataaacgatttgcacaaaaaaattcaggcctctgactcttctggtatttgatttatctagtaaagttaattccaagacaaaagtacagttggttaaaaataccagtctcatgtttatttgatggtttgaaatattctgttacattgttgtatctcgtttgtcaccttggaatatatgacaatcatgttatcttgattttttccacaagataatttgattctaaaatcgattcattgtttatcttcaggaattagagattttaaaaatgtcatctcatgtctcattcagtcatttccaagatttagcgagtgttctccctaatgccttggataagaatgccttgttcaatggctgtattttactcataattagcattccaactgctttgggtttttttagatttacaatttttatttctgcagtacttaactttctatattttatgtatattaaaacaagttaggtaggatgaagatcactggatgatataaatactaatagcaaaagtagaaataagttgtattatataagttgtacataggtgttacattaggttgtcttacatgaaagtattacaaagtatgggatttggggtgtattttgaaatccttgccagttctacttgataaagtattgaatggtatcatgtgagaggagaagaggacggaaacaggacttatgatttagacctcaacaactgctagggagggttggttttctctgagtgcatgattttttataaaaatgctattttgccagttttagatccatattaaacccacagattaaggttttggtttttaaagtgtaaataggaagcttgagctgggggggaatttggaggtagagataatacttaatcgctgtgggaaaggatgagatctagagatagagtgtatgtgggagtaggaacatatgtgtctgagaccatgctttggatgctctagcatttagatattgagaaaatgaggaagacccattaaaggagattgtggctagagttactggtgaaaaccaaagggttgtagtgttcctgaagatacatgaagagtgagattaaaaattaatggggcagcagtggcttttgcatggcattgaaaagacacagttcaatttgaaaattgagtatcattaatcgtagtgctcttattattgaaaaggccaaatcaaacaatacctttgagttgatggtctgtactataattaggttaccattgttagcccagcatagacacatgctgatacctgtgagttgctttcatcaattagtatgtgaagatgcatcccagttgtacaattttagatcctcttcatcattccacattatatgtatacaagataaaacttgatgttttcattacatcctttcaatcttctaacagcagtccttacgtagctttatcattggagtttccacttgcagtgtctctatctgtacctgcattcattggccacggtagagttttcattacggcaggattgcatttcattgttttggcttgtgtcagacatttagcaaagattgttgaggaaaggaatggatggaaggggccagctgaaagaaaaagtaacaacctaatgatggataagtgaaaaaggaatgaagaaaggatggtgctaggaatcgagggagtaaagcaagatagaatgtacaaaaggtcgaatttttaaagaaagttgtagggcaagggcaaggtgtgttgaacctacatttaaaatacaataacatcactaaagtcgaggccgggtgtggtggctcacccctgtaatcccagcactttgggaggccaaggcaggcagattacctgaggtcagaagtttgagaccatcctggccaacatggtaaaaccccatctctactaaaaatacaaaaattagctgggcgtggtggcgggcgcctgtaatcccagttacttgggaggctgaggcaggagaatcacttgaacctgggaggcggaggctgcagtgagccaagatcatgtcactgtactccagcctgggcgacaagaatgaaactctgtctcaaaaaaaaaaaaaacccatcactaaaatcagggagaaaaaaaccatcactaaagtcagggataaagtaccattgtggaaggtgttcttttccagcttaacctgaagaattgtacagtcattgtacattgtcattccctaactaatgggttagatatgagtctgtagaaaattgtttgtccaacatactttatgcctcttaacatttcacttaccaaatttcatttcattccttcattttgtgtctaacagactagaaataatgagctcctattgacagggatattttcctcttcatactttcctttaccttacagagccttttatgtagcagatatttaatttcataatgggtctaaactacttgtttagaccatggatgagtgaaattttgatgaatgagccccaatcacctgaagggtgagtaaaagaagaatttctagagacccaatatgaagtagctgcttcacacttttttgagaatgttatggcatgactgaggaaatcatagatgctgtagaccatgttgagttggattgtgtaaatatagattctggtattagggaactcagcatctgctggattagacttcttatggtgaaagtctttttttagggattaggcataaatccccactgatatttgtgcagtaatagagtatagctcctgttttctttcctgcttgtatagcctgtgccattagtgtcctctttctcactgttttctcaaaggaaaacagtcaaagaggaagccatatgcatggtagactttgtaatccgggaaaagtcaacatatttcatagtagtgcactttttatgtgttgtcagtccttagaaaggattcattttctccatattatatactactctattttaaaaatttcttgggggagaatggctgtagacaggccaatgatagaatcatagaatatagtcactgtctaattactttcaatcaagagagggaacaataaagtacaatgtatgtcgctgacttcagtgtgaccactcagtatttctgtaacacagtatttatattgctgtacggtagagttatacttatttctgtgatccagttcatttgtttaatattgggattcaaggagtgttgaagaaatgtctactgattaataacagatgggaagagtgtatgtgttttaaataagagaccaagagagacaataaggaaaataagaaggaagtgtttgtgaacctttcacattactcttacattcgggaagtccacaagacaccgtagtggagattctgaggaggtgaaaacctgtagaaaaatgctttattagtaaggagctgactaagttgtcagaaagtgttgatttttagaaggatattgagacattgggtatatagggtatatgactccttgtcttcctttcattctggcttcttaccagctgttgtgaataagtttaagatttcttctgacgttataaacttcagaaaaggtatggctgtttgttcagtttgaagtagtatcatatccgccaaagccttgttcaattgtcttgttgattcatggttctcttcagtgataatattatatgggattcctacccacagccacccaatatctcagtggagaaatgcaggtttggagagaacatctgaatagaatcacgctaagatggtacatttgcactgagaccattgttatgtggcaggcagacatgaagtatcctaggattgatcagtatgccttaatgtaaatagctgcatatagacctgatttcttaggctccccacttcaagctcttgaatattgtgttgatatccttatcaatacactttgtcttgtgttctgtgttgtttttccaaaatataacgagctcctacttgacagggattttttctttctattgtcttacgataaaatgtcaagataaaaatgtatgagtttcattaaagtttattgaataaaatttgtgatggaatgagtgacagcgaggtcatgaatgagagagaatatggaaataatggagaatgtgatattctgatagtcatgcaatattctttttgatataatatgtaacatatattagtatgttatattctatgtattatttgtcatatattattactatatcctgttgctatatttggataatttgggaatctgccatgtttgatgatgttgaaaagagaacataaaatgtagtgatttcttaataaggtgtagaggtgtaggtattaactctttaagaatatagtgatttattttaaaataatgataggaaaggaccataaaaatgtctgaatttgggaaattagaaaatgttttctctctggggctttcatatgtctgttctatgtgaatgtcgctttgccatggctccctctttgctaactcttcttaacccctgcagagaaggaagtgtagtgatggtattttgagtccatcttcaggtttattgggaatgcaagggaaatgagttgttaccaatgggagtaaagggctagttgctatgccagtagctgctacttttgacactgcttgagcaatctgaatggctaggtttgaatctggcttctcagtcagaattttaccttcactctaatgctgctttttttcaaatcacctatatttacataaatatgaaccaacttcagtgatcttaattctttcccgaagatccaagtttctttccatctgcctgaagaactttctttagcacttctggtatagcagacctactgatgataatttttcttttagtatatggtgattagtttactttttattcaactgtgtctttttttgaagtcttcttcattgaaatatattgttactaaatatagaattaatggctttctttaagcacttcaaagataatccactgttttctggactccgttgatacttaagtctttatttttgtgtaattctttttctttaaatgtgccatttttcatttttctctgactcctacctactaagatatttttacctaagtattgagtcagttttggttatgatgtgactcagtgtgtttttatttatattgtttggttgtttgaacttcttgaatctgtaaatgttgtgctttatgttaaatttggggggatttcagccatttaaaatataacttttcagtctcttccccctgggactccaatttttacatatgtattagacctattaatatttttctatggatacctgacattctttttaaatcttatttttggtgtttttcactttgaacaacctaataatttgtttccatccatgttcactcactgtttattctattttttcccaatctgctcttaagcctatcctgtgaattttctttttaatttattttattttttagttccagatattttctgctttttgtttgtttttgagacagaatctttctctgtcacacagggtggagtgcagtgtcatggttcaccgcagccttgacctcctggtctcaagtgatcctctcaccttaacctacccactcctaagtagctagaactacaggtgcatgccaccacgctcagctaattttttatttttgtagagatggggtcgttgtgttgcccaagctggtcttgaactcccagactcaagcagtcttcctgcctcggcctcatgcccgcgccaaccagttctttatttttaatattatgttgtatttgatgtgctatcctattcatttagtataagcacatttttctttatgtcttcagcataattatatgctttttcagaattttaacatcaggactgcttccagggtagctttattgccctttgtcttaagtatggattatagttttcattctttgtatgtcaagtaattttggattgtaacttgaactttgaatatactgtagaaactctgaattctattttattcttctaaaacaatatttctcagcttcagcactactgacattttgaactgggtcattttgtttgtgttgttgtgtgtattttgggagggtactgttctatatgcattgtggggtactgagtattatcctttgtctccactcactacttaccagtagcataactctctctcctccccacatcccctgccaaaaaatgccttcagtcctttctaagcgctcttttttatggtgttggggccaaaatcatgcatctttactcactctttctcattgagagctatggctataaagggtagtgatacttttacttatttatttttaaggcaagcagttaacttagctggattcaaactccaggctgcctcgtgtgctgtgggaagcagcctacgctctattcagttcttttcttttcatattggttgggttactttgagtctggcctacatgatgggcagtttagaggtcaaccaaaggatttcagcagaacttatacacagaatttcattcaggcttcccgtgtctgattggctacagtgtgggaatttcctcccacttttcagccactactgaggatgcctttcggcaaaattccttgaaattggaaacttacagggaaattcctttcctccaagagtgcgctctcctccagtgttggcttgcttttggttgttctccgtggttttagatagctgtctttatattaattctggagtttacagttgatatctgttgggggcttagtttgataacatgtattcttctattactagtagccagacctgtatgtcttacttgacctgatggagaaaagtttcaacttatgagacaatactgtgctagctagttttactgatttgtactctaaagtacccaagcctaaaatagtagagctgtctatcccacatgaaacttctctgattttcactgttttttataaaaagtatacatgttcacatttctgtaggtttttttaagcatcacaatttttataaactttctatatttccaaggtctacctgctttgtattttgcctagtgagagttttgtattcatgtaggaataatctcttggtgtgagtatctattttccactcatccaaaacagatagagcattgatttcactaagcgttatgttctagtttgctttggtattattattagaaatacctggtgattaatttgagctaagtattcttctctaccctcattcccagcattatcacccgcttttaccacttccaaggggtggaagcattctccacaatgcattttttcatgccagagaaaaatctagaaaaaaatgaataaaacgaagaaattctttccccttggtatctgtagctaacttgcctaagtgttctttcccacagtttaagtcttcagtccatagttcataagcaaaggggtgtagcgagctctgatcttgccagaagagagaataagtgagctaccccacggtggacattctggccatctgaaatgagtcgatgcatgtggcttttgtctaaaggctacaaataaaatgtaaccactttcttctttgagtagttgatatagcaaatagttgaaacagaagttttgattggcaaatcaggatgtggtagatactttaacaaagagtagaactattaccagttttatgtgttgctgtttgtatctctttcacagttttgataatatcacatcctggaaagtgaaacagaaaattattattccattttaaatgactaaatttgctttcatggtatttacagtgaaagagtaaattagaaagtgaatggatgactgttcatgagaaaaagcagggtaaaaagattttatttaattaattgaaaatattagggtcaaaacataggcttatgttatgttttgtgaattgtgctgtgttgtagacatttgatgagtcctaacatagaattgatctagctcttgaaataccatttttgattgagtataaatgggatataggcaccttacaacttcagaattcgaggaagatgatgtgaatcttccaattttatctatttgattcaaatggtatgttttttcacatttctcataatttccacgtcaactcccatgatgatcatgcaggaaagcagcatgattgcacttcttgtagtgcataccatcactaaaacatagttactgtctttctgtggtcttaagaaaaattcagaaacagcataccaatgtacatataagataaataagcttatgtggtacagtaagtgttctgttctgagaaataccttgattcgtatcctaatgtctgatgttattggtagttctcaaacttccccaattctgctttcatctaaattcatcttatctatctattgttaaataatctatcagtccatttttatctatcatctatatatctgtctttatcaatcattcgtctgtaatctatctgtgccgtttggcataagagacagaagggcatagcagtggaaactcaaaggagttacctccatgtgaatggacagtggtgatggtgatctgtgaggtggtgatgtatagaaagaaaaactagaagagagcatgccctaactcagggaccttgtccagcaggcactctggccttgttatactgtgcttgaatatgaaaaaaaaaaaaatcaaaatagtgctgacattctttgtcttctgggtctgagaaaacttagagtagatatgatgactctgccatttcagtcttttgtatttccacatttagagctcagttttaattatgtagaattatttctccagcctgtgttaaactagaccatggattggcaaactttttttgtaaattgccaaatacacattttcagttctgaaagccttgtggtctttgttgcagctaatctactctgctgttgtgttatgaaagcagccataggtaatttataattgaatgagtgcgctgtgcctttcttccaataaaactttacaaaagcatcctgtgggctggagtttaccctttgggaaaccagagcattggctaaactggaacctgaaaaaataatcacatcaactcagccacatggtaataatatttagagtattatttcaacattttcattttcataaaaatttttttagctcttttgccaaattccatctgtgagtgatacaaatgactaccacgtgccattaacatcacctaaacagtgcaaaacaagcatagtagaagtaattggaatgatataaaccccttgctgtaatagttatagttgataaattatgtttcaaaattgaacctatttcttccaaatttcatctataaagttccaaggagttccaaaatcttgcctgccttcttttcccagttagcagtattgtctctgagcagccatggtggtatccatcctccttggacaatgaatttagcctattttgacttcatttgagcagttgtaattgtttcaccacatcagagtaagattactacatgccagagctattctttaactcagcttgtaaaaacatgatagcatcaacaatatacatagcaaatgaatgccatctttaatccaattaaatggtttttacaaatttgctcttgtttgttgatgctatctgcattgcagtaattaaaggtgaggtaaaaagaatgaataaactgccaagttaaaattaaatttgggcaatttctcttttgcagtaatgtatgtatatttactcaaaacatatgccaaatttagtgttgaaaggctcattcaaatcaattgggaaagcacgtaaatgaacaattcataaaagaaaagcattgcaaatggccaagagcatagaaaatgtgctcaatcttaccagtcattataaggaaataatgaaatttgtgtatatatgaaatacttaaaatatatataaaataaaacaattatttgccttttttcacctatcagattaacagattatatgtgttaacaaggtggggagaatttacaactcctgatatgttaaaatctttcaggaaggtagtagaaaatatatgtaagatggaaattagcacttttgaccaacaattttagttttagatatttacctataaggatataataggaggtgttcaaagatgcatgtaactcaatgtagtattaattataattgtaaaatagtaaataacatttttgtcaaatcataatgttaggaaaattagtgatggcacatttaaccaattgaattatattcagttctgaataccgtgatgcatgttcaaattaattgatacaaaaatccaacaactttagcagtttgtttaccagttattgagtaccaactgtgttcaacattgttatttcactcatatgaaatgataaatgtatgtgcgtgttatgatacggtcaataaaaccacttttataggaagaatactcacaaaatacagcgagttctggtcattattttattgttgcatttgtgtgtttgtgtgttttgaatacatacatgtatttcaattaactatagcatttattgaatttttatcacatgtaccagatggggagatcaacactttacatgaattataagttataatataataacttatataatgttattatataataacttattattataataacagatggaataacgaatttgtctttttaaaagataagtaaattgaggttgagtttgaattttgtaattcattctattatatagaagttaaataaacctatcctaggatgtcacaacctttggataataataattaaaaatacttatgatttattaaacccattgagcaaaatcatgttttgtgaaagaacccacatttcagaagtcatattcattcttcttttgtctttaaggccagagacatgataattattaagtgcagcttctcaggacagaaagtgtaagtgttggtatattgtaggaacaggagaaaaacatgaataggaacttgtcttttggaaattcttacagtataaacctttaaggagttacttctagaaatatggggtgcctttgctcaggatgtggaacaacatgttcccgggcagaaaccatattatacacaaagctctgagacatcatggaggcacagatgaaagtccaaagagaaatggccagtagaaagaggatcactaaatggaagaagctaactttggaatagagctggtgacaggtaatatgatgacttaaatgctgccaatagcagggaaaaggtccatggtaatatctgagtgaagaaacaattgccaactgatctagatttgaagggcataacctcttggaatatttttccagtgtaatttgtgatcatatggtctggattctacaaaatctcccccattctacaaaatctataatcagttctcttccattttcttcattcattctaacccttttctaaagacggcactttgtgtcttgtgaatgcaatcccttagcagttctcagctagtagctgaaactttggttaaaatggtaagcatgggggattgtgacataaattttgctttgctatggcagttattgaaatatttttataattttgactatttgtcatgtaaggaatgcacagtgccattctaactgtgtatattctggtatttggggggttggaaattgactatatgagattcttgcagctgggtctctgacatgttgagaatgctgaagaagaaaaagtacagaaggagaaagcagagatggggaaagctgcatccctcaaataggataccactggatactgagcagtgaacaacctctggttttgtcggacaccattttggaatatttggacacagtttccggaaggatgagagacctaatcaatggtagtaagatgtttaaaatattattaatacgaatgaatgcttaggcaaggttgacggtaaagctcttctgtacaataggtagcgttaataaagaaatgacaagatttggaaaatcagtatttggaaataatcataattgtttcagccaggaatcatcaaatgatgctaaaacttggagaaaattttaagagaaacaggacatttggtgtccttatcagttacaaagggaaagtagtagcttcctgatggagaacatggttgacagcacctgaattaaagaggtgaaagttaataccacagtagtgggaacatcaggcagcgctgataggatgcactgagaagaacacagtctcatttctgtagtattactgactaaactgcagaaacctgagtctacccatgaggaaacatcagtctcaaattgactgatattttgcttttagtattcaaacatactaatttcactgaggaaatggtccagattatttcagactatatagacatgagaatggaatatcacattggttcaggatgtctataaaaggataaggaaggttggcaaaatttgaagacagtccctcaagtagattatagtgttacgtgagtattaattgcctaagttatataattgcctgaggttatataacagaaaattcttgtttttaagaaattaaaacaatttaaaggataaagggataatgtcatagctgtaattttccaagcatttggataaaataatatacatgtttcaaaaaaaaaatgaaacagatgttgtaagatgttagcaaatagggaatccaggtggaaataatccaggaattatggatagtcttgtatctgttcagcaggtctgaaagtagttgatgaaaataatgcaaaagaacatgtcaaaaagaaatggtttgggcatatggcttcaagcatacataaatgctcaggaaacatgaaaatgtgaaataaatggatgagtactataataccagcaggccttgtagatacctgcatttgaagcatttatattagaaggaagcctttttacccagaatttttttcacttagcctaatgttttcaaggtttggccatgttgcagcatatatcagatctccattttttttgatggaggagtgatattctattgtataaatatatcacattttgctcatccactcactagtttttggctattatgactaatcccgccaggaatatttatgtggaggtttttgtgtgtttatgttttcaattctattatacatgagaatatagtaactgtgtttatttgacattttgaggacctgtctgtaagtgatgtttaagataatttttgttacatttgaaggcagataatagtctatgcaaaatgaatattctgttgaatattgatgtgaactattcttattgtaaaaaaaaagttacattgaaatagtaagtatagaagttatatcttggtggcggggcgtggtggctcatgcctgtaatcccagcactttgggaggccgaggcaggtggatcacagggtcaggagatcgagaccatcctggctaacatgatgaaaccccatctttactaaaaatacaaaaaattagctgtgcgtggtgatgagcgcctgtagtcccagctactcaggaggctgaggcaggagaatcacttgaacccaggaggcggagcttgcagtgagctgagattgtgccactgtactccagcctgggtgacagagcgagactctgtttcacccaaaaaaaaaaaaaaaaaaaaaaaaaagtattggtttttgtactcaacaagcagttttatgtttttatttttcaggaactctccaatactgaattcaggctgggatattagagaaaaggaaaatacatgaaactcagtggtgttttatggcactttgagttccccaattcaccttcaaacatttagccttccaagttctctgccaccgtatcagtgcatccctcctgagattcttaattctttgattgtgtaaagatggactatgcttactccatcttacttctcttaggtcttacaatggaagtgccctattacattttgttcttttctatgatttccaattattttatgaaatttttcatttattttttctgttctttctatctttaatttctatgtaactttttgaaatagatctcaaagattttatatatatatatatatatatatatacacacacacacagagagagagatatatatctactgtactattgaagtagattcctaaagtttttatctcttctagaatattggtttcacaacacccctattatgtgtatttaattttacccaccacatggcgttttcaaaaagtctttatttggcggaatacaacttcagaatctgattcgaagagaaaattgctcacagccgtgagccactgtgcctggccgatttttactatttaaagaaggaagaattttagcagcgtggggtggctcatgcctgtaatcccagcactttgggaggctgaggtgggcggatcacttgaggccagtagttcaagaacagcctggccaacatgacgaaaccccatctctactaaaaatacaaaaattagccaggcgtggtggcacgtgcctgtagtcccagctactcgaaggcttaggcaggagaatcgcttgaatcagagacagggaggctgcaatgagccgagattgcaccactgcactccagcctgggcgacagtgcaagactccatctcaaaaataaagaggaattggaggaggaaataaatgaataaatgacaaaggtgacaaaggaccaaagatctgtgacttgtgcaaagattgctctgtggtaattattacagaaacaatgtttgtatcttattttttagggaattttgtatattgtctaatctgatttactttgtttttaatagtttgctgcaggtctagaagatgtcacagaatttcaaggaagagaggtgagcagctgctgtggtgattttgaaattgtttgtgtgtgttgtggccagtgatgtcagaatttcaggatctgagagttcatgattttagaggctcaaaggagaatatttttataacttttttctataatttttttataatttttttatatattttttataatattttataattttttttgctatgtgagtatccctactttgttcaaggaatctcattatcttttccctttttttaaaaagggatttttttgtagtaacctgaataaattgggggaagtattgatatatttccttttctcaccattttttgttggatgaaaataatcttttagtgaaattcagtgtattaaatatttattttttaaagtctagagatggggtcatgctgtgtttcccaggctgcccttgaactcctgggctcaagcaatcatcttgcctcaacctcctgagtagctgggactacaggcatgtgctgccatgcctggcttaaatatttaaaaaattttatctggcacattctgaacacagatgtttctacttatatttgtcatgtagtcacagtatatattgattttgctacctcgcctactcctaaaagttttaattcatttaattggtcttaattggacttaaaaattttttccctggccgggcgccttggctcacgcctgtaatcccagcactttgggaagccgaggcaggcgtttgagaccagcctgaccaacatggagaaaccctgtctctactaataatacaaaattagctgggtggggtggcacatgcctgtaatcccagctactcaggaggctgaggcaggagaatcacttgaacccgggaggcagaggttgcagtgagctgaaattgtgccattgcactccagcctggacaacaagagcaaaactctgtctcaaaaaaaaaaaaattcccaatagattttaatctaattttattagaacaattcagtcatatgttttttcatgctatgtatatgagagttccattattcagatactaaacaaatgtctactgtacatttactcttctcactgatgatggattagataaccatgcacaaaataagcctggctgtggaaatgcttatttgttgggagggtgcttgtttggatcgatgatgagaataattgtctgaggatgctgagggactcattccagatgtcaatctgaggtccagatgtgtggccctccaataggacaaataagactctcagagcctggctctatttggggatccctcagtgacaacatagtacctctgtgagcgtgccttttctatctctccgaagagggcattagcatcctgtcttatgagtcagtatgcactttagtatggttagtgacccaagactcactttattttgttcattttgagcagagaattgtagatagatacatatatgggaaatatgttcttgattaacaaatgaaaaaatgaaaaagtttcagtcaagaaaggtcaaggaactgtgatgtatagtgaaggcagggaacactgcatgcctgtattaaatattgacaaaggaaccaattttagtgctttgttatttttactgttgagtattttctgagaccatttctttttcttctattttgttttgctgaggtagaggagggctggaatgaggtcctccacttcagaaaataggggtgagtagttaaaccaacatcctttggaattcatatacgtcatgcgttccatgccacatcctgagatctttttgttgatttttttagtggcttactggataatatctaaatactgtatattttactttggtgagtctctccaccttcatttctgaatcattgtcctttacatttttattctatttgaattttgcatgaaatgacaaatgtagaattttgcccaatttattttatttattcatttatttatttgggaagacaaagtctctctctgtcacccaggctggagtacattggcccagtcagagctcacttcagctcttcaccctgtagcccttaactcctgggctcaagtgatcctccaccctcagcctcccaagtatctaggaatacaggtatgtgttaccacacatagctaatttttaaattttttattttgtgaagataggatcttactgtgttgctaaggctggtcttgaactactgggctcaagcagtcctcttgttttggcttcccaaagtgctaggattacaggcaggagccaccatgcctggcatcattagggatattggtctgtgattcacttttgatgatgtctttggttttgataaaaattagggtaatagtagactcatggaataagttgggaaatgttttctgctctcctgttttttggaagagttgtgaaggattgatgttatttctttaatgatttggtagaattcatcagagaaatcatttgtgtggaattttatttgtggaaacttgagtagctaattcaatctcttgttaaaggtgacttcaattttctgtttttccttcttgtgacagttcctgtaatttatatatttctaggaatgtgcctatttaatctaggttatgtaatttgttgacataacttgtttatataagggtgttagtctgattttcatcccagattttatgaaaattgggtcttctgttttcagtagtgtagatatagttatgtcaattttttaagagacagagtcttactgtgttgtttatgctggccttgaacttctgagcctaagcaatcctgctacctctgcatcttgagtaggtgggagtgtgggaacacaccaccacacctggcctgtcactaaacaaacaaaaaatttcagtgaaccagcttttgatatttttatttttcttctgtattttttattttatttattggcattttattcttatatcttttattctacttgatttagctttgctttgtttttctgttttcttaaggtaaaagtttagattattgatttgagattttcctttttttaatatggacatttacagctataaatttcccaaagaactcttttagctacatatatattttcttttgttgtgttttgtttcctttgatttcaaactattttataaattttcttatttctcccaagaactcccaatgattcttagtaatgtgttaatttccatatattgtgaattccccccaatttttttcctttatttctgatatgattctattgtggttggacaccatacttttctgatttctttactttcagatttgttgataccagtgtgtggtctaatacctaccctgcacactgttccatgtgcacttgaaaataatatattttctactggttagattgttccatagatggatgttatgtaactgttttatagtgttgtttgtcttctatttccttgatcttctgtctcattgttatgttcatcattgaaagtgaggtattgaaattttcagttattataatgtttattttgccttccattctgtcatttttaaaatttaatttgggggttatgttgttggatgcacgtatctttattattgttatatcttcctgatggattgacagtttaatcatcatgaaatgtcctttgtctctaccaacaatttttttttttttgagatggagtctcgctctgttgcccaggctggagtgcagtggcaccatctctgctcaccacaagctccgcctcctgggttcacaccattctcctgcctcagcctcccgagtagctgggattacaggcacctgtcaccacgcctggctaattttttgtatttttagtagagacggggtttcaccatgttagccaggatggtctcgatctcctgacctcgtgatccacccacctcggcctcccaaagtgctgggattacaggcgtgagccaccgtgcctggccctctaccaacaatttttatcttgaaatttatttagcctgataattgtagtttttgtctgacttatagcccataaactctctctggttactgtatgcagtttatcttgtcattattttactatctacctatttttaattaaaacaaaatatctttgagacaggatctcactctctcacccatgctgtagcgcaatggcatgatcatagctcactgcaacctgaaactcttgtaattcaagcaattcttccacctcagcctcctgagtatctgaaactacaggccaacaccaccacacctggctaatttttttgtattttttttcttgtagagatgaaatcttggtatcttgcccaggatggttattttctacctattttttgtccttgaatctaaagtgtatcttttgtagagagcatatagttgtatcatgtgtttttttaaaaagatacatctctgccttttaagtggagagtttacttcatgaacatttaatgtaattactgataaggtaaaattcacatctgccattttctattttcttttatggcatatatctgttttgtttttcttattgttctttatgttaaataagtaatagtgtactgctttaattttctttttaattttttgtgtttacttattagtggttgcctttgagattatagttaatttgttaatttataatatagcttagatttaatagttaattttaatagtacacagaaactatttttcaatatagctctgttttctcacccttccttttgtatattattgtcattcaaacatttataccatcttttatatttgcctaataattattttactggtcctgtgcatttcttcatatggatcaaagttaatgtctagtgctatttcacttaaggctgaagtctccatttaatttttctggtaggataggtattttgacaaattcagcttttgttggtttagaatgtcatttcttttttatttttgaagagtacttttgctgtttcaagatctatgggtagacagtcttacttctttttctttaaaatagtttgaatatgttatcttactgttttatggcttcaagagtttctgatgagaaatcagctgttagtctcattgaggattccttgtacctgatgggtttgtttttctcttcatattttgaagactggcttttgaaatttttactatgacgtctccatgtctttatgtgtatctcacttgagtgagtcaagttcatttgactcattttatatgtacatgtatgtttttcccttacattaaggaaattttaggcgtttgttcttcaaactgtttctgcccttctactgtgacttttatgaacatgttgatatgctgtgttcctcagttctctgaagctgtttttcttttttctttctgcttcacagaatggatctcctcaactgtcctgtattcaaattcgattaccttttcctgctagctcaaatagtgtgattaaatttttctagtgaatttttattatttatttctctgtatctttattgtctagtaattgatacatttttaaaaaatttaaattttaggtttaggagtacatgtgcaagtttgttatataggtagattgtgagtcatgttggtttggtgtacagattatttcattacccaggtaataagcatagtacctgataggtagttttttgatcctcactctcctcccaccttctaccttcaagtgctcccagttacaagagagaatgtatggcatttagtttactgttcctgcatcaatgtgcttaggattatggcctccagctctattcatgttgctgtaaagaacatgatttcattcttttttcatggctacatagtattccaaggtgaaaatgctccatattttctatgtccagtctaccagtgtgatagttaatattgagtgtcaacttgattggattgaaggatgcacagtattgttcctggatgtgtctctgtgaaggtgttgccaaaggagattaaaatttgagtcagtgaattgggagagacagattcaccctcaatctgggtgggcacaatctaatcagctgcacagtctcatcagctgctggtagaataaagcaagcagaagaatatagaaggactagactgtctgagtcttccagccttcatctttcacccatgctagatgcttcctgcccttgaacattggacttcaagctcttgtactcttggacttacaccagttgtttgcaaggggctctcaggccttcagcccacactgttggcttcccgacttttgaggttttgggactcagactagcttccttgctcctcagcttgcagaggaactattatgggacttcaccttgtgattgtgtgagtccatcctccttaataaactcccttttatatatacatctatcctattagtcctgtccttctgggaaaccctgactaatacaaccagtcctgggtacctgggttgattgtatgtctttgctcttgtgaataccacagtgatgaacattgaagtgcatgtgtcttttggtagaatgatttattttcttttgggtatataccagaaatgggattgttgggtgaaactgtagctctgttttaagttatttgagaaattctcagactgttttcctcagtgaccggactaatttacattcccaccaacagtgtttaaacattcccctttttcttcaggcttgccaggatctttctcttttttgcttttaataatagccattctgacgttgtgagatactatcttattgtggggttttttttgttgtcgtcgttgtttgtttttcgagacagagtcgcccagggtggagtgcagtggtgtgatctctgctcactgcagcctatgcctcccgggttcaagcgattctcctgccttagagtcccaagtagctgggactgcaggcgtgtgccaccatgcctggctactttttgtatttttagtacagatggggtttcaccatgttggccaggctggtctcgaactcgtgaccttgagtgatccaccaccatggcctcccactgctgggattacaggcatgagccaccgcatcgggcccttatggtggttttgatttgaatttctctgatgattagtgatactaagagcattttttcatatgtttgttgaccattctatatcttcttttgaaaagtgcctcttaatggggttgatttttgcttgttgatttatttaagtgccctatagattcaggatattaggcttctgtcaaatgcatagtttgtcaatgatctctgttcgccaatgatatggttctatacctagaaaatgccttctttaagaaaataaaattgtattttgtggatgtatcacattttccttatatatctgctttgggcatttgggttgcttctgcctcttgggcattatgaataatgctacagtgaatatggatatgcagatgtatgtttgagatcttgctttgaattactttggatatatacccaaaagtgggattcctggatcatatggtaattctattgttaatttttcaggaacctccatacatttttccacaatggctgtaccattttatgttcccatcaacagcatgcaaaggttccagtttctccacattgtcaccaacacttgctgttttttatttcactcttgttgcccaggctggagtgcaatggcactgtcttggttcactgcaacctccacctcctgagttcaagcgattctcctgcctcagtctccccgagtagctgggattacaggtgcctgccaccatgcccagctaatttttatatttttagtagagacagggtttcaccatgttggccaggctggtcttgaactcctgacctcaggtgatccacctgccttggcctcccaaagtgctgggattataggcctgagccaccacgcctggctcgttgtttttcaattgtatcttctaatggatgtgaggtgatacctcattatggttttgatttgcatttgtttagtaattagtgatactgagcatgttttcatatacctgttgtccatttgtttatcttctttggaaaaaaatctattcaattactttgccccttttttaaaattagggttttttgttgtaatctgagtttgttccctccctccctcactctctccctccctctcttccctccttccctccctccttccttccttccttccttccttccttccttccttccttccttccttccttccttcctttcttccttccttccctccctccctgtctccctccctgtctccctccatgtctccctccctgtctccctccctccctcccttcttttctcccttcctccctcccttcctccctccctttctcccttcctcccttccttgatcacatccacatccttccttccttcgtgctgtgttgctcagcatggagagcagtgccaaaatcatggctcactgcagcctcaactttccaggtgccagagagcctcccacctcgtgctcgtgggaccacaggcacatgccaacacgtctagctaattgttttttaatttttattttttggtagatatgggggtctcactgtgttgcacaggctggtttcaaactcataggctcaaggaatcttcaaaccatggcctctcaaagtgttgacattacaggcatgagttaccatgcccatcctgcatgtgaaagccttacgagatatgatatgcaaatatttctctcatttggtacgtttcctctttcattctgttgattgtttcccttcatgtacaaacattttaggtttgatgtagtcttgcttgtctgtttttgcttttgttggttatacttttagtgtcacattcaaaaacttattgacaaaaacaagaagggtttccatgtgttttcttctagttttacaatgtcaagatgtatctttaagtacttaatttattttgagttgatttttgtgtatgttgtaaggtaaggattcagtttactttttttttttaatttgcggatatccagtatgccaaatatgattagttagataaactgtgctctgagcacccatgtcaaagataaattgagtagagtacatggatttatttctgcattcttcattcttttccattagattatgtctgttttttgccagtattctagtattttgaattactatagctttgttatatacttggaaatcaagaagtgcctccacctttgtgtttcatgctgaatattgatttagctattttggttcttttgtggatccagataaattgtatgatttttttctctatttctggaaaaatgtgattgtgattttgataggaattatagtgaatcagtagataactttgggtagtatggatattttgacaatattaattagtcccagtggtggtgttgaggccgtgttgacctggaggcactggggtcagtgatagtgttgtcaagttggctgcaggatgggatggtgcctgggaggtcagtgcataaaaatcctatggatgtgatcaaggaaagggtgatggaaggtgatgtgtcctgtctgcttggtccttgtaggatcaggcaggacatcctgtaataaaaggagacattaccttcggatgtcctgagggcatggtgcaggcaccaggactgagtggaggggaggaagctcatgtcttgaggtcctttggctacatggggaagactgtctctgggcttgatgctgagttccagactgacgtgctggctgttgtgatggtgctctccagtgctggttgtggttggtttttggctaggtacacctcacctgggacagtggccaaagacagtgtcagttccagacatcagaagccccatgaggaagagcatgtgctcgcgccaggagtggtggctgttaggggagggacctcagacctatgtctgcatggcctgaggtcagagttcacatcctactgattgaagaccttgttcttgagctgtccggttgccacagggtcggacctggaggctgcagaccatcgtggccctttgcagtgttcggaaacatatgcgcaccccagggagggacacacacacacacacacacacacacacacacacacacacacacgcaaactcacaaacacaacacacagacagaaaatgacaaataaacacacacactcacacacacacacacaggagcccacagaaaaaagcaaatagacgcagaaacgggcacgtgcagtagttctggccacacatgttccctaggtatccacagaatggcatgggtattgtatattcataaagatggagatcagtcatggaggccaaggacaagtaggtgcactggttgaactacagtagagaatggcatggaagtggtgagcaatggacctgggcctgtttctcaagtgtgtatttgatttctttacaattccccggagaagttgtcatgggaggccagccgcctgctggcaaggaagatggttgattcttctgatcaatggaggccctgcagagtcctgtagtcactgtggcctggcatccatggtgcacccaatgctggtggatggcttaggacggtaagcattcctctgccccacgtgctgaatgagagtggcttttggatgtcctataccttcaaggagctgtttgtcagcagcgaatgacatggcaagttccactcctagagtggatggtctgtgcccattgctcagtggtgcagctctggcttccccagcatgctgaatgtctttaaggtcatcagctcgccccttcccagcctgtggtgtcaaatgtcttgccccttgtcaaatgtgcttggatcgatgatgagtcccctataaaaacattccttggaaaagctgaacaaaatgagtgagaactcataacgtcattctcatcggaactgaggtccagcatgttgcttcctctggggcctgtaggagtgagggacaacttccactgattcccataggttccaccacccagggcatccacagacaaaagtctcgtgtcacaggcacgttaggaacattccctctgtgtgaggtacatgggtgggagagtgatgggggattcggccgctctgtgatggcgtggtggccgtggaagcaggcagaaatgttgcaggcctaggggaagtggaaatgttgccagcacaggggtgtgtgctactggtaagctcccagaaggaagacccggacctcacagtggtcatctcagtgcagaagaccaggtgtctgttttcatgtcgaggagagcccaaggcccagacctcaggcagaccttggtgttgatttttgattagttgagaacaggggagtgccaaggtgttaggggagagtgcagagcaataggtgtcggggcaaacagtgaaagcctcttcagcctaccctgcagcattggtcaccaggagccctcctggaagggatttctttgcctcctgagctgtgagatgcctgtggtgcagtggcagaggcctaggtaggaaggtactccaggggaaaggtggtagagggatcacatggacatgagtgtcattagcaggcttgggctgtcattcaggggtgatgggcttcccatggatttttctggtggaagacaggttggccagcaggggtcttcgaggccaggtcctggggagcacgaggatcgagttggtgcccgtggccctgggtcacttccagtcttcccaggagagtaatgggctcctccattgtgcaaatcttcctataaatggtctcttggcccgccattattgggcggctccacctgctgcagcttgtatgagcaaatactgctctggatcctctttcctgcttggaaagcagcttcagtcctgaaggtccagagtgaatgtgccctgaccctggctctggcccaagtctgtgccgtaggtactcgtcacacttggagctatccatggaggtctgtgtgcattccaggcaacacgggtgcaatcccaggggtgctgccacagagtccttttacttgggatgcctcacacctctgcatgttggcaatatttaagtgttggagtccactacaccctaggggtgatgaactgttttggctcccttaaccggtttgaagtctcagcgcagccaggacagccatgccatgttgaagggcatgcagatggcttaggaatgttggaaaggatgggtggttctgagctcgcagctcactcactagctgcatgcatgtagacccagtggtggtgttcaggtagtgttgactttgaggcattgcggcgggtagtagtgcagtcaagttggctgcataatgggatgttgcctcagaggtcagtacaggatagccctgtgggtgtgtccaatgcaaggaaaatgaaaggcagtgtatcccatccgcctggtccttgggacatcggtaggggggacgtcccattggaaaagcagccattccgtttgtgtgtcgagagggcatagtgcaggcacatggactgagtggaggggaggaaggctgtgtcttgaggtcctttggctagattgggaagaccacctctggccttgacgccaagtttcaggctgatgtgctggccattgcaaaggcgccctccagcacaggttgtgattggttttccaccaggtacgcctcacctgagagggcggctagagacagtgtctgctcaggacatcagatgtcccgtgaggaggagtgtgtactcacaccaggggagttgactggtaggcgagccaccttgggcctatgtccgcatggtctccaggtcaaaattcacatcctactgattgaaggccttggtcttcagctgttgggttggcgtggtgtcaggccaggaggctgcagactatgactgcctgttgcagtgttgggaaacacacatgttaggaaacacatgtgcatgagggagacacacacacacacattcatacacacacacacacacacacagaggcatgccgagccacaggcaaatacatgcagcaatgggcgtatgtgaccacgtgcacttttaggtatccacagagtaacacatgtaagatatattcatggagatggaggtcagtcgtggaagccaaggaataacgggtgtgcaagttgcccaacgggaaagaatgggattgaagtgttgaccagtggacctgagcccatttctcaagcgtttatttgatttctttacacttctcagaggcagttgctgtgggaggtgtggtaactgctggaaggaagatgctcaattcttctgagcaacgaaggccacacggagtcctggattctgtgtggcctggcatccatggcgcactgtgtgctggcaggtggctcaggacggtaagcatttctctgcccagtatgctgaatgagggtgtctttcggatttccaagacccgcaaggagcagtttctcagctaaccactaatggcatggcgagttcctctcctagagtggatagtctgtgctcattgctcagtggcatcgctctagtggggccgaaggtctttaaggtcattggctcacccactgcccagcctgtggtgtcaaatatcctgccccttgccccttcaaatgtgcttggatcgatgatgagtccccaaaaaaaacattccttggaaaagctgaacaaaatgagtgaaaactcataccgtcattctcatcggaactgaggtccagcacgttgccttccccggggactgtaggagtgagggacaacttccactgattcccataggttccaccacccaaggcatccacagccaaagtctcccatcaaatgctcattaggaacattccctttttgtgaggtacacaggtaggagagtcctggggggaacggctgctctgtgatggcctggtggccatggaagcagacagaaatatcgcaggcctagggtagtgtgcgcctgatcttggcttggtgagctcctaggaagggagacgcggacctcgtggcaggcgtctctgagcagaggactgagtccttgttttcttgccggggagagcacaaggcccaggcctcaggcagatgttggtcctgatttttgattagctgaggacaagggagtgccaagggtgatgggggacagtgtataacaaagggtgttgtgacagagagccaaagcctctttggccctccacccagcatccagtcatggaggccccccagcagggatttcttcatcccctgagccgtgagatgcccctggtgctatggtggaagcctggactggaaggtactccacagaagaggtggtagggggcttatgtggacatgtgtgtcatcagcagtcttgggctgttgttcagcgttgatgggctttccatttatttctctagtggatgacaagttggccagcagaggtgtcagagggcaggttccagggaatacaagggtcagacttgtgctcctggcccttggtcacttctcgtcttcctgacagagtagtgggctccactgttgggcacatcttcctggaagtcgtctcttggcccgccattgccgagcggccacacctgctgcagctcgtgtgagcaaatatggctctggatcctctttcctgctttgaaagcagcttccatcctgaaggcgtccagagggtatgtgtcctggccctggccaggaactctgctgtgggcattggtcacacgtggctatccatggagatccgggtgcattccaggcaacattctaggggcctgccatggagagttcgttgacttgggatgcccctgcacctcccatgttggtgatgttccagtgttgcattctgctacaccctaagggtgatgaagcatttcagctcccttaaacagtttgatgtcacagtgcagccaggacagccatatcatgttgaggggcccacgactgcattaggaatgttggaagggattggtggttctgcagatcgcagctcattagtagctgtttacttgtagacctggtgatggtgctgaggcagtgttgacttgcaggagttgggatgggtggtaatgcagtcaagttggctgcatgatgggatgttgcctcagagttctgtgcagagaagccctgtgggtgtaaccagtgcaaggaccatggaaggcagtgtgtcctgtcaacctggtccttggggaagggacgtcctgttggaaaacagccattcccttcggttgtcctgaaggtgcagtgcgggcatgtggactgagtggaggaagcccgtgtcttgagatcctttggctaggttgggaagattgcctctggcttgatgccattttcagacctatgggttggtaattgtgaaggcgccctcacgtgctggttgtggttggttttccgccaagtgagcctcacctgggagtgcagccagagacagtgtcaggtcacaacatcagatgccccatgaggaggagcatgtgctcactccaggggtggtggctgttaggtgagggacctcaggcctatgtcctcctggcctgattttacatcctactgattgaagaccttggtcttgagccttcgggttgcaggggcttcaggtctggaggctgcagactatggcctcctgttgcggtgttgggaaacacatgtgcatgagggaaacacacatacactatcacacacacaaacaggcgctcacagccacaggcaaatatacgtagcaccacgtgcgtgtggtcgttccggccacacgtgcttcctaggtgtctagaaagtgacacagtcagatacatttataaagatggaggtccataatggaggccaaggagaagcgggcatgtgtgttgctctgtggaagagagtggcgttgaagtgaccagtgaacctgggcccatttctcaagcatgcatttgatttctttacacttctcaggggcagttatcatgggacacccgccatatgctggcaaggaagatggtcagttcttctgagccacaaaggcccccaacatcctggagttggtgttgcctagcatccacggtgcgccccctgctggtggatggctcaggatggtaagcattcctccgccgcacatgctgagtgggggtgggatttccaagacctgcaaggagctgtttctcagcaggccactgatggcatggcgagttccactcctaaagtgaacggtctgtgcccattgttcagtggtgcagctctggcttccccagcgtgcggagggtttttaaggtcatcggcttgcccactgcccagcctgtggtgtcaaatatcctgccccttcaaatgtgcttggatcgatgatgagtcccccataaaaacattccttggaaaagctgaacaaaatgagtgagaactcataccgtcgttctcatcggaactgaggtccagcacattgcctcccccggggactgtaggagcgagggacaacttccactggttcccagaggttctaccactcagggcgtccatggatgaaagtctcacatcacaggcacaatagaaatattccctctgtgtgaggtatacaagtaggagagtcatggggggattggctgctctgtgatgtcgtggcaactgtagaagtgggtggaaatgcagacctaggggagtgtgcggctggccttggcttggtgagctgccaggaagggagaccctgacctcctgatgggcctctctatgtggcggaccaggtcttttttttatgccaaggagagcacaaggcccagacctcagacagaccttggtcttgattttcagttatctgaggagaggggagtgccaaagtgatgggggacagtggagagcaatgggtgttgtggcagacagccaaagcctctttggccctccccccagtgttggttacaggggcccctggcagcaatttctttggctcctgagccatgagttatccatggtgtggtggctcagcctgggcaggacagtaccccagagaaaaggtggtagagggctcacatggacacgcgtgtcatcagtggtcttgggctgtcatttggcagtgatgggctttccatggatttctattgtggatgacaggttagccagtggggccttcaagggcagatccaaggagcatgagtgttgggctgtagcccgtggccctcggtcacttctggtcttcccggcagaatagtgggctccaccgttgtgcacatcttcctggaaatggtctcttggccctccattgctgagcagccccacatgctgcagctcttgtgagcaaataactgctttggatcttccgtcctgctttgaaagtggcttccatcctgaagactttcagagggaatgtgccctggccctggccctggctcggaactctcctgtgggattcggtcacacttggagctgtccatgggggtctgtgtgcagtccagacaatgcatatttaatcctaggtgccttccatagagagtcccttgatttgagttgcctctactcctctgcatgttggtgatactcaagtgttggatttagctacgccctaggtgtgatgaactgtttcaaccccgttagtctcagcgtagccaggatagtcatgccatgttgaagggcatgcagatggcttaggaaagttggaaaggattggtcattctgcggctcgtggctcacttagtagccatgtgcatgtagacctggtggtggttgtcagatgtcgttgagcaggtgttggggaggatggtcctgcatccaagttggctgcgtggtgggatgttgcgtcggaggtcggtgcaaggaaggcctttgagtgtgatcgatgcaaggatgatggaaggcactgtgtcctgtctgcctggtgtttggggcgttaggcagggatgtcccatgggaaaagcagccattccctttgggtgtcctgaggacatggtgcaggtacatggactgagtggaggagaggaagcccgtgtcttgaggtcatttgcctaggttgggcagactgcctgtggccttgatgctgagtttcagagtgacgtgctggccgttgcaaaggcgccctccagtgctggttgtgtttggttttgtgccaggtgtgcctttcctgggagtgctgccagagacagtgtctggtcacgacatcagatgccccgtgaggaggagcttatgctcaggctagggatggtggctgttatgtgagggcccttgggcctatgtctgcatggcctcgaggtcagagtttacatcctgctgattgaaggccttggtcttgaattgttgggttggtaggggctcaggtctggaggccgcagactatgactgcatgttgccatgttgggaaactcgtgttgggaaacacatgtgcatgagggagatacacacacacacacacacacacacacacagccactcagcaatgtgtgtgtgcgcggtcggtctggcgccacacacagctccaagctgtttgcagagtgccactggtaaggtacattcatggaaacagaggtcactcatggaggccaacagaagcaaggcgtgcaagttgccacgcatgaaagaatggcactgaagtagtgaccagtggacctgggcctgtttctcaagcgtacatttgatttctttatacttctcaggggcagttgccgtgggaggcccgctgcctgctggaaggaagatggtcagttcttctgaaccacaaaggccctgcagagtcctggagtctgtgtggcctggcttccagggttcacctcatgctggtggattgctcaggatggtaagcattcctctgccccatgtgctgagtgacggtgtcttttggatttccaagacccataatgagctgtttctcatgaggccactaatggcatggtgagttgcattccttgagcaaatggtctctgccttttgctcagtgccatggttctatcttccccagggtgccgaaggtctttaaggtcgtcagctcacctactgcccagcctgtggtgtcaaatgtcctgcctcttcaaatgtgtttggatcgatgatgagtccccccaaaaaaacattccttggaaaagctgaacaaaatgagtgaaaactcataccgtcgttctcagcggaactgaggtccagcgcgttgcctccagcagggactgttggagtgagggagagcttccactagtccctataggttccaccacccagggcatccgcaggtaaatgtctgccatcacacgcacattaggaacattccctttgcgtgagatacactgttaggagagtcacggagggattggatgctgtgtgatggcgtggcagctgtggaagtggacggaaaaatctcaggcctagaggagtgcgtggcactgatgagctcccaggaagggagacccggaccttgtgtcaagcttcctcgcacacaggaccgggtcctggttcccctactacagagagtatgaggtcccagcctcaggcagaccttggtcttgattttcagttagctgaggacaggggagtgccaagggtgatggggaagagtgcagagcaatgggtgttgtagcagatggccaaagcctcttcggcccttcccccagcgttggtcccagggtcaccccagcatggatttctttgcctcctgaaccgtgagatgcccatggtgtggtggtggagacctgggtaggacatattctctggtattccagagaaaaggtggtagggggctcacatggacaggtgtgccatcagtggtcttgggctctcatttggtggtgctgggctttccgtgtattcctctgatggatgacaggtcgggcagcaggggtcttcaagggcagttcccaggcgtgtgagggttgggctgctgcctgtggccctgggtcactccgatcttcctggcagagtaatgggctccaccgttgtgtacatcttcctgtaaatagtctcttggcccgccattgccaggcggccccacctgctgcagcttgtgtgagcaaatactgctcttgatcctttttcttgctttgaaagcagcatccgtcccaaaggcatccagagggaatgtgccctggcccaggcccaggaccctcccgtgggttccaatcatgcatggggctgtctgtggaggtccgtgtccattccgggcaatgcgtgtgcaatcccaggggtgttgccacggaaagtctcttgacttgggatgcctccacgcctctgcatgttggcaatgttccagtgttggattccgctactccctatgcatgatgaagcattttagctcccttagccagtttaaattcacagtgcagccaggacagccgtgccactttcaagggcacttggttggcttaggaaagttggaaaggattggtggttctacagttctcagttcacttagtagctgcatgcatgtagacctggtggtgctgatgcagtgttgacttgccagtgttggggtgggtagtagtgcagtcagattggctgcatgaggggttattgcttctgaggtcggtgcagggatgccctgtgggtgtgtccaattgaagaacgatgacaggcagtgtgtcctgtcaacctggtccttgggaattcaggtagggacgtcctgttggaaaagcagccattctctttgggtgtcctgagggaacggtgcgggcacatggactgagtggaggggaggaggcatgtatcttgaggtccttttgctaggttgctagtcctacctctggccttgatgccaagtttcagactgacatgctggactttgcaaaggcgccctctggagctggttgtggttggttttccgccaggtgcacctcacctaagagggtggccagagacagtgtcttgtcatgacatcagaagccccatgaggaagaggaggagcctgtgctcctgccagaggtggtggctgttaggtaagagacctgtgacctgtttccacatggcccggaggtcaaagttcacatccagtgatcgaaggccagggtcttgagccatcggattgctggggggatcaggtctggaggctgcaaactagaactgcccattgtggtgttgggacccacatgtgcattagggagacaaacatgcccatttaaactaacattctcacacatgcacacacccacacccacccatacacacacactctcatacactcacactcaaactcacactctctctttcacacacacacacacacacacacaggcacagacagccataggctaatagatgcagcgatgtgcacatggtgtggttctggccacatatgcttttaggtgtccacagagtgacgcaggtaaggtatattcatggagctggaggtcagtcatggaggccaaggagaagcaggtgtgtgagttgccctgtgggaaagaatggtgttgaagtgtccagtgaacctgggcctgtttctcaagcatgcatttgatttctttacacttctcagggacagttgccgtgggaggtccgctgcctgctgtcaaggaagatggtcgatgcttctgagaaacaggccctgcgggttcctggatttggtgtggcctggcatccacggtgcaccccgtgctggcgggtggcccaggacggtaagcatttttctgccccgtgtgctgagtgatggtgcctttagaatttctgagacctgtgagcaacagtttcttggcaggccattaatggcatggcgagttccattcccaaagtggatggtctgtgccggttgttcagtggcgcggctctggcttccctagggtgccaaagttctttaacgtcatcggcttgcccactgtctggcctgtgggtgtcaaatgtcccacctcttcaaatgtgcttggatcgatgatgagtcccccataaaaacattccttggaaaagctgaacaaaatgagtgagaactcataccgtcgttctcatcagaactgaggtccagcacgttgcctcccgtggggactgtaggagcgagggacaacttccactggttcccataggttccaccaccgaggacatccacaggccaaagtctcccatgaaatactcgttaggaacattccctctgtgtgaggtacatgggtgggagatttgtgggggcactggctgctctgtgatggcgtggcggccatggaagaggggagaaatgtcgtgggcctaggggagtgtgtggctggtctcagcttggtgagctttcaggaagggaggcctggacctcatgggtggcatctccatgcagaggacaaggtctcacttttgctaccaaggagagcacaaggtccaggcctcaggcagaccttgttcttgatttctggttagctgaggacagggaagtgccaagggtgatgagggagagtgtggagcaatgggtgccacggcagatggccaatggctcttcagccctcctgccaatgttggtcacagtgtccccccagcacggatttctttgcctcccgaaatgtaagatgcctgtggtttggtggtgaaggtgtaggcagggtggtattccagagaaaaggtgctagagggctctcgtggacatgagtgtgcattgggctttaatttggcagtgataggctttccatggatttctctggtggatgacaggtcagccagggtgggtctttgagggcatgtctctgggtgagtgagtgtgaggatggtgtccatggccctgggtcacttctgttgttcccagcagagtagggggctctactgttgtgcacatcttcctggaaatggtctcttggccttcgttgtcgggtggccccacctgctgctgctctcgtgagcaaatactgctctgtatcattcccgctttccatcccaaaagtgtccagagcgaatgtgccctgtccctggcctgggactctcctttgggctccagtcatgcatgaggctacccgtggagatctatgtgcattctgagcagtgtgtttgcaatcccaggggcattgccacagagagtcttgacttggcatgtctccatgtgactgtgtgctggcgatgttccagtgttggactccaaaagtccctaggcgtgataaagcatttcagctcccttagctggtttgaagtcacagagcaggcaggacagccatgccactttcaagggcatacagttggcacagaaaaattggaaaggattggtggtcgtacatcttgcagctcacttagtagctgcatgcatgtagaccgggtggtgttgatgcagtgttgacttgctggcattggggtgggtggtagcatggtcaagctggctgagtgatgggatattgtctcagaggttggtgcagggaaactctgtgggtgtgtctaatgcaaggataatgacaatgtcctgtctgcctggtctttggggggtcaggtggagatgtccttttggaaaggcagccattctctttgagtgtccagagggcatggtgcaggcacatggattgagtggagggaaggaagcgtgtgtcttgaggtcctttggctaggttgggaagactacctgtggccctgatgctgtttcagagtgatgtgctggccattgcaaaggcgccctccagtgctggttgtggttggttttccatcaggtgcacctcacctggtaaaggggccagagacagtgtctggtcatgacatcagatgctctgtgaggaggagcatgtgctcgtgccaggggtgctggctgttaggcaagggaccttggacctctttcctcatggccttgaggtcaaagttcacatcctattgattgaaggctggggtcttgagtctttggtttagtggggttggttccggtctggaggctgcagactatgactgcccgctggggtgttgggaaacacatgtgcattagggggacacacatccacacagagacacactcatgcacacatgtgtgcacagccacagacaaatagatgcagcaatgggtgtgtgcaatcgttaggccacacacacttataggtgtccatggagtgacacaggtaaggtatgaatgggtctttgaaggcatgtttctgggcgagtgagtgtcgggatggtgtccatggccctgggtcacttctggtcctcccagcagagtagtggtatgaatatggagatggaggtcagtcatagggtccaaggagaagcaggggtacgagttgccccgtgggaaagaatgacattgacgtggtgaccagtggacgtgggcctatttctcaagcgtgcatttgatttctttacacttttcaggggcagttgccttgagaggcccaccgcctgctggcatgacagatggtcagttcttccgagcagtggaatctccatggagtcgtggagtcggtgtggcctcgcatccacagtgcaccctgtgctggtggatggctcaggacagtaagcattcctctgccccgcatgatgagtgagggtgtctttagaatttctgagtcccacaaggaagtttttcagctggccattaagggcattgtcgaggcctttaaggtcatcagctcgcacactgcccagcctgcagtgtcaaatgtcctgcctctttgaatgtggttggatcgatgatgagtcctccaaaaaaaacattccttggaaaagctgaacaaaatgagtgaaaactcataccgtcattctcatcggaactgaggtccagcacattgcttcctctggggcctttactagtgagggacaacttccactagtccctataggttctaacacccatggcgttcacaggtgaaggtctcctgtcatattacaaacattccccccactcccctcccaaaaaaaggaacatttcctctgtgtcaggtacacaggtcagagagtcatagggtgactggctgctctgtgatggcatagtggccgtggaagtggatggaaatgtcgcaggcttaggggagtgtggggctggcctcggcttggtgagctcccaggaagggggacctggaaatcgctgcgggcatccttgcatagaggaccaggtacgtgttccagttctgctttcaaggagagcatgaggcccaggcctcagacagtccttggtcttgatctttggttagctgaggacaggggagtgccaagggtgataggggagagcgcacagcaatggatgttgtggcagacagctaaagcctttctgtccctcctttcacggtcagtcccagggggcccccagcacagacttttttcacctctcgagctgtgagattcctgtggtgttgtggccaagcctgggcaggaaggtaccccagagaaaaggttgtagagggctcacgtggacatgcatgccatcagtggtcttgggctgtcatttggtggtgatgggctttccagggatttctctggtggatgacaggttggccattgggggtcttcaagggcaggtcctagggagcatgagggtcgggctgatgcctgtggtcctgggtcactccattcttcctggcagagtagtagaagtgtccatcttcctggaaatggtctcttggcccgccattgccaggcggccccacctgctgcagctcgtgtgagcaaatactgctctggatcccatttcccgctttgaaagcagcttccatcccaaaggcgtccagagggaatgtgccctggccctggccctggcctgggactctccgatggggtccagtcacacttggcgtattcatggaggtccttgtgcattccaggcaacacatgtgcaataccaggggcactgccgtggagagtctcttgatttgggatgcctcctcgcctttgtgtgttggcgatgttccagtattggattctgctacatcctcagggcaatgaagcgtttcagctcacttagccggtttgacatcatagtgcagccaggacagccgtgccacattggcatggcacatagttgacttaggacagtcggaaagggttggtggttctatgtctcgcagctcacttcatagctgtttgcatgtaaacctggtgatggtgttgagatggtgttgacttgctgacgttggggtggttggtagtgcagttaagttggctgcatgatgggatgttgcctcagatgtcggtgcagcgaagccctgtaggtgtgtccaatgcaaggaaaatgaaaggtggtgtgtcctgtccaccttgtctttaggggttcaggcaggaatgtcctgttggaaaactagccattccctttgtgtgtcctgaaggcatggtgcgggcatgtgaactgattggaggaaggaagtgtgtgtcttgaggtcctttggctgggttcagaagactgtctctggccttgatgccgtgtgccgtgtttaagaccaacgtggtggccattgcaaaggtgccttccagtgcaagttttggttggtttggtgtcaggtgtgccttacctgggagagcggcgagagacagtgtctggtcacgacattatatgccccgtaaggaggactgtgtgcttgcaccgccaggggtgctggctgttagtcgagggacatcaggccaatgtctgtctgacccctaggtcaaaattcgcatcctactgattgaaggccttgggtctcgagccttttggttgcaggtgtggggatggtttccaggtctggaggctgccaactatgacaacccgttgtgctgttgggaaacatctgtgtgggggagacacatacacatagacacactcactctgacatacacacctacacatgcacaggcgtgcacagccacaggcagatagatgcagcaatgggtgtgtgctattgttgtggtcacatgtgcttcctaggtgtccacagagtgacatgggtcaggtatattcatgaagatggaggtctgtcatggagcccaaggagaagccggtgtgcaagtttccctgtgggaaagaatgggattgaagtggtgaccagtggacttgggcccgtttctcaagcatgcatttgatttctttacacttctcagcagcagttgtcatgagaggtctgccgcttgctggcaaggaagatggtcaattcttctgaccaacagaggctgccttgagtcctgatttggtgtggcctggcatctatggtgcacccaatgctggtgagtggctcagggtggtaagcattcctctgccctgtgtgcagaggtgtcttttgaattttgagacctgcaaagagctgtttctcagcaggccactaatggcatggcgagttccactcccagagctgattgtctgtgttcattgctcagtggtgtggctctgggttccccccaggatgctgaaggtgtttaaggtcatcagctctcccactgcccagcctgtggtgtcaaatgttctgcctcttcgaacgtgcttggatcgatgatgagtcccccataaaaacattccttggaaaagctgaacaaaatgagtgagaactcataccgtcgttctcatcagaactgaggtccagcacgttgcctcctctggggactgtaggagcgagggacaacttccactggttcccatgggttccaccacccagggcatttacagatgaaaatctcctatcacatgcatgtgaggaacatttcctctgtatgacatagacggatgggacagttgtggagggattggccactctgtgatgttgtggcagccacggaagcaggtggaagtgttttgacctagggttgtgtatggctggtctcggcttggtgagctcccaggaagggagacccgggcctcgcagcaggtgtctttatgtagaggaccaggtcacagttcccctgccaaggagagcatgaggctcaggcctcagatagaccttggtcttcattttccactagctgataatgggagttccaaggtgatggaggagagcacagagcaatgggtgtcaccgcagatggctaaagcctctttggccctccttccagcatcagtcacaggtgccccctggcatggatttctttgcatccctagccatgagatgaccatggtgcagtgaccaaggcttggccaggatggtaccccagagaaaaggtggtgaagggctcatgtggacatgtgtgtcatcagctgcattgggctgtcacttggtggtgatgggcttcccatggatttctctggtggatgacaggtcagccagggcgggtctttgagggcatgtctctgggcaagtgagtgtcgggatggtgtctgtggccctgggtcacttccggtcttctcagcagagtagtgggctccaccgttgtgcacacctttctggaaatggtctcttggcatgcattgttgggtggccttacctgctgcaactcatgtgagcaaataactgctctggatcctctttcccgcttggaaagcaatttccattctgaaggcatccagagggaatgtgccctggccctggcctgggattctccagtgggttccagtcatgcatggggctatccacggaggtctgtgtgcattccaggcaatgcgtatgcagtcccagcggcattgccacagagagtctctcgacttgggatgactctgcgtgttgacagtgttccagtgttggattccgctatgccctaggcgtggtgaagcatttcagctcccttaactggtttgaagtctcagcacggccaggacaggcatgtcacgctgaagggcacacagttggcttaggaaagctgaaaaggttggtagttctacggcttgcagttcacttagcagaaacgtgcttgtggaccccgtggtgttgagacagtgttgacttataggcactgtggtatgtagtagtgaggtcaagttggctgtgtgataggatgttgcctcagaggtcggtgcagggaagccctgtagatgtgtccagtgcaagaatgatgacaggcggtgtgtcctgtcaaccttgtccttagggggtcaagtggagatgtcctcttggaatagcagccattagctaggatgtcctgagggcacggtgtgggcatgtggactgagtggaggggaggaagcccgtgtcttgagattgtttggctaggttgggaagactgcctctggccttgacactgagtttcaaactgaggtgctggactttgcgatggtgccctccagtgctggttgtagttggttttccaccacatgtgcctcacctgagagggcagccagagagagtgtctggtcacaacatcagatgccctgtgaggaggagtgtgtgctcatgccaggcttggtggctgttaggcaagggacctcgggcccatgtccgcatggcctcaaggtcaaagttcacatcctactgattgaaggcctgggtcttgagcttttgggttgtgaggaggttcaggtctagaggctgcagactatgaccaccccttgtggtgttgggaaacatatgtgcatgagggagacacacatacacacacacacagacacactctctctctcacacacacacacacacacacacacaggcgtgcatagccacaggcaaatagattcagcaatgggcacatgctgtcgtttcggtcacacacgcttcctaggtctccacagagtgacacgggtcaggtatattcatggtaatggaagtcaatcatggaggccaaggaaaagtaggtgtgtgagttgccctgtaagcaagaatggcgttgaagaggtgaccagtggaccttggtctgtttcttaagcatgcatgtgatttctttacacttctaaggggcagttgccgtgggaggcctgccgtctgctgaaaggaagatggttgatgcttctgagcaatgaaggccccatggagtcctggattcggtgtggccttgcatccgtggtgcaccccgtgctggtggatggctcaggacggtaagcattcctctgccccgcatgatgactgagggtgtctttaggatttctgagacccacaaggagcagttcttcagcaggccattaagggcatggctgtggtctttaaagtcattggctcacccactgcccagcctgtggtgtcaaatgtcctgcctcttcaaatgtgcttggatcgatgatgagtcctccaaaaaaacattccttggaaaagctgaacaaaatgagtgagaactcataccgtcgttctcatcggaactgaggtccagcacatttgcctctgccggggactgtaggattgagggacaacttccactagttcccataggttccacctcccagggcatccacaggccaaagtctcccatcacacacaggttaggaacatttcctctgtgcgatgtagacgggtaagagagtcatgggcaaattgtctgctttgttatggtgtggcagccatggaagagtacagaaattttgcaggcctcaaggagtgtgtggctggcctcagcttggtgagctcccaggaagggagacccagatctcgcggcagatgtcactgcacacaggactgggtccgatttttttgccaaggagagcatgaggtgtgggcctcaggcagatctttgtcttgatttctggttacctgaggacaagggagtgccaagttgatggggaagagcaatgggtgtcccagcagatatccaaaggctctttggctctccttccagggttggtcacagggcctccctggcagggatttcttggcctcctgagctgtgagctgctcgtagtgcaatggcagaggcctgggcaggaaagtattccagagaaaaggtggtagagggctcacgtggacatgtgtgtcatcagtggtctggggctgtcatttggcagtgatgggcttcacatggatttctctggcagatgacagctcagccagcaggggtcattgagggcaggtcacagtgaacatgagggtcaggctggcacccacagcccttggtcacttctggtcttcacggcagagtagtgggctccactgttgtgcacatcttcctggaaatggtctcttggcccgccgttgccggatggccccacctgctgcagctcgtttgagcaaatagtgctctggatccactttcccacttggaaagcagcttccatcccgaaggcatccagagggaatgtgccttggctctggctctgccctgggcctctcccatgggctctagtcacacttggggctattcatgaaggtctgtgtgtattccagattccaggcaacatatgtgcaatcccaatggcattgccacagagaatcttttgacttgggatgcctccgtgccactgtatgatggcgatattcaagtgctggattctgctccatcctggggtgatgaagcgtttcagttcccttagccagtttgaagtcacagtgcagccaggacagccatgccacattgacgggcttgtggttggcttaggaaagttggaaaggattggtggttctacagctagcagctcacttagtagccacatgtatctacacctggtgctggtgttgaggtggtgttgacttgcaggcattgttgtgggtgggaatgcggtcaagctgactgcacgatgggacattgcctctgaggtcagtgcagggaagccctgtgaggtgaccagtgcaaggacaatgttaggtggtgtgtcttgtccactcggcttttggggcatcaggcgtggacgtcctgttggagaagcagccattctcttcaggcatcctgagggcacgtgtgcgtacgtggactgagtggagtggaggaagctgtttcttgaggtcgtttggctaggttgggaagaccacctctggctttgacgtcatgtatcagtgcaacattctgagcattgggcaggtgccttccagcacaggttttggttggttttccgccagatgtgccttacctgggagtgcagcaagagacagtgtctggtcccgacatcagaggccctgtgaggagtagcctgtattcgcgccaggggtgtggtggctgttacacgagggacatcaggcctatttccacgtggccttgagatcagagtgcacatcctactgattgaaggtcttgaacctttgatttgttggggggatcaggtctggaggctgcagactataaccgcccattgcagtgggaatctcacacacacacacacacacacacacacacacacgtgtgcacagccacaggcaaatactcgcagcaatgggcacatgaggttgttccaggcacacacacttcctatgtgtccacagagtgacagaggtaagatacattcatggagatggagatcaatcatggaggccaaggagaagcaggcatgcaagttgccccacaggtaagaatgggtttgaagtgaccagtggacctgggcccatttctcaagcatgcatttggtttctttacacttctcaggggcagttgccatgggaggcgcaggcctgctggaaggaagatggtcgattctcccaagcaacaaaggccacgtagagtcctggtttcagtgtggcctggtatccacagtgcaccccgtgctggtgggtggctcaggacggtaagcattcctctgcccttcgtgctgagtgagggtgtctttgggattcccaagacccacaatgaacagtttttcagtaggccactaatggcatgctgagttcctctcctagagtggatggtctgtaccttttgctcagtggcacagctctgggttccccagggtgccgaacatgtttaaggtcatcggctcacccactgcccagcctatgatgtcaaacatcctgcgtctttgaatgtgcttggatcgatgatgagtcccccataaaaacattccttggaaaagctgaacaaaatgagtgagaactcataccgtcgttctcatcggaactgaggtccagcacattgcctccactttggcttattgtggttcacgggtaactgtcatattacatggtacttcactacccaggcactggcattcaatttttgtggtcgttttgaccatagtaaaattctttatcataaatgtatttgagaatcatacttgggtagcccatgaatttttttagtgttactcttcttggtgtcaagttggtttcacccttaatgctaggttttggatttttgttgcatgattgatttttagccaggttctggtcaccaatcacagcctttcaccaacattcatggagaaagtttccttgttttttttatatgttgaggaagtacatatttcctgaatgtttttgcttttgttccaatgttgggctgactggcatgtcatctcttatcttatcttgaactgagtagtggtacaagtttttggctttcagcatccagggcaccaagtcttttgtacacaaattgcaagtattgaagccatggtgttgattgggatgctctacgcccatactctttagtggcatgacgccctcccagggtacccggaatccacatgtgcaactctgtatatgtgtttctgtgaacacagatatgtgaagccatagataagcagatttcatatgtaccacaggagtctatatgacatagccttcctgacctatgtacctgtctgtctttctgaagcacactcatttcctctgcaccttcctggtgtcattggcatggaaggaaggcccttgtccaagaaggatggtcttcgtcttgtgtgatctttgagatgccatgaggcccctggatacaaatggtgtgggctcctttggaggcttttggatttctcctgaatgtaagtgatttcttctgaaagcattctgattttcctcacttgcagggacaaagactatgtgtaggttgatgatgacttacatatatacgttttttttttttttttggaaaggtgaacaaaatgagtgaaaactcagtaccatcatcctcatctaactgaggtccagcacgcttctccatcagggcctagatttagggggccaacatctgtttgttatcatggtgtgcaccaaggcttaggatgtagttgtctttcagtgaaactgagtagctgagtattttgtactcccctggctgagagatacgtttgttgaacgacttacctgtgagaaggtggggtagcatcctgccagtgtgcaggagaaggtaaacctgcaggtgccacaggaaggcggtatccagttgcccacctctgcatggctgggtctgtccttgattcatacctcttgggttcgtcaccccccagaagaagacaatttattccacatgaggagacagcacggtgccattcctgagcacttcttcaactgtctttcatctgtggccggggacatgggacttcttatggtgtttgggtagcatcaagggctggccatcttgaagccagtggtgatgctgatttgctctctggaaaggagcctggagaagctctctacagtgaacttgtacatctataagtagaattccaaatttcatggcccaagaagggtagtggctgtgggaaggggagaggtctgtgtgtgcctttacctggcatcattccatgtgggtcgtggagtgatgactgtgaggctctttaagacattgcagggtgcccaaggtccatttcgtgatatcctcaggatggtttgcttgggagagcctgatgtcatttgcctctgaaccgctcagacatcttgatgcagttggggtttataagagtgtgtcattccccacatcgtggtgacttctacttggaaatgtgacctgcgaaggtctccttgcttatatacctcagcgtctcctgatattagggtattttcaaattcctcctaattcttcacagcagtcttctttgtgaaatagtcgttgtgtggtaggacagggctaccatccacaggccaatgatggataggtgttggactctgatgttatgttcacaggcaagtgccttaagatcttgttttcttagctgcagcaccttagaaatcttgtaggattcagaatgcctggtgctcttctgggtccctgatctgtacctgtgtagtgcacatggaggttgatttgtgatgtttctggatgggaagagtgtgaaggacccaaggggtaaaaatgcctcaaggccaaaggaaagttaacctttgcataggaagaggtttcccctccaaactctcctcactgaagtatcaccatagcctttgtcttctctgatggccaggagaagggtttttgagttggaggtgttataagagtggtgttgagagtgttcttcatgcttagtgctctctagttgatggtgccttcaaaattcatgcctgcctcctaccttcatgtttgggcaaacccatgcatgtgtgcagaaagaaggggagcccatgggaggtagatacagattactccacaacaggacaaatgacatgacccttgccacctatgcacctcactgcctttctcaagcacactgttttgcttctgcacttcttaggtggcgttggtatggaaggaaggccagtgaccgcaagggatgactttgatcttgggagatttttggagatggcaaagtgcttctaaacatgtttggcatggtctccttcaggctggtggatacctcaggatggtaagtattggttttccaaaggcacctaatgttccatgtttgcaggtatgaggactgtgcatggatcaatgatgacttccatacgtgggttccttggaaagttgaacaaaatgagtgaaaactttatactgtcatcctcttcaaactgaggtccagcacactgcttcaacaggggctagagatggaggtctacctctcattcattgacgtgggttgcaccaaggggtctgtccaggcttaggatggggttctcttttggcaaggggtagccccaggggagtgggagctcccatgcacaggagattcctggtgtgaaggacatctcttagtgaggccagggtagcacacacaccatcttcaagactaggtgaatgtgcaggtgacacaaaggacttaggctctgtgtcccccagtttgttcttgagtcttagttcttggttctctcatcatcgggaggaaggcaggtccttctcgttgggaagagaggacaagcctacacttttgcctcatttttggctcatttttatccttgtgtatgtacatagatttctggtcacctgcatgcttcacatccaggccagagtgcctctgttgtaccctctgtgttatgaagacatacagttggcctcctgccctaagctggggctgataggcaacgagtctctggcttatctcaaacctggtgtaggtcaaaggcttcctcgttaggggtgcaggtccccgaggcttttatgatcaactttgcaggtgtgcacgggtgtttaaagggatgctcaacatcagttctctctagtgggattatgtactccatgggctcccaggatccagacgtgcatccctgtgtctatgcagttctgcgtccataaacaggtgaagccagagatgggcagattgcagatgtactgcagggggccagatggcatggccctcataacctctgcacatgtctgcctttctcaaacatgcccatgtttcatctgtacctcccaggtggcgttggcatggaaggaaggactgtgtctgtgagggatgatcatcctctcatgtgatccttggagatgccaggaagccccttgacacatgtggcatgggctccttcagaggcttttggatccgtcgtgaatgtaagcaagcccttcccaaagccctgattttcctcatttgcagaaacaaagattgtgcctggatcaatgatgacttccatatatacattccttggaaagctgaataaaatgaatgaaaactctataccatcatcctcattgaactgaggtcccagcatgctgctacattggagggcaaggagagggggccaacatctgtttgttgacatggtctacaccttggcttaggatgtggtcctctttgggcaaatgcaagcgtctgggctttttggacttctgtagctgagagacagcttggttgaaggaatttcctctgagaaggtggggtaagcacactgccagcctgcagaacttgaagctgcagatggcacaggaagcagtagccagtagtctctttgtgcatgactgtgtgtgtccttgattcatagctttttggtttgtcgcctccccgcttgcacaggaataccattgctttcctttggggagagagcatgtcattcctggacacttgttcggcttactttcattctcagtcgaggatgtgggagttcccatggtacttgggtagcatcaggggcaggcagccatgaggtgggtggtgagctgatttgctttctgcagaggagcccagggagggtatccacattgaactcgtatgtccataggaggaaacccaagtcctttggtccctgcagtgtactggtggtgggaaggggagagggctgtgcatgcatgtaccaagcgacattccatgtgggtcgtggagcaatgactatgagcctcttttgggagttgtagggtgcccatgctccatttcatgatgaccttggggtgctgggatgggaatgagattgcaagtccctgtgttcctgccacttcgcagactgacttggtttgagagatctgtgttcaggaacccctgtgggatgcttgtctgtgttaggcatttgagcagatattggcccagggtttctacccttccatggttgtacatactgctggaagggcttgttgctccctctgtattgatgaggggaagttttgcccaggagagcctgatgccatttgcttctgaactgctcaggcacttcaatgcagttgaggttaagagtgtgtcacttcccatgtcgtggtagcatctactcagaaaagtgacccgtcaaggtctctgcacttaaattctccattatcttatgatgttaggttattttcaaattcctcctaattcttcacaacagtcctctttgtgaaacagtcatgaagttgtatgagggctgtcatccacaggccagtgatggagagttttgtactctgtggccatgttcacaggcaagtggcttaagacgtatcgtgttctcagggacagcaccatagaagccctgtaggattcagcatgtctgatgcttttctggttccctgagctgcacctgtgaggaaggccagaggtggaggttgatgtgtgattgaatgtgtttctcaatgcaaagtgtgtggaaggagcttcaaggccgaaggaaagttgttctttgtgctggaacactttttccctgcagctctccccattgaaatatcctcatggctgttgtcttctctgatggccaagagaatggcttttgagtcaggggtggtgaaagtgtggtattgagagaattcttcgcgcttagtgttctctagtttgatggtgcccttgaaatgcatgcctgccttataccttcatgcctgggtatatctgtgcataagtccccaaagagaggtcacccatgggaggtagatatagaatacagcatggcaggaggaatggcatggcccttgcaaactgtgtacctgcctgcctttctcaagcacacctgtttttcctctgcacttcccaggtggcatgggcatgcaaagaaagacagaggctgcaagggataaacttcatcttgggagatccctggagatggcagggaacccatggacacatgtggcatgggctcctttgggtgccggtggatcccttcatacggtatgtgttcatttctcaaaagaccctaatgttcttcctttacaggaatgaatactgtgcatggaccaatgatgacttccatacatgcattccttggaaagctgaacaaaatgagtgggaactctgtactatcatcttagttgaactgaggtccaccgggggctatagagggacaactgtcattttttttgatgcccgttgcatgaagcattcttccaggcttaggaagggattccgtttgggtgaaggagagtcacaggggagttgaggctatgtgcacaggacttctgtctacaaggctggggtagcacacatgcagtccgtgggactaggtgaatgtgcaggttgctcagggagagttaacctgtagcctgcctctgggtggccaagattgtccttgactcctggctctgggttcccacaacccctggaggaagacaagtaattgtgcttgggaagagagaacaaggccatacttttgcctttctttttttcattcttagtttgagaacagtggagttccaatcacctggcatagctttcatgttgtgttccatgcattgtgagtacatgcatatggcaggaacacacaggttcccactgcaagctgagcctgataggcaaggagtctctagcttaaccccagcccagtgtacgtcaatggcttcctcattaaaattgcatggccctgtagcttttgtgagtgacattataggtatcgatgtaagggtgttgagagggatgctcaatgtcagtgctctttagtgtgctgatgcactactacaagggcacctgagcccttgtccatgcatttctgtgtccaaaatcaggtaaagccagagttgggtatcaaccagatacactgcaggggatcagaggacatggcctttgtgtactgcacatctgtcagattttctcaagcacacccgtgtttcctcttcacctcccacgtggaagtgatgaattggccaggaccatgttggtgagggacaatcatcatctcatgttaacctcagagaagccaggaagctcctggacacacatggtgtaggcttccttggaggctgttggatctctcctgaatgtaagcaattccttcccagtgcaccctgattttcctcatttgcagaaacaaagattgtgtgtggatcgatgatgacttccatatatacattccttggaaagctgaacaaaatgagtgaaaactctataccgtcattctcgtcgaactgaggtccagcacattactccaacaggggctagacagagagggccaacattgattcgttgacatgggtggcaccaaggggaccatccaggcttaggatggggtttctttgggtgaatggtagacacaggggagtaggatctcccatgcacaggacataccttgtttgaaggacttctgtgtcctagggctggataactcatgtgctgtctggaggactaggtgaatggcagattgcatgggaagagttaactggtagcctgcctctgatggccaagtttgtccttgagtccaagctctgggtaccgaagtcccccagaggaagacagatccttctggttgcggggagagcaaaaggctacacctttgccattagttggctcattttatccttagctgaggatgttggagttgtgtttacccggcatagcctctgtgcctatgtgcccatgttgtgtactgtgcattgtgaggatgtatatttggcatgaacaggcaggcttcctctccaaactggggctgatagacagcgaggctctgggttatcccaaaccagatacaggtcaatggcttcctctttaggggtgcagggccttgattattttgtgactggcattgcaggtgttgaaacaagggtattgagaaggatgctcaacatcagtgctctttagcgggatgatgcattctgagggctgccatccccaagatgagcatacttgtgtccataaatttctgggttcacgaacaagggaagccagagacaggcatattccagataaaccacagggggaagatagcatggtcctcgtgacctgtgcacccgtctgcctttctgaagcatgcttctttatcctctgcacttcgcaggtagtgttggtgtaaaaggcaaacccgtgtcatgagggatggtcatcatcttgtgtgatccttggagatggcaggaagccctggacatacatggtgtgggggctcctccagaggctgttgggatcctcctggatgtaagtgattccatttcaaagcaccctgagtttcctcatttgcagggatggagattgtgtgtggatcgatgatgacttccatatatacattccttggaaagctgaacaaaatgagtgaaaactctataccgtcatcctcgtcaaactgaggtccagcacactgctccatcaggggctcgagagagaggaacaacatccatttgttgacacagactgcaccaaggcttggggtggggtctttttctggcagaggagagtagctgggaattttggacgtttgtaactaagagacagcttggttgaaggcagccaggtgtgtcgtcaatttgtaccttgggtcccttgtcctccagaggaagactattgcttccacatggggagacagcacaaggtcattcccagacacctctttcactcactttcatccttgtcaagggacgtaggacttcccatggtgtttggatagcatcaggggcaggcaggcagtcttcaggaggatggcgatgctgatttgctttctgcagaggagcccagagagggtatccacactgaacttgtatgtccataggaggaaacccaaaccgcatggtcccagaagggtcctggtggttagaaggggagaaagctgcacatgcatttaccacacagtcttctgtctgggttgtggagagatgactgtgagcctcttttgggtgttatagggtgcatacggtttattttatgatgatcttgggatgctgggatgggaatgtaattgcgaatccatgtgttcccgcaactccacagacttgacttggtttggcaggtttgtgttcaggccctctgtggaatgcttgtcttcattaagaatttgagatggggctgggcacggtggctcacaccttctgggtgcttgagctgcacctgtgagaaagaccccgaggtggaggctgaattgtgattgagcatgtttcttgaatgtgaagtgtgttgatggatgcttgcagtaaaaatgcttcaaggctaaaggaaaattgccctatgcacaggaagagttttttttttcccaaaactctccccattcaaatatctctatggtctctgtcttctctgatggccaagggaagggcttttgagtcggggcaccaaatgagtggtgtccagagttcttcacatttagtgctctgaagcttgctggtgccctcaaaatgtatgtgtgcctcaaaccttcatgcatgggtactcccatgcacacatcctgaaatgggtatcccatgggaagtagcgatagggtatcccacagggggttgaatggcatggcccttgtgacctatgtgtttgcctgcctttctcaagcacacccgtgttgcctctgtacttcctaggtggtgtgggcatggaaggaaggccagtggagacaatggatgatcttgttcttagcagatcactggatgtggcagggagtcctaggacatgtgtggtgtgggcttcttcaggtgctggtaagtatctattccccaaaaccccctaatgttactcctttgtgggcatgaagactgtgcatggatcgatgatgactttcatacatgcattccttggaaagctgaacaaaatgagtgaaaactctataccgtcatcctcgtcgaactgaggtccagcacattgctcttacaggggctggagtgagggccaagtttcatttgttgctgcaggttgcaccaaggggtttgttcagttgtaggaggggctccctttctgcaaggggtagtcacagggttgtgagatctctcataaataggaaattgttttagggacttctctctgcaaggtaacacacacacaccgtctgtaggactatgtgaatgtgaaggtgacatgggaagacttagcctgtagcctgcctctggtggccatatttgtccttgagtcttagctctgggttccatcattcccttgaggaaagacaggtgtttgtgcttgggaagagagcacaaagccccacctttgctgttttttccactcattttcatcattgttcaaggacattgcagttccggttttatccataaccagggaagccagagacaggcagatagcagatatgccatagggggccagatgacacggccctcatgacctgtgaatgtgtctgcttttttgaagcacactcgtatttccgctgcacttcccaggtggtgttggcatgaggaaaggaggtatcttcgagggacaatcttcttcttgtgcgatccttggagatgccatgaggcccctggacacatgtggtgtgggctcctttggaggctgttgtatcccttctgaatgtaagtgtccactttccaaagtcctgattttcctcatttttgggcatgaataatgtgcatggatcgatgatgacttccatatatacattccttggaaagctgaacaaaatgagtgaaaactctataccgtcatcctcgtcgaactgaggtccagcacactgttcatcaggggctagagagagagacaacatccatttgttgacacaggctgcatcaatgcttgggatgggatcgtctttgggtgaagtggagtagctgggcattttggacttctgtggctgagagacagcttggttgaagctcttccctctgtgtggctatgtgtgttatcgattcataccccttggctcctgcactccccagaggaagacagttactgctgcatggggacacagcacaatgttgttcccaggcacttcttcggctcacttttatcctaagtcggggacatgggagttcctgtggtgtatgggtatcatcaagggcaggcagtcgtgaggagggtggcaatactgatttgctttctgcagagaagcccagagagggtatccacgttgaattgtatgtccataggagggggaaacccaagtcccgtggcccctgaagcatcctggcagtggaaggggagagggccgtgcatgcgtgtaccacacagccttctgtctgggtcacagagcgacgactgtgagcctctttcgggcattgtagggtgcccatagtccatttcatgatgacctcagggtgctgggatgggaatgtaattgtaggtccacgtgctcctgcatctctgcagactgacttggtttggaaggtctgtgttgaggaacctctgtgggatacttttccttggtgcatttgaggtgtctgataatgagtgtgtgggtttctgtatcctggtgacttctactcagaaatgtgacccagcaaggtctctgtgcttaaataccttagtggcttgtgatgttaggttattttcaaattcctcctaattgtgtgtgacaattcacacaagtctttgtgaaattgtccttgaattgtatgacagggctagtgtctgtaggccagtgatggataagttttggactccacagccatgttcacagccaagtggcttaagatgtatggtgttcttagtcatagtgccttggaagccctgtaggattcagcatgtcttgtgctcttctgggtccccgagctgtacctttgaggaaaacccagaggtggaggttgatttgtgattgagcatgtttctcagtgggaagagtgtcaaaggagcctggggtgaaagtacttcaggaccaaaggaaaattgcccttcactcaagaagaggctttccttgaacctgtccccactgaaatatcctcatgggcttcatcttctctgatggccaaaagcaggacttttgattcagaggtggcaaatgaatggtgttgagagagtttgttatgcttggtgctctgtagctggaaggagccctcaaaattattgtgtgcatgatagcttcatgcctgcttacacccatgcacatgtcccagtaagaggggctgcctgtgggagatacatacacgatacaccacagtgggatgaattgtatggcccttgcaatgtgtgtacctgcctgctgttgtcaaacacacctgtttttcctctgaactttccaggtggcgtgggcatagaaggaaggccagtggccacgagggacaatcttggtcttgggagatcctggaaatgatagggagtcccttgatatgtgtggcatgggctccttcaggtgctagtggattccttaggatggtaagtgtccatttctcagaagctccagatattcctcctctgcagggacaaagactgtgcctggatcgatgatgacttccttatatacattccttggaaagctgaacaaaatgagtgaaaactctataccgtcatcctcgtcgaactgaggtccagcacattgctcttacaggggctagagagagagggacaaatttcatttgatgatgcccattgcaccaaggggttctgtccaggcttaggatggggtctcgtttgggcaaaggagaatggcaggggagtggaggctatgtacacaggagattccttgtttgaaggactctatttgtgaggccagggtaccacacatgctgtccgcaggagtaggtgaatgtgcagttgcccaggaagagttagcctgtagcctgcctctgcatggcagtttgtccttgggtcctggctctggatttccatgttccttggaggaggataggtgattttgcttgagaagacagcacagtaccatacttttgttgtttttctgctcatttcatcgtccattgaggacaatgaagttgtggtcagcaggcatagctttcaggccagcgtgcccatgttgtgtcccatgcattgtgagcacatgcatgtggcatgaacacataggctgccactccaagctgagtctgataggcaatgagactctggcttatcctgatcccggtgtagatcaaagtcttcccagtaggattgcatggccccgaggctattgtgagctgcattgcaggtgtggaagcaagggtgttgagagggatgctcaacattagtgctctttagcgagatgatgcactataagggcaccctgaacccagacgtgcatccctatgtacgtgcatttctgtgtccataaatagttgaagccagacagccagattccagatgtatcgcagggggctggatgacatggcccttgtcacctgtgtacctgtctgcctttctgaagcacgcttgtgtttcctctacacctcccaggtagcattggcatggaaggcaggcccatgttggtgagggacaattgttatcttgtgtgagccgcagggataccaggaaacccctggacacaaatggcaaaggcttctttggaagttgttggatcccttctgcatgtaagcagttctttcccagagcgctctgattttcctcatttgcagggacaaacactgtgcgtggatcgatgatgacttccatatatacattccttggaaagctgaacaaaatgagtgaaaactctataccgtcatcctcgtcgaactgaggtccagcacattactccatcaggggctagacagagagggccaacattcgtttgttgatatgggttgcatcaaggggtccatccaggcttaggatggggtccctttgggcaattggaagtcacagggaagtgggagctcccatgcacaggaaattccttatttgaaggacttctttctccctgggcgggataactcacctactgtctgaaggactaggtgaatggcaggtggcatggaaagagtttgtgggtagtctgcctctggtggccaagtttgttcttgagtccaagctctggattcccagaggaagacagatcccctggttgcggggagagcacaagcctacactattctcacttgttagcttgttttgtccttggcggaggacgttgtatttccaggcacccagcatagcctctttgccgcatttccatgtcatatcccatatgttatgaggatttgtgtattgcatgatcaggcaggcttctgctccaagctggggctgtcaggcaaggagtctctgggttattccaaacctgatttaggtcagtggcttcctctttcaggattcatggccccaaggcttttgtgagcaccattgcaggtgttgaagcaacgatgttgagagggatgcccaacatcagtgctctttagcaggatggtgcacctcgagggcccctggccctgggacgagcatctgcgtgtccatgcatttctgtgtccatgaacaggcgaggccatagacaggcaaatagcagatgtgtcacaggggactggataacatggccctcgtgacgtgtgcaacctgtctgcctttctgaagcacgcctgtgtttcctctgcacttcacaggtggtgttggcatgaaaggcaggcttgtatcatgaggaatgattgtcatcttgtctgattcttggagatggcaggaagcccctggaaacacatggtgtggactctttcacaggctgttgaaaccctcctgaatgtaagtgatttcattccaaagcaccctgagtttcctcatttgcagggatgaaacctgtgtgtggatcgatgatgacttccatatatacattccttggaaagctgaacaaaatgagtgaaaactctatactgtcatcctcgtcgaactgaggtccagcacattactccaacaggggctagacagagaaggccaacatccgtttgttgacatgggttatatcaaggcgtctgttcaggcttagaatgtggtctcttatgggtgatgggggtcacaggagagtggtggctcccatgtataggaaatttcttgtttgaaggactgtcagtgagggtgggtaacacatgcattgtctgcaggactaggtgaatgtccatgtggcctagcaagagttagctggtagcccgcctctggttgccaatttgttcttgagtccttgttctgggttctcaggtcccacggaggaaaacagatctgtgtggttgagaggtgggtacaaggccgcatctttgtcatttgttggctaactttgtccttggttgaggacattagagttttggtcaccaggcatagcctatgtgcctttgtgcccgtgttgtatcccacgtgttttgaggacatgtattttgcacgtaaaggtgagctcctgctccaagctggttctgataccaaaggagtccctggcttatcctaaactcatggtaggttaaagccttcctccttaggggttcagggccgcaaggcttttgtgagtggcattgcaggcgttgaagcagtgatgttgagagggatggtcaatgtcagtgctctttagcaggatggtgtactgcaggggcccccagccccgagacgagcatccctgcatccatgcatttctgcctccatgaacaggggaggccagagacaggcagatagtagataaattgcaggggactggatgacatggccctcgtgacctgtgcacctgtctgtctttctgaagcacgcctgtgttaactctgcacctcccaggtagcactggcatggagggcaggcacatgttggtgagggacaattgttaccttgtgtgagctgcggagataccaggaagcccctggacacaaatggcaaaggctccttcggaagttgttggatcccttctgaatgtaagcacttctttcccagagcactctgagtttcctcatttgcagggacaaatactgtgcgtggatcgatgatgacttccacatatacattccttggaaagctgaacaaaatgagtgaaaactctataccgtcatcctcgtcgaactgaggtccagcacattactccaacaggggctagacagagagggccaacatctgttttttgacatgggttataccaaggcatccgttcaggcttaggatggggtcttttatgggtgatgggggtcacaggagagtggtggctcccatgtataggaaatttcttgtttgaaggactgtcagtgagggtgggtaacacatgcattgtctgcaggactaggtgaatgtccatgtggcctagcaagagttagctggtagcccgcctctggttgccaatttgttcttgagtccttgttctgagttcctggaaggaaacagatttgtctggttgggaggagaatacaaggccacatctttgtcgtttgttggctaactttgtccttggttgaggacattagagttttggtcaccaggcatagcctatgtgcctgtgtgcccgtgttgtatcccatgtgtttgggggacatgtacattgcatgaactagtgagctcctgctcattgcttctgatacccaaggagtccctggcttatcctaaacccaatataggttaaagcctttctcattaggggcccagggtcccaaggcttttgtgagtatcattgtaggtattgaagcaacgatgttgagaaggatgctgaacatgctctttagtgggatgacgtactctgaaggctcctgacccccagatgagcatccttgtgtccgttaacttctgtgtttatgaacaggtgaggccagagacaggcagacagcagatgtattgcagggagctggatgacatggcccttggaacctgtgcacatgcctgcctttctgatgcacgtccatgttttctctgcacctccccggtggtgttggtataaaaagcaggcttacatcagcaagggatgattgtcgtctcatgcgatcctgggagatggcagaagtcccgggacacatggagtgtgggctctttcggaggctgttggatccctcctgaatgtaagtgattccttcttaaagcatgctgattttcctcatttgcaggggcaaggactggatcgatgatgacttccatatgtacattccttggaaagctgaacaaaatgagtgaaaactctataccgtcatcctcgtcgaactgaggtccagcatactgctcatcaggggctagagagagggacaacatccgtttgttgacaagggctgtgtcaacacttgggatggggtcgtctttgggtgaagtggagtagctgggcattttggacttctgtggctgagagacagcttagttgaagcacttccctctgcgcagctatgtgtgtccttgattcaaactccttggctcctgcactccccagaggaagacagtggcttctgcatggggacaccacacaatgttgttcctgtgcacttctttggttcactttcaccctcatttggggacgtggcagttcccatggtgtttaggtagcattgagggcaggcagtcctcaggaggatgttgatgctgatttgctttctgcagaggagccagagagggtatccatgttgaacttgtatatccataggaggaaaccagtcccatggcccctgaagggtcctggcagtgggaaggggagaggtctgcatgtgcatgtactggacagcatattccatgtgggtcatggagtgatgactgtgggcctctttcgggcattgtagcaggcccccatttcatttcatgatgacctcggggtgctgggacaggaatgtgattgcgggtccacgtgcttctgcaactcctcagactgacttggtttggaaggtctgtgttcaggaccctctgtgagatgcttgtctccattaggcatttgagcttatatcggcccagggtttctacctatcgtaggttgtgcatactttgcctctgaaccactcaggcacctcgatgcagtcaacgtgcccgattataagagtgtgacttcccatatcctggtgatctctactcggaaacatggtccaggaaggtctctgtgcttaaataccttagtagctcgtgatgttaggttattttctaattcctcctaattcttcccaggagtcttctttgtgaaatagtcatcttgttgtaggacagggctggtatccacaggcagtgatgcataggttttgcactgcgcggccatgttcaaaggcaagtgccttaaaatgtatggtgttctcagccacagtgccttagaagccatgtgggattcagtgtgtctggtggtcctctgagctgcacctgtgaggaagacgctgaggtagaggttaagttgttattgaacgtttttctcaatctgaaaagtgttcaagcagcccagggtgaaaagtcttcaagactgaaggaaaattgccttttgtactggaagagtttttccccaaaactctcctcatttaaatagccctgtggcttgtgtcttctctgatgaccaagaggagggcttttgagtcagtgatggcaaatgagtggttttgagagagttcttacacttagggctctgtagcttgatggtgccttcaaaattaacacgtgcctgctatcttcattcctgggtagacccatacacccatcccaaaaggggagtagcctgtgggaagcacatatgggatataccacagtgagtcgagtggaatggcccttttgacatgtgtacctgcctcccgttcttaagcacacccgtttttcctctgcacttcccaggtgttgtggccatggaagtaaggccagtggctacgagggacagtcttcatcttgggagatccctagagagggcagggagccccttgacatgtggaatgtgatctctgttgggtgctggtggatcccacaggttggtaaatgtccattttccaaaagcccctgatgttccttctttgcagggataaagactgtgcatggatcgatgatgacctcaatacatgcattccttggaaagctgaacaaaatgagtgaaaactctataccgtcgtcctcgtcaaactgaggtccagcacgtggctccaactggagctggagagagagagacaacttccattggttgatgtgggttgcactaagccatccatccaggcttaggatggggtccactttggatcaaagggagtcacagggcagtaggtgctcctgtgcagaggagattccttgtgtgaaggacttctctttgtgaggctgggtagcacgcacaatgtctgcaggactgggtgaatgtgcaggtggcacagaagagttagccggtaacccgcctctgtgtggccaggtttgtccttgagtgctggctctgggttcccttgttccccagaggtagatagctccttgtggttgggaagagagcccaaggccacatctttgttgttctttggctcattttttttcatggctgaggactttttagtgcccatggtgttttcgtagcagcagtggaagtcagttgtgaggaggttggtgatgcttattttctttctggagagtaccctgtagatcggctccatttatgatttgtgtgtctccagggagaaactgaaatcccatggctggtgatggatactccaggtgggaatgagaaagcgccatacatgtgttgacttggtaccctaagatggggatggtccgccacatttgcgcgtctgttttgcatggtgtgtactgcacatcacaaatgccatgttggccttagggtgctgggaatggaatatgatctgatgtctacatgggagggcctttcagcagattgcttttgtttcctgacagtctttgctccatccccagtcacacgtgtttttctccagggaacattttattggagtatatcaggtcgatatcagaaaaaaaaatgttgtggttatcccaacattaagtgtggtgatgtaacagcagtgtggatggtagctcaagtgaacagtggcaaaaccaaaatatattggtttacgtaagtgaccctattctctcctatgtttgaagtctggtatgcatctctttctgcaataatctcagtgatctggaaactttcaggaggtcttttttagatattttatgtccttgtggttgtactcatactccctgcagtgctaagtctgagtcattctgctatcctagtgctactggaatttctattgttttgggggcactgtctggtcattgtggatacctctcttggggccctttaataagaagtatgttagaggtcggttttggggcagtgttgacctcctgcctaaggtcaaaggcagttttcttcctaaatcttattgcaggattcactgcctgggggttgtgtgacagggagagcacaaaattagggtatcccatgtggacttgtgtccagtatcaaggcagtgttggataattttctatatccacaaggctcccactggactctttatgtccagcagacattcacaggccaacttttctcttacacagggggcctcattcctgccatgtgtagcttccatggaaccatccttcaggttttaagtgcaaggatttctctcaagagtttaatttgtttctttaagacaccgttttcttttctataaattctgctttctgtggtttgtagcacagatgaaattgccaggtcatattctacatttctgcccaatcttggattagtgagcctttgaaatatgttccttgatcactggcaatggttcttggaataccagaacttagttacaagcattgcagacctacagaggtttgttgttatttttaactgcatgaagcagtgggtttgtttgtatcttgtcactcacggctgtcagcaaaacttaggtgttgctaaaccagaccacacccatgaattatagtgcctctggttccttctgtagtagcctgtgggaagtagatacaggatgcaccacaagggaatgaatggcatggcccttgagacctgtgtacctgcttgcctttctcaagcacacctgttttgcctctaattcctaggtggtctggcatggaagaaggccagaggctgcgatggatcatctttgtcttgggagattcctggagatggtggggagcccctgggcacgtgcagcatatgtggcgtgggcttcttcaggtgctggtggatccctcaggatggtaaatgtccattttccaaaatcttctgatattccatctttgtaggtacaaagactgtgcatggatcgatgatgacttttatacatgcattccttggaaagctgaacaaaatgagtgaaaactctataccgtcatcttcgttgaactgaggtccagcacattgctccaacagtgggtagatagagagggaaaacttccatttgttgacgcaggttccattgaggggtttgtccaggcttaggatggggtcccctttgggcaaagggagtcacaggggagtgcggcctcctgtgcacaggagattccttgtgtgaaggatttacctctgtgagagcagggtagcacacataactatgcaggagcaggtgaatgtgcaggtggcacaggaagagttagatggcagcctgtctctgcacagcgaggtttgacttgtcctagctctgcattccctcatcccttagaggaagttggtttcttcagaagacttaaatttgtggaattcagtagaatattatccacataatgttcccagtgaatgctaggcatatcacccaagatggccaggcctctggccataaaccatagtaaatagtagggtgtgcatatatccattagggagaacctgaaaggtccttttttggccctccaaggtgaatgcctgcaaaagcaagcgaagcacgctatctgcctgcatgagccccatgtacctggcgtggcctgtgctcctcaccgtgtgtcccacttctgctgccccttcgccttgccaggtggagtctgactgattttttgccactgctgccaccacaggccacctggagccccagccagtttgaggaaagtggctctgcttgattttccttttttctttttttttcctctttttttctccatttctgacttcagcaggtgggacttggagcttctgcttctgcagccacagaagactccccagtttggagggctgtggttgtgggctccctaagcatctctctgcagagcctctttgttttccattttacccaccatgtcaataatttaacacagtggcggaggagttcatgtctcttcctatttgtcattactcttctaactttcacagctgtactcggctactggtcagaataagagaaaaagcagtggaaccaggaggatcctacaagaaatattccatttcacttttgtttgtgcatataccttttctgtttaaatgtggacttcgatttgatatgcttccagtgcagacacagatcccatatgtaagagagtatggagttgcatagaaagaagacttgtcattttcctgtactgttggtgttctaatctgtcttcgtggtttttgcctcttctggctttagaagatacaccaacatggttttgcaacatagcctcttcttattttagtaagggaccaaatgtgcatgtcagtaacaggtgttaccttgaattgggatcagtgcttgtgtgactatattcagtgatgtcattttctgtcacactcaagtcacaaaatatttaaccacttatttttttatctctggaggaataatccaaaagattgtactggtaaagccagaacaatttccaattatgctaattatttgtataatacttagttggctttatctgtggtttgttggcttattttcctgtagcttttcaaggtttttctatgagttctgttaaagagtctgaaaatggagcgtagaagacatgcttcgatttccaggatggttgtgttttccagagaggcggaggtaaaccactggcgcagccctgcctcccacagataattccgggtgcagtgtttcatatctagacttggacttctatcctaccatacttctttgtgtgcaggtatttttggggataaaatccttgttttcagctgtatagatgtcttgcacatactcttttgatggtttgatttatccattgtgttcagcacgtttcagtgagcaagatatgggatttaatttccaatataaaatccatgactgctggccgggcgcagtggcttatgcctgtaatcccagcactttgggaggccatggtgggcagatcacgaggtcaggagttcaagatcatcctggccaacatggcaaaaccccatctctactaaaaatacaaaaattacccatgcgtggtgttgtgtgcctatagtcccagttactcaggaggctgaggcaagagaatcccctgatcctgggaggtggaggttgcagtgagctaagatcatgtcactgtattccagcctgggcgatagagactctggctcaaaaaaaaaaaaaaaaagaatgttataattattttcagcctcatgtctccgtgtcacacacaggtccatgaagctgtgttctttttttttttttttttttttttttcagagtattttctttcttgtccagattagctaaattggattgttctatgctaaattcacttaatcactactctattatttttgaattttttagttctgtttttttcacttggttctttttttaaaaaaacttctactacctttctgagacttctacttttttacttttttcaagaagctttataattacttgctaaagcatttttaccatgactgtttttaacttcttcagataaccacaacatttggttaatcttgaggttggcttggttaactgtcttttctcatcctgcttatgattttccttctaattgtgatttttccggttcttgatagatgggtgatgttttagtttatcctgcatttttttttcctttttaagttagaggaatctgaatctattcaaatgttttattttagcaggcatgtgccctgtttaggtttaatttgaatgtcctgtcctacttttgtaggccatgttttcgcaggcagtcttgctatcagagctgaggggatgctgttttgatcacttagtttatctgatgttgctgggcctccaactggtgctgactggtacttcctgagatggcgaaggtttttctgtactctgagatgccgtgtatctctatgtaaggggaggagactctggaccacaggaatgaagagaacatcttaggtcaggcagctcaatcatatgcgataacctgggtcaaccagccagtagcctcatgaagtatgggagggaattctccagtgtcagcattcaaagacatcatgagtttttacttctcattttcttttaagtgaaataatcgcatggaaattaaagaataaatatatgaaatatatgaaacttatatgaaatataagaatgtgagaaggcctacagcgtggggatccccaggctatttgaacaatgaatgtctgtgttacacatctttgctcactttttctctatttttgtagttcattgtggaaccagcacagattttcatacgaaagttatttctttttaacctcaaaaagtgacagaatggagtgtatcatgaaaaagtctgacatcaaaacctcaaaatgtgatattggtaagcattttgtcctgagaataccagcatttcctcttaggggatcatgacactgcagtgaccatgtgaccctggctgtgctagtcagcctgggctgttcattgactgtgatgctggtctccatgtgattgactagtgtgggtcagtgcctccaaaggtgacagctgtgtgctcagtgtctgccacatatctcaggctcaaggtcccttttataaatgtgcctggatcgatgatgactttaaaatggatctcatcggaatctgaacaaaatgagtgaccaaatcacttctgtgccacttctgtgagctgaggtccagcacaggggccatgccagacaaacacatggagggtgttttgtttggtcagcactggtactatgaaacggcctgtggaattagacaactaaccagctcacatacagtacaggaaattactggacagttaacctaccaatatatggttgggggtaagacggagacttttcaaatgcttggctggtagcatctgtacactacagtgaccagacactgggagccagcacaggagttataggatttacaggaaattattgtgtgaacccacaagccattcagacatttgtgtgagcgcccagaatattctggttgatggtttgttgcttgatggcaaagagatgtcagcattcaaagacatcatgagtttttacttctccttttcttttaagtgaaataattgcatggaaattaaagaataaatatcttatatgaaatatatgaaacatatgaaatataagatatttatttatatcatataagatataaatatctcatatgaaatcttgtagtatattttcatttgattgccaacccagtcactaggactgaaacagttgtttattttttgttttcccatcaaccaagcaagctatttaatacatgtttcagtgctggtttcaactacatgttgcagcaaacatttttagaagtgatatttcaaattcttggattttcacatggatttcattgtctactttcatatgtcctccatgtgtgaccactgtattaattaaaagttgtaataaatgattttgaaaggtatgtgctggaggaacttcgggacaaatgttttagaaaacattatttccataaaatttggatcaaagatgtgagcataattgttcttgttatacagatggtccaatgagtgtctaatgtgaattcttataactgtttataacaaagtagtccatgaagcaaattttgtttcacaactttcctaatttcccctgtactctgtagattgggtgagatagaattccatggaatttcattgccaaaccagtgaagtgctaattttgacatttgtaccagctaacgtagctgtgaagaaacacaccaatacacttctaaggtaacattcaatttttagtgaatttatttttgtgagttatttttattcttttaagtaatcaagaatttatgttcacaaggaattggttaatactaacagtttcagacattaatgttctgatgagctgaggcatcaatctccttttgataaaggttttgttcttttctctactttgaataacatatgaaatgtccaacagcagttctaagttagtgtatattccatatatgttaatagtgaaacatcctgtcttatgcaaggctaaaaattgtccgtgtatacttctcagatttgtatacatactctcttcctacaggacagcatagaccaagatctaggtttcatatggatgaatttattcttccctttgaggcaagacaagaaggaaagaaagtattgggaataatgctgccctcccatcctcaagggccagtgggaactctaatattggtaagccttttgtcctgaaaataccagcatttcctcttagggaatcataacactctgctaaccgtgagactctggctatgctagtccgccatgggctggtcattgactgtgatcctggtctccatgattgaatagtgtgggtcagtgtgtcccagagtgacagatgtgctcagtgtctgccacatatctcagactcaaggtcccttttataaatgtgcctggatcgatgatgactataaaaaaaatggatctcatcggaatctgaacaaaatgagtgaccaaatcatttctgtgccacttctgtgagctgaggtccagcactgggaccatgccaggcaaacatgaggagggagtttacagggactagggtattggaaaactaacctacccatatatattagagcaaatgaattgttctcagttctgtaaatatccagctgtggtttgacatagcaactctctttgtatttgcttggcagcatttatagaaacagctggtagaccctggggaaccagggcatagtgagattcatgggacgttatttcacctactcttgagccattcacacatttgagctcgcagaattatctggtcaatgagcagtctcttgagggtaatgagatggtcaacatccaaatccaaagatactaatgagattttacttttttttttgagatggagtctcattctgttgcccaggctggagtgcagtggcataatctcggctcactgcaacctccacctcctgggttcaagagattctcccgccccagcatcctgagtagctgggattacaggcgcccgccaccacccctggctaatttttgtgtttgtagtagagatggagtttcaccatattggccaagctggtctcgaactcccaacctcaggtgatccagccactgcagcctctcaaagtgttgggattacaggcatgagccgccgtgcccggccttactttttattttcaattaagtgaaacaattacatggaaattgaaaaaaaaaaaaggtactctaagtagactactctagtgtattttaattttcttgccaattcagccactaggattgtgtcacttgtttttttgattttagtttttcgtatcaaaaagcaaaccactgtttatatttgagtgctggtttcaactgtatgctgcctcaaataaacttagattatattacaaattcttttttacatagatttcattggctatattcatatatcctcaaaggtttccattgtgtttgaagaggtatcctaattgtaataaatgcttttgattggggatgccagggaagctttgagactaatgtctcagattttttttaaaaaagtttatattctatagtgatcaaagatgtaagaataatttttcttgtcattcattggatagtccagtgagtgtctactgtgaattcttatattcacttgtaactaaacattccatttggcaaatttcgtttcataacttccctaatttcctctacactttgtagattgggtgagatacaattccatggaattttaccactgaaccagtggagggctaattttgtcatttgtaccagttaactaacttgggaggaaacagaacaacacactcctgaggtagtatccaatttttagtaaatttatttttattatttttcaaactgtcagtgatttggtttggtgaacaataggttaatacagacaatgttaggaattattaatctgatgcgctatctgaagcatcagtttcctttatttttaagatttttttcttctctgtagtttggataatatttaaaacatttccaagagttataaattagtatattttctatgctgattaataatgaaaccttttgtcttatacagatttttaaaaaatggacgtgtgcgtgcatgtgtatatatataaatatatatatatataaaatctcttctcacaagatgatgcagactaaaactgcattttacattttatatggctaagtttattgtttccttgtgttgtaatatgatggaaagtaatgggaataattctgcttcctgtccttagggaccagtaggaattttcccatgataagcattttgtccttaaaatactgacatcctgttaagagatcatgacactccaatgaccatgagaccctggctatgctagtcagccagggggctgaccattgacagtgatgctggtctccatgattaaatagtgtgggtcagcatgtcccagggtgacagaaagctgtgtgatcagtgtctgtcacatatctcagactcagggttcctttttaaaatgtgcctggatcgatgatgacttaaagatttatctaatttaaatctgaacaaaatgagtgaccaaaacacttctgtaccacttctgtgagctgaggtccagcacagagaccactccagtcaaacatgtgttgcctggagttgcaactagttggtcagttagaagcaaccacagggactggggtatttgaaaaccacttgagtgcatttattagaggaaacgaattttacatttgtgtataaaaattcaattgtagggtaaaatggaaactctgagagtttggttggcggcatctatataccatagaaacagagcctgggaagcagaacagtgagacccaagagaaatgttcctgcctatacttggtctgttctcacatttgcctgagctactgattgatcttttgagggtgatgagatggtcaaaatccaaggatatgatgagtttttacttctcattttctttttttttttattatactttaagttttggggtacatatgcagaacgtgcaggtttgttacattggtatacacgtgccatggtggtttgctgcacccatcaacccatcatctacattaggtatttctcctaatgctatccctcccctagcccctgaccccccaacaggccctggtgtgtgatgttccctccctgtgtccatgtgttctcattgttcacctcccacttatgagtgagaacatgtggtgtttggttttctgttcttgtgttagtttgctgaaaatgatggtttccagtttcgttcatgtccctgcaaaggacatgaactcatgcttttttatggctgcatagtattccatggtgtacatgtgccacattttctttatccagtctatcattgatggacatttgggttggttccaagtctttgctattgtgaatagtgccgtaataaacatatgtgtgcatgtgtctttatagtagcatgatttataatcctttagatatatacccagtaatgggattgctgaatcaaatggtatttccagttctagatcctagaggaattgccacactgtcttccacaacggttgaactaatttacactcccaccaacagtgtaaaagtgttcctatttctccacatcctctccagcatttgttgtttcctgactttttttaatgatcgccattctaactggcatgagatggtatctcattgtggttttgatacacatttctgtaatgaccagtgatgatgagccttttttcatgtttgttggctgcataaatgtcttcttttgttttacttctcattttcttaaagtgaaacaatttcatgtggtatcttccaagtatattttaatcagttgccaacccagctgctaagattgaactgtttcttttgttcttctcttgtttttttctattaatttagcaaacaattttatatatagtttgctatccttctccatggggcctgcatcttcagattcaactagccatggattgaaaatacttgacaaaaaattgtatggtttcatctgtactgaacatgtacagtctttttctctctttttctctttctttcttttttttttttttgagacagagtttcactctgtcacccaggctggagtgcagtggcacgatctcagctcactacaacctctgtcccccgggttcaagtgattctcctacctcagcctcctgaatagctaggattacaggcgcccaccactgtgccaggctaatttttgtgtttttagtagagatggggtttcaccatgttggccgggctggtctcgaactcctgaccttaagtgatctgcctgcatcagcctcccaaagtgctgggattacaagcatgagccaccatgcccagccaagtacagactttttctttggttattattccctaaaacagtacagtataacaactatttacgcagcatttacattgtattcagcatcatgagtaatctagaaatgatttcctgcatataggaggatgtacataggttctatgccaatagtgcacagtgctcgctgtgtttaaagaaatatcctaggtatagaataaataattttgaagtcagtgtgttgagaaaacactgacatggatagaaaatattctgtctagaatagaaaaaacaatagaatagaaaaagttctatctgtatcagtctgatcaaagatgtgagcataattattcttgtcatacatatagtctaatgaatgtctaaagtgaattcttataactgcttgtaacaaaatatttcatttggcaaatgttatttcacaactttcctaattgcccatgtactttgtagattggttttcacagaattccatggactttaactgctgaaccaatgatgcactgattttgtcacttgtaccagctaacgcatctgggaggcaacaaaacaatactctcctgaggtaacatcgaatttttagtaaattcatttttgtgtgttgtttttattatttttttaagtaattgagaatttcattaggtgtgcaaggagtcacttaatacaaatagtattaggcattcaatactctcatgagatatctgagccttcagtttcttttattttaacattttacatttttctcaactttaacatcagaaacatcctataagtgtaataaaattcttatactttacatatagttacatagtaaatcctcctgtcttatttaagtttgaaaaatgaacatgtatacttctcattcccatgtatataatctcttcccacagaatgaggtggaccaagaaactgggcttcatacggatgaatttatttttttccctgtgtggagacataaaggaaaagtatagtgaataattccgcctcccacccacaagtccccatgggaattctcacatgttaaaaagcattttgtcctgaaaataacaacaatttttcttagggaatcaggacactccaatgacagtgagactctggctatgccaggcagccatgggctggtcattgtgctgctggtctccatgattgaatagtgtgggtcattggtgacagatagctatgtgctcagtgtctgccacatatctcaggttcaaagtcccttttataaatgtgcctggatggatgacgacttaaaaatgaatctcgttggaatctgagcaaaacgagtgagcaaaccacttctgtgcagttctgtgaactgaggtcaagcacagggaccatgccaggcaaacacgtgcagagagttcagtttggtcagcaactggtaccaaaatggcctgtggtattggaaaacaaacccactcacatagcttacagcacatgaattgtacagaggtctgtatgtgtttgtatatatttatatatgtttgtgtacatatatctttggggattatatggcatttctttcagtgtttggctggcagtgtccatactctcatagtaaacagaattacacaagagtagagggaacagtaggaaatggttttgcctaccctagagtcttttatacatgtttttaggtgctataatcttgtgtgtgaggtcagtctctcaggttcattagatggacagtgtaaaaggtattatgaggttttacatattatttatctattaagtaaaagaaatatatggaaattgaagagtagcttttatctattaaagaaaagaatgtatggaaattgaagggtactttctatttgtggaaagtcttaacattttaatttccttattgatcttgtcacagaagttggaatttaagttttgcctgtcactcaaagagaagctttttagacatttgattaagggattctagtagatgctatagtaaacatttctaattgtaaaatgattaaatttgcaattcatagagttttatgtggatttcattgcctgatattcattatttttattagtgggtttcatagatgtttaaagggagatcctagttttattgtgtgatactaagggaggccttttggtcttagaaaactgactttcagtactacccatttccagggagtgagcataatttttattctcataccacatgggcaagtgaatatctatggtttatttcttataactcgtcattagtaattatgaaagtaagaaagttgacaaatgaaactcttttaattatgagggtttcatttgtcgacttcctacttcctcagtgtgctttgtgtattggaggtaatactggaattgcatggaattcctactgctgctccagtaacctgctgattttgtcacgtgtaccagattcgttgtctggcaatgagaacaatacacttcagaggtaatattgcaatttttagtaagtgcatttttcctgggttcgttctattattttattttagcaagtaagattataattggtttttcaagcagtctgttaatccaaatggtgtgaggccctaataatctggttagtcatctgaagtttctgtgttctttgtacagtatttttatacttcctctgttttcaaataacattaggataccctactagcaaaataatttagtatattttatatacttgtgcatagtaagcctgttgtatatgtacactatttgcatggttggcaaattacatttgcactttttatttttctataattttttcctattttcaaaggttaatgtggaccaaaaactagatttcatataaaagagtttattccttctacttgaggtgtgacatgaaggaaagtaatggaaataattctgccctcccattctcaagggccagggggaattcaaatattggtaagcattttgtcttgaaagcaccaacattcttcttagggggtcatgacactccaatgacaatgagaccctggctgtgcttgtcagtcatgagactggtcactggctgtgatgctggtctttgtaattgaatactgtgggttggcaagtccccaggtgacagaaagatcagtgttcagtgtctgccacatatctcaggcttaaggtcccttttataagtgtgcctggatcgatgatgacttaaaaaaatggaaaccttggaaatctgaacaaaatgagtgaccaagacacttctgtgagctgaggtccagcacagggaccataccaggcaaacccgtggagggcgttcagtttggtcaggaactggtaccaaaacgaacccacttgcatatgttagagcagatgaattgtacagaggcctatatatcttcgggaattacatgacaatgatttaagtgcatggctgacagccttcaaacacctagtaatcaggctttggggtaccagcgtcagaggagtgaacactgtagaaatggctgtgccagcactcgagtcattcacactattttcgtagacgccacaacattcttagtgagtatcagcatgtataggtatattatgtagtcaattagaaagaaattatcagtctttgcttgctatttattctttcactaaaagaaatatgtgaaaattgaagagtgggttgtattcatgggattatcttattacatgctggaatttgcttcctaactcagtctcaaggattagaacagcatttgtttttctttttcctgtcactcagggagcaattttctaagcattagatgatagattaaattagatgcttcattaaacattttaatgtgaaataatgaaatttctaattctagggattttagatggatattgttggctaataggaatattccttcattgagtctttgtatattttaagagagattctaattttagtaatactcggggcctttggccttcgagaccaaaatcttggaaacattgattttctgtacttaccctgttccaagcaacaagcagattttttagttatgtggatagtcaagtgactatggctaattaattacaaactgttgtcaggaatcattcagttgggaaggttttgtttcaaaactcctgtaatgtcccctgtgccttgcagaacggaagtgattttggaattgcatggaattctcactgccatcccaaagaaatgctgatcttgtcactcttacctgtttcattccctgggggcagaacaaaaggacgcactccaaaggtaacatccaagtttgaataaatttactttttatggcttattttgtaattttttctgtagtcaagtagataatcagttttgtgaatgatctgttaataacagtatgagacattaattatctggtgaatcatccaaggctttcattatcctttatttccaattttttttgcgttctccttttcagtaatatcaaaaacatcctagtagagttatgttagtatatttgatattaatatacataacaaacgctcccttcttgtgcatgtttgacaaatggacatatatacttaccatcttcccatatttgtactgttttcacagatcggcatgaaccaagaactgggtttcatataaaatattttattctgtcctcttgagatgtgacatgagaaaagtattgagaatacttctatcacctcatcttcaagaatccgtaggaattctcccatggtaagcattttgtcctgaaaatactggcattcctcttaggagatcgtgacactccaatgaccatgagaccctggccatgctagtcagccattggccagtcattgactgtgatgccagtctccataattgaatgaatagtgtgggtcagtgtaccccaagctgatggaaagctgtgtgctcagtgtctgtcacatatcccaggcttaaggtaccttttataaatgtacctggattgacgatgactttaaaaaaaaaaaatctcattgaaatctgaaaaaaatgagtgaccaaaccacttctgtgagctgaggtccagcacacatgataggcaaacgtggagggatgtggatggtcagtgcccacagggactggggtatttgaaagctaatctgcctgcgtatgttagaggaaatgaattggacagtcatctataaatatcgtattttttaataaaatggctattcctttggtgcttggctggtagcatccatccactggtagtaaatagaccctggaaaaccagcacatatgtagtgagaccccatgagacatgattgtgcctacctttgagccatccataagttatctgggacatgacagtcttttgagtgagagcagtttactaaggtcatttagatcatcagttccaaagatggtgtggatcttatcgattatttttttaggcagaggtaatatctggaaaattaagagtgatttctaaccatgagaatattttagtttgtttaaatttgcttgctaacccagtaccaagaattcagaccttttttctgtctgtataaagcaatattctagacatttgagtgattcaagtagatgttgtgagatgattacatttccagtccttggaatgttatgtggattttattggctaatcttcatatttcatcagtggattttcctatgcatgttaagggagatccttgttaattgatgtctaggtggactttacggttaacctgaacaggtcttggaaaaaggactttaaacattctcctgttctgtggaataagtatacttttttctggacatacaccttgtcagtgagtatgtatcataattcctcataacttcttatcaggaaacattcgatgtagaagatttctttctcaacttctctaattgcccctgtggtttgcaggttccatgtgatactagagttgcatagatttttaacctttacgccaatgaagatctgaggcaaacattgccccttttttagaagtttgcatttgtcactgataactgtaataattgatcttgttgaaaagcctgggaaatgaagatctgatatgtcacttttaccggcttcctcaactgaaaaagaatacaatgaaacacgctgaggtaacatctaatttttgatatcttttttcctgggttattactgttttaagtatttaggaatttaatgggtgctatatggagtcagttaattcagatactataagaccttaatctggtgagtcatctgaggcttctgtttgttcttttccagaatttttgtgctttctcagtcttgctgatgatctttctatgggcctgaagcgtggagagtgccagagaggctgatcctcagcagtgtggcagaggaaagttgggtgcgactaaggggtatgcggtgcccacatgccactgggtcctcagcagtaccacctggtgagcgtcactcttgagagctgagagtaggtgggaagcagctcatggtgagagggttcagaggccgcctttccctctctgcgcactgcccagttcttctagtcacatgtcccgggacagtaccatacctgtgtgtgtcctgcctgcattgctgtgaccacttttagtggaatcaggtgcagtgcagctctgcagcttctgcaaattgccacgctcccactctcaagcaggttgagtgctacgagtgatttttagaccatttgtttattcccttatcatggctttttgtgacttcttcctccccagtccgttgggtcacctttaaaggtaaagtaatcctgaggtggttgaatttacggaaatgctatgcattattgtgaatgggatgttcaccgggccaacatcttcttggaactttgagcaaactgatagtctggttgcacatttgatttgtctggcagtaaatgttggacagtatttggactgatggaagctagagacaaacacattgactattgttgaataacactggaaacatcttaggagagcagtacattagctaatttaataggtacataaactgaatcccactgtcttgtgcttgacggaccagcagacacatatgcttgtatcgttctcatgtttctacatgtttaccctattcccacaggtcaacaaagacaaggcacctagccccacatgaaactttattcctttcccttttgagatgtgacatgaaagaaaataacagaaatgatttttccatcccatcctcagggaccagtgggaatgaattttaccatcccaccctcaagggccaggtcaggtcgctaagcattttgtcactaaaatattgcccttttttagggattatgtaatactctataaggcactgtctgtgctgggcagcatggagcctgggtcattgctgtgttgggggcttggtctccatgacttaatagggtgtatcagtgtgtcccagagaagtgtactccagagtgctcattttctttcatgtttctgaagcaaacagtgcccccttttttagaagtttgcatgtgtcactgataactttaataattgatcttgttgaaaaacctgggaaaacagtgagttaaataataacttctctgaacatgaggtccagcccaattacctgccctaagcaaactatatggaaggagagttcagtttgttcagctatgtggtcccagcaaggactgtggtactggaaaactaaccagcttacatgcactagagaagtagaattggacagtgatctgtaggtacccagtttggagatgaaattgcaactctgagttcttgattggcaacataaatacgttgatagtaaacagaccctggggaatcagcacttgagttgtgaaaagcgggaaatagctatgcctacactagagccattcacacttttgctggagctgcaataatcttctaagtcatgcttgctctcgtgagggcaatgagatggtcacaatccaaggagagttggggttttcacttttcatttctctattaagtgaaaaaagtatatgaaaattgaaaaatagatattacttatgtaatcttcacagtataatttgcttgccaagcagtcactgggatttaatcagtttctttgtctttcgtttttctcataagctgagagagtaattttgtgtgcacagaagtactgtcttcagctacatgctgcattaaacattcctagatgtgaaatgattaaatttccaagtttttaaaatgtggatttttctggccacttttatatctcttcaatgggtttctaatggatttaaggagagagcctagtcatgatgaatggtgttgtgttgggtatgctgaggaaactttgagaccaatgtttcagaaaaaattatttctatactgtcatgtttcaagtaccgagtattgttcttgtcatacagatggtccagtgaacatctctggtgaattccttacaaccaacctcttgttactaaatattccattaggaatgttttgtttctcaactccctgatttcccctttatagattggaagtgatattggtggaagacaacattttgccgcttggaattctcacctccacaccaaagaagtactgtttttgtcatttgcaccagcttctttctccaggaaagatcaaaacgatgcactgcaaggttaacatccaatttttaatacatgtaattccctggattatttttgttgtgttattaaataacttagaattttttttacaaagtctgttgaaccaaacactgtaaggcattaataacctggtgagttatttgaggccttttttcctctcctagaatttttgcacaatttatattttgaataatatcagagacatcctagtagagtaatgaattagtacattttatatgcagatacatagtgaagcctcctttcttatgcatatttgacaaatggacatgtatatttctcatcttcccatatttttactccatttccacaggtcatgtagaccaaaatgtgaatgtcatatgaaagagtttaaacattgcccttgaaatatgacagaaagtatcagaaataattataccattccatgctcacaggccagtgggaattctcacagtaagcattttgtccagagaatattcttcttagggaactataacattccaatgataatggtagtcagccatgtggctggatcatcgttcctgtatcctggtctctatgacttagtgtggtgatggtgtcattgtgtccaagtgtgacagaattgttagtgtgtagtgtctgtctcctatctcaggctcacagtcccttttataaacatgcctggattgatgatggcttcagtatcttttggaaatctggactgagcaatagaattgcttctctcaaattgatttcaagtcatataaaaggccatgttacacatatattgttaatctgagggaggctgtgatcatttaagttgtattttataaacactaggaccaccagtaagaaaacaattcaaaaaatattaaaagaacaaccaaagaattaaaatagaataaccgaaaagatctgtttaacacaaaagaaggcagttaaagatgaacagaggaaccaataagacatatagaaaacagataggaaaatgacagacataaacccagccatatgacaattatattaaatttttaagagattaggaaattccgttgttttttaaacatgagcaactatacgctgtctacagaagagacactttagaacaaaagatacaaatagttggaaagtaaaaagatggaaaaagctatatccagcgaatccagaagagagcagaagtggctattctgacatcagaaaaaagagactttaagataaagtattgctagagaggaagaaggatagtatttaatgatagaagggttaatatggaatatgtaacaattacaatcatatcagcactaacaacagtgcccaaaactacatacactgaaatttaacatgattgaggggatcaataggcaattcaacaataaaagcttttgttcataccctcttcttaatcagtgataagtcaattagatagagcatcattgaggttacaacatacttcagcaatgttgtcaaccaatttgacctgagatagatagatagacagttagacagacagacagacagacagagaaaacttcacccaacaacagaaatacaaattattttcaagcatacctggaacattctccaggatagagtatatgttaggctataaaactgtactcaataaatttaagattgaaaccatgtagagtatgttgtgtgaccatagaggaattagaaatcaacacagaaataaatttggaggtcacaagatatttggaaattaacacactttacagagcccattggtcaaaaatatatatattaaactagaaaggccgggggtggttgcttacacctgtaattccagcactttgggaggcgtaggtgggcacatcacttgaggccaggagttcaagaccaacctgggcaacatggcaaaaccccatctctacaaaaaaatacaaaaaatgagttgagcatggtggtgcatgcctgtagtcccagctactcaggaggctgaggtaggggaatcacctgagcccagcaggtagaagctgcattgaaccaagattgcaccactgcataccagcctgggcgacaaagtgagaccctgtctaaaaaataaaaggaatccagaaaacatcttgcatagaatttgatacaactaaagacatgcttagagggatatttatagttttaaataactgtatcagaaaaaaagggaagataaataaatgacataagcttccaccttaagaaacaagaaaaagactaaactagaagatgaaatccaaagcaagcagaaagaagtaaacaatagggattggagcaaaaattgatgacataaaaaaccagacaaaatacagagaaaaatccatgaaaccaaaagttgggtttgtgcagagatttgtgaaatttacaatcctttagctagactgacacagatcattagaattaggaatgatggagacaacatcactactgaccctatagattggatcaggaatgtcgctgtttgctgcattgtgctttcttgaggggagagctatgaaggaaaacaaagttctcattgcacttacaactcaacaacacagcgttgacattttgattctcactggcttcagtgctcatctctgtgaggtttccagaagatcccgtagcaatatcactcattctaaatttatctttgggctactctgggaacgctgtctatgggttagccctgctctgcaaggagcagtaagaaaatatatatatattttttgaggctgagtctcgctctatcgcccagacgggagtgcagtggcacgatgttggctcactgcaacctccacctccagggttcaagcgattctcctgcctcagcctcccaagtagctgggattacaggcacgtgccaccacacaccgctaatttttgtgtttttgtagagacagggtttcaccatgtgggccaggctggtctcaaactcccaacctcaggtgatctgccctccttggcctcccaaagtgcagggattacaggcatgatccactgtgcctggcaagtatgtttgtagccagtggggaattattttaactaggcaataatttgatctattttgggaagcctcttgtaatcaaatcatatatcaacattaatcacatggtgagtcctccatggttttcattcctagagattctaggatgtttgacatttctctgcttagcttatagcagaaaggtattggatatcaagaatgtttgaacagtttctcctttttgggaatgaagatgaaattgggctagaatgagatgtgtgattgagagaatgtccctgaggcctgagcagtgtgtccttttgggtatgggcattggaagcatgtagtgaattcttataattttatgttgcctcggcatccatcttgagtataagtttaactttgttataccagaagcaaggcttactcacttttgcacagtttccagttctacacctccttctcgttcctcagtgtgattggtccagatagctgccttatccaactgcctcctttggaccacttcatcatgggacagcttgatgcaatctacttgacaagaccctggaaccccacacccctcatggaaccagtgtccacctcccagtcacagtgtgaccccagggaactcttgcctgcttgctttaaacccaccacttaaaagtctccacagaaaacctgtttgaatagtacccttgacccaataagggcattggcccctgggtgtctctctctctctctctctctctctctccctctctctccctctctctctctcgctccctgacctctgcgtgtggactccaggcatgccatatacccctcaggacctgtaagtaatactatctttatttttattttatatctctcctaatcattgaaaaggtgctctctatcttgaagatactatattaaataaaatgagaacttgtccctaacacagttagtgataggctgaaacacgctgattgcactctttacccatttagtgatttttctcaagttactctacaccatgtattatcaacataattgatattacagaatagaattataagacacttcttttgccacagaaagttctattggactcagattatctagagctactacatgtatgctattctatgataaaagatgtagatgtgataaaaacatttataaaatatctgtcttagaaaagttagctaaaattattttgggaaaagtatgtttgaaaatagaatcgtaagctaccacattgtgataaatatttctaaatgtgtctattaacttgtcaggagacaacagagtgaattaaaacagtagccttgtatcagtatgtttttattcagaagacaaatgcacgttttaactattatatgttcttggcttaactttttttgtaaagttaagacattacacttttacatgaatctgtaatttcaagatatcttaatggttgacagggacaggacaattgaagaaaacctgtaaatacatttggtaaaatttatgatggattgttttgcagatggcttcagaggttattagcacatctgtttgagatatgcacagttttacatttgtcccttaggtaatcaacagggctgagatcagtaaatcacatgtaagccactgttatgaggctattctgaatagagttacatcattttatcatatctagactttctagttatattggtgctgttgaaaatgattttgtattacatgctttcttccaaatcatagatcaagatattttatttatgtatgtcttttaaatgaagagtggttaggatagtcctgattattgcacataaatattgcctttcactagattattgttttgggccaaattttagactattattttaaaaaagagtaccttagtttaatccaacctttccagatacttagaaattattgaaatgtatattttgtgaagatggtcttatgaaagttgttgagctagaaacatgtccttcaccagtggaattcttagaagctttccttgggcttcactgggtgctaatagaccatgatcgtattgctctgtatataatggtacaaattttgttttataacactcagtcttaatagaatgggaatattttatcttactaacgtagtcattagctggccactctctgtgtccattggaccttatagggtaaagggagggcagtgcgtatttgaagcctgtgcacgtgacacacaaagggcttagcaacctccgtgttttcccagcacaggatacccattcttcctgaatgtttcattgttaaattagattgtgtgtgtgtgtgtgtgtgtgtgtgtgtattttatattaacatacagatgtatgtattttagttgcattttttttcttaaaatgttattttttctctttttcttttatgtcaggtgatgatagagcccctagggaagcaaaactgtccatgcccttgccttaactttcagatacgataaaaacaacatttataaaatacctgtcttagaaatattagctaaaattatgttggggaaagtatgtttgaaaatagaattgtaagctaccacattgtgataaatattactaaatttgtttattgacttgtcaggaagcaaaagaatgaattaaagaaaactccagagaatgagctgacaacctactccctggtcagtggctctccatgcctacctgtggtctcttggacacccttgcaggtatgtgggcagggaactgcatgtttataggaaacaggcctaggatggaaggagttaatagatcttgctcttcttgagtttgatgacatttgtttccagttaaatagcatgaaaacccatctgagagccagctgagggtggatacagttctggggagttaaagacgagtggtcacaacaggtcttcctcggcaatccgagcccaaaactgaatctgcctccataagaccattatgtgtcagctctttatttatatgattgattcatccagtggacttttaatttcttatgtccagatattttttcagttctttttttcgtgatacaagcaccttgtggattgcctgtcatagaacaggttctcaataaacttttattgaaaaaagatgtataagtagattgtcttgagtaattttgtgaataacctgaccaactaagcagtagaagacaaatgattttaaaacagaaagagacataactttcagtgggattcaggtgatctagtcgggtctggaaatgcgcaagagagaaggtccctgatgcagtgtgctgacattgaaatgtgtagttgtggactagatggttatggtttcagaactgtgtaagtaaggggtagattccaaattaaatcaatattaaagagtagcagagaaggaatttccagattccagctgcattgcttgtttcattggaagtggtgtttctcttttttcttttttttctttcttttttttttttttttttaaacctcagaagatgacttcctgggaactcttctgggagtgaatgttatcagcaaattcccaaaacaacaccccttagacaaaaagcctcctcacctatgcattgcctagaccacccactaaaggtaagatgttagttaaaatagtccttgctttctgggagaagccatgtcttagtagaaattgagctgttaattttccgaatattgatgatgtttgattacattctaattgattctaagatttcataatatgttaagagatgcagcttttcttatataccttcgtggcttttctacatctcagtacatttactgttaatatgaaggatttccataacttctctcatctagtaaactgaactccttcatggcttgatccattgtgatgctagaaaattgttgtacacagaagacacagtagcctctccataactgttagactggaagtttgacaaactggtctgaaataactgatcaaatcaatgaatgacctagagctttaagaaaccagatgggaagagacagacatgaaacccaaggttgttgatggctattacttttgagcccagcaaaaggagaaaaagcagcaccaatatctggcatcctggacatgaggaagttttaatgtcattgttttggcctcatcatggacccaggtgctagaaatgagattttctctgtgtactctgggtatatttgttctagcacaagtagggggaagattaaagaggaatttcatacccccatgactccttaggaaatgtgtttctcacctttgccacttttccccactgtgtccttgcaggtgatggccacaaagaggtggatttgttgagttggtgccattccttctactgccagcttcaccaaaacaatgacacagtcttccttccgcatggagactcttctctttcctgtgttgcagtggatgcctcctgcagataagaaatgcttaactgagaaatgctcatgttgggatatcatcgatgagactttaatttgggcatggtgactgtttcccttgctgccacttgactcaatcccaggagcctcagtagaggatataatattacacaagatgctcaaaatggtggaattgctcagtgctcccataaatatacatttataattttcatttgccacatggtaaactgaaaaatacagactatattaaaaagaaactgcatgattttttttcaaaaattcaaagcatatttaaataatatataaattaaatgccctcctctcttccaattctgtccctatagttttcctctattaagtgaactacatgcattcttttagtggatagatgcacacaaacacacaagccattatggggaaggatccacgtgtgtggccatattgtaacacatttttctgcaaatcacctctttcatttaacagcccttattcaatggcctttttctttttcagtagtacatacacatctgtgtcatttgttgaatgacgacatgaatgttttgtagataaaatataattaaatgttttaagcatttctcactcatagatatttatgttagcaccaaatttctgtgcaatgaacctccctatatatcagtaattttgcatttgtctataatatcataataaattacttatcagttgaattactgggattaagtatgtgcacactttatatttatattttgaaaattattgcaagattgccttcaaaaatgtggttaacaactttatcttcaaatggcaatgaatgagattgccagctttcctacagcctcacagacaatggattttataaatatttaacatttttgccaatgtgatcacccaaactattgtcttaaattgtatctcttttgtttttgagtttggtcattttttcatgtttattagccatctgtattttttaatttcttctttatgtccaattttgtgggtgggaggaggatttagtctcttcctgatttcgaagagctcatttactatttcgggaaataagatttggattgtcaaccattatagctattttttacacacttttcaactttgtttttgttataagaatgtgtatgattgttacatgtccaagtataaccatgttcgcttttatggcttctgagtttcatgtcatttttggaaagatatatatattgagtccataaaacccttcacctatgttaaattctaattcttttgtgtttttttaattcaaattcttaaatcatgagaaatttttttgttttgaaatcttaaagttgccaagttacttgccattacttgcgattatttgccaataattgcccatttatctgtaccgccatcttgcgcatatgctgtactctcatctgtgactggctccatttttgttctgtggatttgtgtgtctcttcttctgcctcctgtctcgtgtctgctcgttggaagaaattacagtttagactgcaatttcatcaactttaataaatcaattgaggggagaattggtttttaaaaatattaagtaagtcttcgtatccaaggacaaggtatgtcttttcttattcaataattttaattactgttaatattttcactgtggtgatgggagtttttcttttaatttattttcttgttcattttttgtatctaaagtttttgttttgttttgttttgggggtaagttgtcaccttactgtttcttgttgcttttcagattttttcaaagtatagactaaatccttcacaaatatttaaagtttttattttcccccttcatattgatcctgattttagttatgttgacaaagtccacagactgttactatcagaacacttgaacagttatggaaatattacctacccttgatttaatcagagtttaatggtatgcttctttggtttgactggcacattgtcgctggtcatttcctcccaaagaccaccagaaagagctatgatcaagcaaagctgagtttgttaaacttacctgcagcaagggaaaacaccaccttgatagggtttaataatgtttcaaaatcaagaaatgaggctttggggtctgggcagggaactaattagaaatgggcaaaatttgtcatgcaataccttgtgggaaagtgagatgaggttcttaatgtgagtattgatggtgaaatcattttctaggtgagctgtttgcctatataaagatgttatcaatgacagaagaactatttgcctagataaacaaactgaatttatttattggtttacagttttatcttgctgggcaggactctgctgggggtggtatcaggtcttattcccaataggtaagttatttggatatgggtggtcttaatcatcaatgtgtaaaatgctgattttaagtgcgaaatactttgtctaccatgttaggaaagtctgccaccttttatcttttttaaggaattttaatcaaaaccaggtggtagatataatcaaattgttttgcagaatcaattttcctgttctctttaaagacttttatcactgtgaattaatttactattattgcaacttcctttaattccttgaatgaacagaccctactggttttaaaaatgttttattcttttaatttactacttaattgtgggtattttaatttgatttggaatttttacaagtatacaactaagtgaaattgatctgtgatttttcttttttgtgctatttttgtcatgttttgatatcagatattctggttgtgttaaaataattttgaggattttcttcttatactgtgttctagagtgggtaaaaaagccctagtctcactatcagtgtttaagtgaacacatcagtgacatcatctggactctcctttgtttttgctggtttggagttaggacatctagaagtttttttctttttttcctttttttgtatggttattgcttgttctttgttttgtgtcaaatttaacctgttttctcttagcaaatcacagctcatgcagattttcaaacacattagccttgttatacaaagtgttctttcatcattctattaaatttccattttcattccagttatagttatttctgctgtgcctttgttaatgaataagtttaaacagtggatgtttagcatcactagccttccccttccatctcccttaatcaggaccttggtataatttatcaggtattttttaaggttctaatttacttatatatattgtttctgtattcttttgtttcttttcttaataaattcttaaacctgtgtaacacattcatattcacttgttcttggcaatgaaagatttaccctgctgtgcattttataaaacttgtcattatgaacacattgtaaacatacagtgtatgaagagaagaaaacagtgaactagcacatacaaggaactggaactggttccatcattatcagtattttgccatatttactttgtgtttattttaagtattttcaaataagctagagaaatcttaacgcttcttattctcccataaacatttttacaattttatttttgaatgtgtatgtatacacattcgtatgcttttatattgttctataactttcttttatatcatgtaatatataaatattttaatatttctatctgattattacatatccatagatgtgaagcttccctatttttaataacttatatttttacataagtaaaatttacatagttaaatgcattgatatatagtaattgtataattcaataagtttcttaaaagtaattactatcccattcaggagatagaatatttttattacttgagaacctaccctattgcctctttccaaccaagcaccttctcaaaaaaacaatgttgtgatttttatgatcatagataagttttgcctgtttggaaattaatataaatggaatcacacagtgtgtgtctggcttcttgcactcatcataatcatgttgagatttatctgtgctattccctatatcagcagtttaaaaaagtttctatagttgtaatatttcactaaatggttatattgcagtttatctattctcttgttgacggacacctgagtagtttctagtttttagctgttttgaatgttagcagatctcttatgtaaatacctaaaaattgaattgtttgatcataagacagattttgcttaacttataggaaactgctagagagtcttctaaagagatggacacttttcgcactcccaaccagtgatatgagatttttagttgctgtccatttttgccaacattggaaattgtcagtcttatctattaagtgggtgtgaggtgatattttgttgtgacttcaatttgaaatttgaccacttaagaaggcaaccagtttttcatgaagttatccaattgtaaatcttctttagtaaaatttgtatatttttcccaacttttaaattacaattttgaagtaattttggacttacgggaaatttgcaaaaatagtagagttcctgtgtattctgtacccagctttctggatgttagcattttatataatcattattataacattattacatacaatgataattgaaatcaggaaattaatataatactgtcaaccaatctgcagactatattcaggtttttcaagttatgctactaatgtcctttttatctagtccaggatccaattcaagatctcttattttatctggcatgtttcctttgccctctctcctgactacaaatctgggagagctccctcagtctttctttgtatttcatttaattgacacatttgagaaatactagaccataatttggtacactagtcctcaatttggatttgtccgatatttttattattagattaaggttatgcacttttgacaaaagataacacagtagtaacagtgtgcccttttcagtggatcatctggagtacatgaagttaatgtcttatttctgctgatactaaatatgacgcctttattaaggtagtgtctgccaggtttatccactgcaaagttactgttttcctttctttgtaattaatattttatgagaaaataatttgagactatgcaaatattttatttcatctaatttcagtattaattgaagattcttgcctgcagcaattatgattatggtgtttacctagtaatggtttctatttccatgatactttctctacttactagaatttgactgtaaggaagatctgtccttcttccccatttatttgtactcagttgttattttacatcagtatggatttgtggatatcttattttatggattgttatatattgcaatcattgtttgtgtttgattttcaattttttttctggatttgatcattgggagctccttaaagttggcccctgtgttcttttaatacaacctcataattttttgaccacttcttattttcgggtatcacaagatattctaggtttatcttgtattttccttccccacgcctgtaatcaaccatttcctcaaggggttctagttcttcatattggaaaatagtatttagaaaccaagatcttggtattaagtgtattaattgctaatggggttttattgcttctaggcctagagctgggagctgtgtgtccgtttacacacatacacatacacacacacccctatattgtctctattcatttatctatcttaaatatatatactaatagtatgtagaatactatagatagtatatatctatctttattaaaaatcacaagttcatactgttgtggatcataatccatcatcatatggttcattttattcttccctcttggcttatttgtgatttgcttcttcaacagtgagaaacctacctttcattatctacaatatgttttgttatttcttcagtgcagtatacacttaaataatttcagaattgctaaattatacccctttaaaaatgaaatcactaactacagcacagtatttaaatatagttcttttgtctttatccttaacagcgttcagtcaacatactattatttctaaacgtatttaggttagttatcttttttttcctatcccctgccatatggttacattaatcatataatcaagcaggtttttttattgtttatattccattttgagttccctcaccttttggattattttaactatattttgtatatgtgaaatattactatgtttctaaaaattaggactgtgagaaataccactctcccatcatccctgctacactgattctattcctcccttctttccaccctaatctcacccaacccttagagttaactagtctaatagtttctggtttatttttttctcttgttattcttgttcacaagtgggcagatacatgtatattttatcatatatcacatgtatattttatatccccttccttcttacatgattagtggcatactatagatttttttttgttgcagttttctttttccgcttaatatgtcctggaaatcacttcatgtgtattcaaagagatattcctcattctgtcatgcttagtgcttaactccatggatgcaccacaatttattcaacccctctgctctatgagaattgtttgcaatatgtgtaaagtatcacactacaaatagttttacattggattgtttatttgctcttcgtttggaagtgttctttgtattactgggacatacatttcttgttcaatatatgtgttgcaaaggtttctttcattaagtatcttagcctgcctgccttcctttccatttcctttctttttcttttctttcttctccttttaatgctgttatgctctaaattttaaaatggcccgaatttgccagtggctcatcccttattgctatttattcttcctctccttttctcccccatctcttttcctttaatttacgtgaaattaacataacgtagccatttagtgcattcaaaatgttttgcaactgccatccttaactagttccaaaacattttcagcaccccaaagacaacccatacccattaagcagtcagtcccaactctctttccccatcttttcatttttgttttttggagtttttttgagacaaagtctcactttgcacccaggctggagtgcaatggcacaatcatagctcactgcagcctcaaattcctgggcttatgcaatacttccaccttagcctcccgagcagctaggactacaggcatatgtcaccacaccaggctaatttataaaaaaaattttttagacacagagtcttgcagtgttgcccaggcttcttgtgtctttcgataaacagacattgaaaatttttaagtccagtatatcagtttgagtctcttatttttagtgcttattacttactattaaatctttgcttactccaggtttgcaaataatagttttctaagttttcttctagaagctttgggacataagtataacatctatctcaaatcattttcaaatgtagttgaagttacttgttttcatcaatctccagttgttgcagaaccatttgatcaaaagatttttctttttctactgaattatctaatgccattgttgaaaataagttggccatttacgtatggatcttttttgaactctctgtttttccttctttatgccattctttttcactgaagtttaatagtaaatcttgagattaagtagtgtgagtccaaaattttgttatttcaaggctttatagaggaaggagatggctacactgggtcctttgtatgttcacttaaattttaaaattatcttgtcaatttcctaaaaagcccaaccgagaaattgattttgattacatcaaaactatagataaatttaggggggattgacatcttaacaatgttgagtctgtagttctccatttattaggtcgtctataatttctcatagatgtcttttatggtgtttagtatagaagcataccttgtagttttcaatatagaaacattattaaaatttaacatttaataaactagattaaattgttaaatttatttgttttgttgttttgatgctattgtaaatgaatatgtttaaatttcgttttccagatttgttactattatatgaaaacagtaatattttcacattgcaactgcttttcagttgggttgtcttcttttcagtcttaggagaaaatatgtaatttcttaccattaagaaagatactagctgttatttttttgtagatgcccattaccaaattgagcaagttttattctagtgccagtttgctgttaatttttataataataatgtgataaatttgctgaatgtttttctacatttattaatataatcatgttttcccccttattctcttattatgggagactgcattggtcagcttttgaatgttagcccaacattgcattcttgatgtaatccaattggtcactgttatccttcttgtatatatattactgtattcaatttttctgctagttatttaagagttattcacctatgtccgtgatggccattatcctgtggtttcctttttaaaaattatttttgtcagatgttggcattaggcttcataaaatgtatttagtatagtgctctatttgctagtacacttgacccttgaacaacagacatggagattaggggttcagactcccccatagttgacaatctgtggacaattgtttgctctccagaaacttaactacgaatagcctactgttgactgaaagccttacagataacataactagtcaattaacacatattttatgttatatgtattacatactattttattaacaataaagtgaatgagagataaaatgttattacgagacataaggaagagaaaatatatttactattcgttacgtgaaagtagatgatcataaaggtcttcattctcatttttatgttgaataggctgaggaggaggaagaagaggaggggttgttcttactgtatcggggtggcagaagcagtacacttggtgtaactgtatggaaatatagtttctagcttttttgatttttcatttctctaaaaatgtttctatatggtacagtccttcttccactgtttacttatttgtagtacccacatcatagaaggagccatattgtaaagaagtcaaatgcagacttaaataattagaaaccttctgccagcgtgtttttctggcactccttctgtgtcgtcttccttatcgtctggtactggttcagaagcacttgtctccatcacgtcatcttctgttaattcctctagtgtgttatctattagctcttgaatttctccaaggtgtatatcttgaaagccttcactcaccacccttttttccgtgttcacgatctctttcgtgatttccttggttggctgtattgtaaatcctgtcaagtcatgcacaacatctggacacagtttcctccagcaggggagtgtgttgtgttgggcttgatgctttcacagctttttgtgtaacgatggcatcttcagtgctgtgatccttccagactttcatgatgttctatcagggttctcttgcatagtgttagataatcctttccataaagtactgtgtgtaatgagccttaatggtccttatgactccctgatctagaggatgatttagagatgttatgtctgggggcaaatagaccactttgacaccttcagtattgaactcatggggtcagggacattgtccaatcaaaaaaaaaaactttaaaaggcactcacttactgcaaggtacttcttgacatcagggtcaaaacatcaatgaaaccaatacagaaaaaaagacttcttattgtccaggcctttttgttttacaatcaaaagaccggcagctggtgttttaacttttcccttcgaggctcaggagttagctgctttatagataaggtcagtcctgatcataaacccaattacatttgcacaaaacagtagaattagcccatcccttcctgccttaaatcctggtgctcacttctcttccttactaataaatgtcctttctggcattttttttttttcagagtagggcactttcgtcagtttaaaaacctgttcaggcagatatcctttctcctcaatgattttcttaatggcatctgggaactgcttctcctgcttgactgtttttaagccagacttctttctaaaattatcaaaccatcctttgctggcattaaattctccagatttagaaccttcaccttccttttgcttaggatcatcttgcaccctagaggtatgccttacagcaatcctgtacccgcagaaaagatgcattttcaatagatagatactttgcaaaagtgcaaggttttcacagtgttggtacagctgcaacaatggcttcatgaatttccttttttttttttttttttttaacaattgtcctcacactggatttacttatcttgaaatggcaagtagcccctgctggagacctcaatctgtggtaccttttaagcaattaaacgttttcttgtaatgtcatgactttcctctgcttcttaggagtacttccagtatcaccagtggcacttcatatgggtcccatggtgttaaggtttatggtattacacaagacactatgaaaagtaatatgagaactgtgaaagcttttgttttgctgccacatgcaatttactggagggagaaactgtttcctggcatgatttcgggtcacctggcactttaagcagatgcaattgagctccccactgtagcaaaaggaggtggctacaaaattattacaataatgctgggtgtactacagctaattttatgcagttaggatttaataccacatatttacatttctctcaactgcaaatggcaccatgtaggatctgtgagtatgtgtgagtaggttttgataaattttaactttttataatttgtgtatattttatggtaataaatgataaaaataggctagtatctacatctattttatgcattcatgacatacctttttcttaatttttttggtatttctggactacgcagttgagttttttcaaattgtcacaaatttccaaaaatgtatccaatgtatttattgaaaaaagtctgcatataaatagatcatatgcagttcaaacttgtgctgttcaaaggtcaaatttctttgtggaatgtttgatagaattcattagtgaaatgatctgggcctggagtttccttcgtgatattttaatgaacaatttcagtttatttaataatacaggattgagagtttctgtttcatttaatggcagctttagtactgtttttcaaagagtatagtccattttatcagatttgtcaaattcagtagtataaagttgctcatgatagttccttattacccttatactgtctgtaagatctcacctttccaattctgatataggtaatattattttttctcaggttggtctttttttttttttttttttttaactatcttgtcatttaaaagaatcaatctttgatttgctaattttctctttatctgttttttatattattgatttctttccttcatcttaccttggttttaatatgctcttttttttggtagcttcttaatcttgagactattaagtcttctattatgtaccttacttattttctaatataaccattgaaggctataagcactacattgatagattccacaaactttgatatattgttttaattaccatttaattcaattattttcttcctttgtgttttaatttgatctgttatttttaagtggagtatttaatttccaaatatttggggcttttctgtgtagtttgttacaacttctgttttagttttgttttggttctaaaaagttactctgatatttcagctttccaaatttattgagacttatggtctagcatatgatctgtcttgacaaaagtttcacatgcacaggaatatatatttaaactcaaggtgtgcagattttgttcagatagatagtgtctagattttctagattgtcagtgaatttttacaattgttttataagttacaaagagaatagtgtaaaaaatttctgctgtgattatgattttctttatctttagttctctcagttcttcgtgtatttggaaatatcttattgtttatacttttatgaacatcatgactgtaataaattttatcttttcctaatttggcctgtcttaccttatgtaatatttctggtcttgatgtctgcttcgtctgatatctgaataatattaccagttttcttgggtttgcagtatgtctggtgtatctttttctgttctttaaatctgtcttcatagtgcttccattatagagagcatagagatggatcttttttgtccaatttaaccatcagtgacttttaagtctttggggtcttaagtccctttgcattaaacatactaacgtgactagacttatgcctactatttagctattgtttttccatttgtcccctctagtttgttcctctctgcctgctttgcttcgttcttttgggttaattgaatatttttagtatcctacattaacttctctgtttacatttcggctccacctctgggtattttgtatgggttataaaatgtacccttaatttatgacaatctgcttagagttagtattgtacacttctcatgaagtaaaattttatatatatatatatatatatatatatatatatatatatatatatatatatatatgagggagtctcaatctgtcacccagactggagtgcgggggcatgatctcagctcactgcaacattaggtggaactgtattaactctaaaaggactgtgataatttaaagatgtatattataaccatagaataatcactaaaaagtacagagaaatatagctaaaaaagcaacagcagaattaaaatgtaatagtaaaaatacttgattaaaagaatacaggaaagaatgaagaaaagaacaaagtaaactgtatagaaaacagatggcaaaatggtagacctaaacacagtcatattataaattactttaacggtacacttgtttttcattgctttaattgatcaaatgataggtaaagtattttaaagtctctttgtagttttctttaaatcttaacattttgtgcaatgtttgctttgtgaagattgatgctatgatatttaccaatcatttagaagagatattgctgggtgttttggtaagtttaggttacttacatatcttatatgatgaaatcaacattttttatttgatcaacttaatagaggcatcctgtttgaaagaagaaaataacagatctacaaaattctgattcatgtaataagtaaccattatgataataaatgtttttatttattgagtgcatactgaaaagtggtaggaagattttgtgctgaaatatttgtaaacctagtaattaaaaaatgttttggctgggcttgttggctcacgcctgtaatcccagctctttgggaggccgaggggggtggatcacttgaggtcaggagttcgagttcgagaccagcctggccaatatggtgaaaccctgtctctactaaaaatataaaaattagccaggcatggtggtgcacgcctgtagtcccagctactcgggaggctgagatgggagagtcgcttgaacccaggaagcagaggttgccgtgagtcaagattacaccattgcactccagcctgggtgtcgcagtgagactctgcctcaaaaaaaaaaaaaaaaaaaaagctgctaattaccccatgctaaatgtgttgtaatggtattaatttgatatataacatatatgtaacattttatatatgtgctcatatgatgatactgataatacctccctcaaattgctcttttgagtattaagaaaagtttatatagaaaaaccagtttggaaaggtttggaacataaggctacagtgattagatgttgagaacagcagcaataatagttgtcattataatatctgattaaggcaatatttgcacccaggtataccttgcttcagaactgtgtgattaaccattataccttgaggctattcataccctaccttcactttgttggcataatctgaagttttaaaccataatcacatattgcatttgcacaattaaattttaaaatatatacaaattacagtcaaattattgcattcatttcatgactatattctgtttccatccataagtaccgtatggtcaacaataacatgtcaaagagaattttgttgtcacctcgtttcattgtaccatgttcacactgttctttatctcttttttccattggcagtattgtgttctcaagaagaattattccagaagcacccctgaaataatatatttccttaattttggtattattagcccttctttgcttttctctataaattgtcctgatcagtcacctctctcaattatatacaacacaaagtagcttaaaggagaaaaaaaaggagataaataaccatgttgggtctggcgtcaggcttaatggagtccagtagtccagaatttaaagacacatatgaccgtttgctcccttatctcttagttctccatttcttggtttggcttaaatcttcagtcactttttctttatgtgaatttgcaaagggatcatttgaagccctagatgcaattattacctgccttgcaatcttggtaggatgtgtcctccttccctcctccttgtccatgtaaaagttggtgggtgaagagatggacaaggcttgagtcactaagacattcactgacctgggaataactcaggataggtctggtcatatccccaatggaggcaatgtaccctaatgaaaaggtcagggtcactggtctcattgtccaaggtgttatctgagctcatggtctcacaaccaagaaaattaaggagtatggacacagggtgaggttggttggagcaaaagtttagtaagcgaaagaagaaagctctctgcagcagagaggggagtccaagtggattgccgtttttacagtcattcaaaagcttttttaagaaactcctctcatctctgtagcactttgagtaacttctcttatcagcaaagctgtctgtacaactccccttatcttatgcagctgtgggtatgtctctaggcaagcacaaagcgccgcttatttttgtttgtgtaactgagggtttgttttaggtaagccccctcctttctgtgcaggcttccagggagcccaccatgtacatatctgaaaagggaaggaaactttttgctgggagcttgttaatcatacaaagaataaagggcttccatgccagactttgcctgcctgcttatctatggcttatctgtgcagctatagcctgagtttcccctggctgctctgtttttgcctgtagctgtgattttttcaggcagacagcttctctgaggactagtctcttagctgtttactcaagtaatttttcctgtccttttccctcactatgattaccagctcccctaggacttcatggtctggaatgaaatattccgtgggagtcagggaaagggagtttgttgcaaacatgtccaggccagacactttatataaagtgtcaaagtaaagtacacttacataaagtgtaagtgctgccaccaccactagggtgccaggtactctaacacaagtctttattcccatagatgtgagttaacatttataccaccagctcacactatcaaacaatcccacgtaccccaaataaacactggtgcctggtgggcagcaacaagccctccttcaaggaaggagttcatttgttggtttatccagctgctcccgctttgcttatggaagcgctccgttttctaggggtcttagaagctgtagcagtggtagaaagccccttttttgtggactattatgacttaggcttttatcagagcctcagagaattgctgttgttttgttggttaggctttaggtttccaatctgcatacacaattcctttgaagcaccaggcttccaggcaatttggttgagggaacttattgggatatgaaatattatcaggcaccatttctaatcaatgtacctaagttatgacttcaggtttagagaaaaaaaaaatttttttcccttggcttcaggcttccttctggaggtgataacctcctaaatggactgtctttaagggcctgtggcatgtgccctcctttcaggaaactagtgtatgcctggaggcattggtaatggcttctctcatcttactgtggcttgggaagaatatggctattgcagattttctagtttcattaccacctgaccttcaggctccttacatgttataggcagaaaaggtgcctccacaaagttgtgggctattctctgctttcagaaggacagctggaaatggtacttaattctttgtagcagcaccatcatgaatagctgcccacacccatatacatcattatcttttttggtgaagactctaagacttcaggccatgatatccacaaggctatgttcatgcactacttcggtataatctcaaaataattgccagctccccagtggaacgcctgccttggtccatgtggaatgtgggcatatggtaggatttccttggaggaactagaagaggaacataaagaatgttaggcatataaattattgtttctttttcttcttgtttctttccactgagttatgtgtgagcccccacacccaccctaccttcctgtcctctaccttactgatgctattttcaggctgttgtagaattgggtgtgtaaaattaaattagcctttctcctcttaatatctgtaaaatgaacaaatttgacaaagaaactacctatctgatatataagaaggttattagcctgtaccacaagtgaaaaagtttcatcctgatatatcaaaatagtaccacttgaaggaaaacgttggggccatctgtttctctcattgtagttagagtacagatttttaaaatatgagcctcaggcataaaaatgcagtattagcaactcaacttgaagaagcagttactagtgtcctgggtgggccccagggaaaatagtaccaactgcctgttatatttaactgcaattaaaaatggcagtgctgggtatcttctgtctctgggtcatctcctaaagatcctgcagagggagccatagctagtgtagaggccagccataactagccatggcaaagaccacagggaacgctcttcaacatgctctgcactgatcctctaccctggtgtggagaaatgtcagattcatcactaacaaggttaaaggtgtaaattgagggaaaaaaatgagaaaagttatctttcacataagacttcagaaagaaattgcgtcgtcaggtttggaactggtttgtaatttcatccagttattttcattttaattactgtcactgttttcttcatccttgataaactatgagctctttgagattgtctttttcatatcctgatgtcagagcttcctgtattttctgatcatggtatgtgctaagtaaatgcaatttttagcattttgaatggtttatcaaatgattgaaggagtgggtaataatatagattacatatacagtcagccacatatgtgtatgtatgtgtatttgtgtgtgtgtgtgtatatgtatatactgttgaccctccgtatcaatgggtttcacatttgtggattcatccaatcatggatcaaaaatattctttaaaaatatggttgcatctgtactgaacaggcacaaactttttttcttatcattattccctaaacaatgcagtatgacaactatttatcatagcattgacactgcattagatatgataagtaatctagagattaaagtatataggaggatgcatgtggatcatatgcaaataatacactacatcttatataagggacttgaacatccatggagtttggtatgtggtgggtgatacctcctctttgaggaggtgagtatcagagacgcaggtaaatatgatccagagggcaaagaggcattgccagcctcacactggctgtcaacaccatgctgagttccacgaaagcagcgaggagagggtggtgttcttgtttctggtacaatacctggcatagagaagatgtcacagcaatgttcgtctattgaataagtcaccaaaattgtgaatgactgaataaatgggcaaagggatttgttccctacttgctgtgggaagtttcttgtagttatgacctccatgaaagagagactcgtatctggagaaagttcatagctgaaaccatgagatttaacttttgaagttataatggatctatttttttaacatcataaatgaagattatgcaatactgtatgtgcttcaattgacacaaccccttcccattcagggctgatttatgttctgtactgaatgacaggcacagaagtaaatgtgataatcctgtcccgtcgttaccctttattgtggtcttgctgtgtcccagccacacacttcatactgtatctgtgtcatcattctcatatacatctatataggtacacttccatagacttaggcccatttaatggaggagcaactccaacatttagagatcatgaaaggtacctcatgacatatattgacctagtggcagagctgcttagttctacagcctctgagtggaatcctcacgacagtaaaaacacaagcttggtttctcacacactctacctgctttttctcatcccctttagtctctattccttgctgagatgtgttaggcattaaatggttacagtctacttctgtgtgtagtctccaaacactcagaaacctcaaaatttaaaaaaatacagaacaatatgttattaaataatcagggacaagttaaaatggtaaagagaataggccactttgtgaaatcatatgcagggaagaaaaaaatactggagtgaaaacaatataaaaataatactagatgctgtttcgtagcaccaagtgtgttctagcttctgtggttgttgctttatatcattttatataatctttacacaaaacctacaagcagatattatttcccctatttcaaaaatgagaaaaccaaggcaaatagttggtaagtagtacatatatattatcctaactctgaacttctggattcaaagaccatgttctaggataccattttgtgtaccagcatggaatatgtttttagttcatctatttactctaaaaatgtggagcatgtagtgtgagacagaactgttctaggctgtgaggaagtagctgtgaggatggtagtatgggtccctgtaataatgaaaatggaatatattggtatgtacaagtacatgctcattaaaggaaattgatgttggcatagattgcctgggttcaaattcccatttaccatgttttcctagttgtctctgtggtgagaggaggtggaatgtactagccattaccaaaattaagagagattgttggaaaaagtctcatttagcacaataacacattaaatgtattcaataaatgttacttatgactctttgagaaaacatacgtttaaaaaacatggcttatgttacacatactatatgctggctcccaaaaataaacatatttcccaagaagtgtctgttgataaagccaaatatattcttactacactaaggggaagcccatcttagcagtgtctcagcagcatattaggggcgtgggggacaaaacaggatatctgggatcttgaagtttcattttagatgggtctttcagtgtgggagcttgattaggattgggtgagggtcatgacacagcattttaagattgaacgttaggattttgagatgagggattctacagtgtggaggcataagctgtggtctgatgctttctgttgatgagttgatggtctttgggaagttcccaggatgaacaaaaatatttgcaacttttatcttcctgggcaagagtctcagaacatctacacttatatcaatgaaggtaaaatgataataatgtccccagcgaagacaggaagccatgtgggtagataatgtaagttgtgtcatttcatggttccatggataagcagctgtacttaagctgcttatcctggtggattctggagatccacacttgaaggtatcaacacagaaatatactaagaggattgtggtcagagtttgttgtcagctactgagtgaggagccaggaacatacagcttttaccaagaaaatctataccatccacactgtgatgagcccacaagaccagatatgggactttagccaaattacctaattttattatgtctttgattgctttctggtccttatctgggatatcagagatcccagagagatggcagggatgcaaattaaacattcttcccccaaaaacaacacatttttcccttataaaattactatattctgaaaaatttcatgaacctccaagtcaagatggggcattgtctaacttgcctgctgtttgctatacaatagcatggagtcagctccaggcttcccaaccctttcgaaaagcatgaattgaagaggcttaaggagagaagaaagcaacccagaattccctgtgtggttacagtttgggttcttgcctcaaggcctggtttttctctttttggagtaaagttatctgaagacctctttttctaagagaagaaactaatgggtcaaaatggaccctgggggatgtcagggactacagtgaaggcagacgttagttcacccctgaaataaatttctgtccagtgtgcagacagtagccagcagacctttgtctccatcatccaataccagtcttttcagatctagtcaatgatctatttaaagccaaaatatccttatgagactgtcaaatagtattgtatttttttgtatcactcgtcaagaatagcttagtacccggcaataaattttatagtactgatattaatagatctcaggtgaaagaaaagtcatgtgtcttataagatgggtgaaagccacctccaaatagatactctgttctctagttgtttttcatgttctattcctctgtaagttcagttacaaaagctgacttccacaaaaagttctccagtattgttttggaaccttattttctaatatcttgtcatatacgagttgagtcccaattaatgattcattatgaggaactggaaacgagaaactgagtggctcaccaaggaaaatatgtgcaaacctaacggacaatttggttatatgatttaaccactgcatgcataaattataactaggtattggactcatactgaggagtgattaaaatgtaactatgccttataagcaacataattaaatgtagctttaagccagataggcaagaaaataacaaaaggacgcagattaaaacatgacaatatatggtattgttctatgagtcttgagtggaaactctacatttcatgcagtcatctacttgggctaaaaatcatgtgtagtggccatctccttccaaagaccatcttacttctaatgagttctcattgaggtctcacgttctcagtctgaggtctccaggtctcaagatttctcagcttgaggtctccagtaatgatttaagatggtttatgcctctttgattggaagacatcactctcagtatcaactccctggaattttacttctggatgagtcgttaacagtatccgatagggtcttttccatcagggttcgagggctttctttctcaggtatctctcctggagatacctgagaccaagcctctgaatttagaccatgtgagggtcatttagtagaggaaaagctgcttgtttacctcttaataagactggataaattgcctgagttacctgcaatatttggctgtgatcacttccaataatgtagagtctagaagcagaggagatattcctagactcgtgggttggcctgttgctaactcaaaagggaagatttgatgaaccccagaagttgagctcattgtcattaaagcaaacattaggccatgtgagtttgagagtctttgatagttttgctaatttgagcttaaactttttgtttattctttctatatttcctgaagattagagtaatatggacagcagcgtttctgtgtggactggcagagctgtacaaagctctttatcatctcagtaaaatggagatagtttatacttgtactagagagagagtttgggaacataaaatcatgtcaaattttgctctggcagagctggaaatctccaaacaaggcctcaatctatcctccaaataagcgaacaattaccatacatactcaaaacccattgcagaaggtacttacaaaatctgtaagtgttctaaggggccctgagattcttgttcatgccccatctttgcatttttaccaagattatactggtaacaaataagacaccgcatgcaacctcaataatcttagtgaaatttctccatcaatgttgattgagtgcagtagccaatttttctttgcttaggtagttaattgcatattaaatgtttgaaacatcccgtttaaggtcctctggcgctactaagcatctatcctagagtgtgagagattttcctcttgcaatttacctgcagatttatattagtaacggtttgccaactgtggaaccaattgttgacattctataagaacctgtttgaacccgtcagaaggtttgattatgaggaccaggatcttagtgagggctccatgctggggcctcctggtatccccatcttgtattagtgtttgtttttttaatagccacatctttagcaagctttacaatactcaaaagttcttttatttgctgaccatttttagtagaggctcctgctgagattgagaactctgtttgttcacaaacaagaccaagaactacacacaaagcatacctgccaccagcactctcctatctcactcaaactgaccagatctgtagagcgaaatgagtcctgtcatctggcagattttgcctctggtagtgattataagggtgaagtatgtcacatcatgtgccatctgatattcttttgtcccagtcttaaagtacagcacatcaaagaacaagatgaaacatggatttttaaaaagagattactaatacatctatttagggcatagtttgtaaacaaagacagtacacagcttcttcttaaggtaatggaaaaagtagcaattttgaaagtattgccataagtaataaagatgtgaggtgctgatgtgaagtaatatttcataggaatttaagcctctatgctgaaaagtatgtattttcaattttgtgtattttcagtaaaggttatccagcaagagggactatgaaacttaaaggagaccctaacctaaaccaagccagcagaggcttccagtaatttagctgttgtggctattgccactgggtgaagatacagacttcaatgagctggcccctgaggattctcctgaaatgcatttagaacaccaagagcttatccccagcactcatatacaaactggtagagagttctgtgataattaggtaggcctaaagtgggaggtcattggaaggctaattttaactcacaaaaatctctttgtgattaggttcttagggctcagttttggctactcataaagtgggtaagtcagagagatgggaaattttggaaaattttggaatgttctgcaataagcatccaaggaaacccaggaatcctcttaatgatctcttaactactagcctgaaaagttttggatagcttataatctatcaggcataaaggattcatcttcttgggataaatcacatcataggtaacgaacttaaacaaaattctaacttctctttggaaattgtatgacctttctgagctaaaacaaagtagataggtagaataagtcttagaacttgctttgtctttagaacacagtcactggtcattcatattatctattgataagagtggaatcacagaaatttagggtccttgaaatcgttgtgaaaagtaggaaggtatctaagtaaatccaggggatatagtacaagtatgctgttgattttgcctagggtgtaccaacaagtatagagtattttaatacaaaggcactataacaaaaaagtagaacacaaatctgccactataagatatgcagcctcaaggactcagtggaaataagatggtatttgggtggggtatgataaacagcgattattctatttatggttctgaagtcctgaaaaaatctgctatctctgccactgggtttttgagcatggagtgtaaaagaattataagggctgttacaaagtttttagctattattttagtcctttagtcctttttaatctcttggttttagaagagattgtgcaagttgggtagcagttaaggtggataaatctgagtcttaaccgggtttatccataagaatgtcaagcacttccttgagatcttcaattttggcttgatttagattcaatagtagtcgtgaatcaatgtccagattatctatggtttctttatgagtgagggagtcagagactcaaggtctagaccatccagatagcatttaatttacagttccacccacgtagtaacttcctacctatcatgtgagtgaatatggtattacagagaaagaaagagtgtaatttagttaaagtccaagggtggctgtaatgggctgggatgtgaggaatatttgataattattgcagaaacctaccatgtgagtagtttattttcaatgaagaggttgtgtaatagtgataaggtttaaggttgatgatatttagcacccatatcagttaaaaaaatttgcagagttgtcatttaatatttagagaaagttttctttttgacttgaaagatgaaatgttttgtgcttgatacccaccggaagcaccttgatttgtcacttatttcatgttttgccctttgattctgagctaatgcaaaacaagtgttttccaatttccttactgcttacaggcgtctttatcaagagacttccttattccgggtttaatgtctgggataggaggatgtaattttatctctactttgattttttttaatgaaactctttcaaaatgtttagtgaggtgctagagatctgataatgggaataatattgctcattgtagtttttttttacatattaaatcctgtttttttggcttcagttcctttctgcaaaatggggaaagatgtgtgtgggctcatatctgcttcaaggtctactgagtccttcctaagggtattaaagagcctatcttcaatttctccaatggacacatcctttctttgcttgcaggactggattataaaacaatctattttcacagggaagactttaggggtagtctccaaaagaccttgtccaatatcttcagtttttctaaaattctttgtttcctgtaaaatttgaaactctttggtttcctgtggtcttttatgtcaccactgagactgacccattttgcctttttcatgtacttttttgcatctagggttatcactaaaatatgaactccttggtatagatttgggagccctggattctaacttcctaaagatgttttataatcctcgcaagttttcctctattctgcctgtgctttgaagagcctttgacggggtctctcatctcagagttagatggcttaaaatcaaccacagatgtttccctgttgtgagggtagtttaacatgaagaggtcattgagctttggggttttctggctgtctgaaagagaagaaaaattgttcagagggagagatgggggagagaataataataggataaagtctatttggtttgagttatgatttgttggtatctaaaacagagagagagttttttttttcttttgccctggctaacaaatttcataagaaagcagttttgaaatctgaattgcctttggatgtttctcagattaattaaaaatgtagactactggatgtttgaaattttgatctatttttattttaatgtactcttaaaaaattttgttcatagaaaaacttcccccaaagtggctgctataattgtaactcatctctgttgaaattatgccatttaaataagtatatgaatgtggattatcttataaacatatggaagaagaagtccagagggcgtttggaattagaatgagactggaggcataccctgaaagtgtggtaaaactctgaaaaaaatgttgcttatgaccccttgggtctctcaacctgatttctacattgtctaactgtagacctgaaggaatttgcagtttcttgggggtacataagatgttaataggggatttctcttagaaccagactgatgatcaagacaagattgaggaaaattgtcataggttttgataaggacctagggaaaaatttctccaaaggacagcaggctgagaagaaatcttacaaacttctccatccctggggctgtcttgagggatccacttacctgggtctctctcactctcttccctatgaacattccttatatatacacatgaagtggcaaagacaaaggcgaagagtagcatcactagtaataaggcagtttcaccaaagataaatttttttcaagtctgatcaaagtgttcctgaaaagagttccttacccttaggagacaaaataatctcagtatactgggagttcaatgaaaatatactggggctcagtccaatttgatttacttaatacactgttgcactaagagatagtcctgaccaggaagctaaaaggatatctgaggaggacaatgaattaaggttctgaattaaggttcttgtgcctaggctgcaaagaggtctcaatctttatggatcttggtgagatctccaagattgttcaatactgaattcctagaaatacaacctgaagaatattttgataaggcaaagctgagtttattcttaatgtggtaagagaaagcaatcccctaatagatattaataacattttggacaaggaaggacaaagttagaatatttatgagactttaaaggctcatttaagatgggtctttaaatgccagggcttgattaggatttggcgaggattatgataaaagagtttactgttggtggacacagcaaagtaaagatttggaggtgagggattcaaaaactcttagaatataagctattgtctgatgttttctactgatgagttaataagtttctaaggaagttcttgtaataaataataaacattattcacaacttttatttttctgagcaagaatttactggaatagtaaagtgaaaatagtgccagtgaaaatagtggaaaatttaaattggaggcaattagccatgagagtgtacatgattttgtttctcacagtgtcagttaacatttcccctctgtgcaaatccttcaatagtttacaatttgtttataataaatgtccgtagaatggcccacaaaactggacctggtcaagccactttctgtcacctcttacctcttagctactacttgctgttctggaaccactgggccagcttctgcaccagattctctcttggccccaagcatttttccaccgtctctctctctctgcttactcctctgccatcatcagttgtcaactaggctaacctggtacacttctctaagtatcaatatcactacaatgttgctctttacccctttccactattttcaacactgatcatgtaatataaaatattatttaatattttaaatgattatccatctccttgcactagaatgtaaacatgctgactgtagagatttttgtctttgtcttttactgctccaacaccaattctctgactttgaaggcaataaaaactgactttaaacctgaaaagaaagagctaaattgccttccagttctttgaagtaaaagtttatacttcaaaagaattgctctggaaagggagaaactgcaagagaaatttcaacttcttgcttctcaaagagaaaggcaaaattatataaaattttgaggaagggtggcatttaggttaaatttataataaacagtatagctgggttagatggaagcaaatggagttggtcagatggggttgatttgatcaaagccaagtggaaatgattggaaggattagagagcagaccagtacaagcagtgcttgctgatgtggacatttaagtgaaaactcattttgaccaattttgcagcttcctgagtatggggtgaggatatcctgttctttaggggataataagattttcagcttcttttgtacatgtgatgatgcctttaggcaagggtgatatttttcattctcatgaccaaagcacagaccataagtctgaacacagaacactatacatggtaatctaggtactctatttgcctttgtaggtgattgcaattttttccttatttaaaattttaagaccataaagaatacttgaaaagtaactttttaccaatcatttaaaaaatactgattaaatgataaaatcccttaaaaacacagttaatgcaaaagccacaaaaagaaatataaaatatagctttacatctgttaaagacactgaacacataattaaaatattcccaaacaacaatgctccatgctgaaatgttccactagtaaatttttacaaatatttaagggaaaaatgtataattttcattttctcaggatagctgacttctagtaactaaacatgacaaagaactataaaaattgaatttacagaacatggctactaggaatatagatccaagtagcctgaacacaataatagtaaatcaaattatgtgaatttttttttttttgagatggagtcttgctctcttgcccatgttggagtgcagtggcacgatctctgctcactacaaccttacaacctccacatcccaggttcaagtgatcctcctgcctcagccccactagtagctgggattacaggcacttgccaccatgccagtttaatttttgtatttttagtagagacagggttttgccatgctggccaggctggtcttgaactcccgacctcaggtgatccacctgcctcggcctcccaaagtgctgggattataggcatgagccaccgcacccagccaaaatatttttttaaaaggtcactgcattataatcatttggggtttacttgagaaatgaagattttttttttaaacattcaaaaaatcattcaacacttctggtttcagctctgatatgtgaggaacttgtaagttataattactgtccttataacaagataaagcagaacaaattgaaaaaaaaatcaattatttcctttaacccatcagagaactgaggcttcagggaaagttgccaccccaaagtctggggacaccgattgatacacagctgaaatttgcttagctggaacagaagccactggagccacaaattgataggaacatttaaatagcaatttagatgaatagctgggctgaatgtgggctagagtgaaaggaagaaactcctgggaacccccacatttttgtgggttctacctccagaacctcaacaatttctcatggtaaagatttaagaaagatcccctcctcctttggaaagggagagaagagtaatcattgtgaaatacacccagagcattcttcataacaaagacctaacctccaggggaaaaattttatctgagccatatctcagtaagggataaggggaagggcattcctttcatttcagccttctctagctttcctgttttaccaatcaggaaataaaaaacccacaattgtcaatagagatcagcacttcaaggaaatagattggaagcaaaagaaggagggaaaagagtagagaggtcaggtggagttgagggagaggttctgccactgaaggaatgtttgtgatggttgtaacaccaagacacaggcacacagagacttattcaaaagatcatagaacactctcccctatgtcttacgaccccaccagcagtgttctgtgtaatagtagattacagttgaaatagctgtaagacaccaattctctcagaggagtacttagggaagtccaaagtcaagagcagaaacaaaagacactagaggaatttggcatttctggtgcctctagtaacagcaaacattaaacaaagcccaattcctcatcagatttctgtaaatagcattctaaagctccatttacctcagtacttactaccagatacagttcaacaaaaaattacaatgcacatcctatgacaagaaaaaacagtctgaagagagaaagcaattagcagaaccagactcagaacaaagatgttggaattaataatagagatttaaaataactatgattaatatgttaaggactcttagacatgcaaaaatagattatataagcagagagatggaaactcaaaagaagcaagaggaaatgctagaaataaaaaacactataacataaatgaagaatgccttcaacaggctcgtaagtagattcagcacagccgaggaaagattcagtgatcttgaagttaggtcaatagaaattttgcaaactaaaatgcaaatacagaaaaagaaaagaatgaagaaaatgggacagaacatccaagaactgtggaacaatttttaaaggtgcaacatagatgtaatggggatactaaaagaatggagtatagagcataatatatgtttgaagtaaaaatggccaagaatttttcaaaattaataacagacaccaaaccacaggcccagaaatctcagagaacacaaaacagtaaaaatgcaaaaaaagcaaaaacaaaaacaataaaacctacaaatatcatattcaacctgcggaaagacaaacacagaaaaagaaatctttaaagaaggtagataaaacatcctcgtcttctcatcaggaaaaaaaatccgaaagtagtaatgtggtagtcaattatggcatatggatgtgtgaaaacaatggcagcaatgccaccagagataggaaaaaaaatggaaatcctctgttataaggcacctgcactaagcgtgaagtggtatggtgtaatttgaagatgggtttagattagttaaaaatgtatattgtagccagggtgacatagcaaaacccagtcttaactaacaatacaaaaattagccaggtgtggtggcacacatctgtagttccagctacttgggaggctgaggtgggaaagttgcttgagcccgggaggcagaggttgcagtgagccgagattgcacccctgtactccagcctgggtgatacagcaagaccctgtctcaaaacaaacaaacaaacagaaatgtatattgtaagttctagctcaaccagttaaacaaataagaaaagataattgatatgctaagaaaggagataaaatggaatcatgtaacatgatcaagtaaaagtagagaacacagtaaaatagaggtcttaaagaaatagtaatgcaatgactagaaagcagttgcaaacatggaatatattgatccaactgtataaataatcacttcagatgtgaattatctacattgaaaaacagaaactctcagaatggactaagacaagaccaaactaaatggctacaagaagcctactttaaaattaaagatttggatactctgaaagtaaagggatggagaaagatataacatgcttacagtaatcaaaagacagctggagtagctatattgattttcagacacagcagaattcagaacaaggaaggttaccaggcatgaaaagtggcaatacatagtgagaaagggccaattctacaagaatatctaaacgtgtatgcacctattaacagtgtcaagatatacatgaggtaaaagttgataaaactgaaaaaagaaatagataaaccctatttatagtcagaggttccaacatccctctggcatagacataaataagaatattgataacctgaacagcattatcagttaagttgtttgatgtttatagagtactccaacaacagaagaatttacatgaatatacattattccaaagtttacatgaaatattcatgaaaacatcatattatgtgccataaaacaaatttaaaagattataaatcatactaagtactcaggtcacaatgtaataaaactagaaaccaataaagaaagacatagctgggaaatctccaaatatttggaaactaaacaacaaacttgtatataatagacacatcaaagaacaagtcattagagaaattaaaaattattttgaactaattccagctggacaatactggttacaatttgtgggatgcagctaaagtagtgcttgcaaggaaatttttagcattaaatacattaaaaagaaaaagaccaataatcaatctgaccttccaccttagaaaaatacagaacagtttaagcaaacagaagaaccttaagcaaacagaagacaagaaataataaaagaataaaaatcaatgaaatttaaaacagaaaaacagtatggaaaaccaagaaaaccaaaagttgatttgtttaaaagattggtaacattgctaaacttctagtcaggctaagcaaagaaaagaaaaaagacaaatgaccaatatcaggagtaaaggaggggacatcagtattgatcccatggacgtgaaaaggataacagaatactaagaacaactctatgcctccagatttgataaatgaaatggaccaataccttgaagtaaactaccacaacctccaaaaggaaaaataggtaacctgaatagcaatatatctattaatgaaattgaaataataattaaccttcccccaaaatagcaccatgcccagagagttttactagtgatttttactaaacatttaaggaagatgcaataccagttctccaccattacttccagaaaatagaaacagagggaagacttcccaactcattacatcacaccatcattaccctaacataataaccagataaaaacattaaaagaaagaaaaactacagaccaatatctctcatgaagattgacgtaaaactccttgacaaaatattatcaaatcgaattcaacaatgtatagaaaaaattagtaccattatgtacattatgggatttattccaggtatgcaaggctctttgaacattcaaaattcagccaatgtagtagaccgtatcaatagcctacagaagaaaaattatattattatatcaatagatgcagtaaaagcatttcacaaaattgaatattcatgatttttaaaatctcagcaatctaggaatacaaggaaatttcctcaacttgatgaaaaaattctacaaaaaaccccatagctaatatcatactgaaatgtaagagactgtatgttaatttcaggagcaaggcgaggatgtcctccaattctatgcaacatcatactggaagtcttagctagtgcaacaagacaagaaaagggaatgaggcatacagattgtgatggaagaaataaaacagtctttactcaaggatgacatggagaaaatcccaaagaatccacaaaagaaaaacttggagctaataagtgagtataacaaagttaaaggatataaggttgatatacaaaaaccaattgcttacctataaaccagtaatagtctattgaaattagaaaaaaactataatagcaccataacaaaagcaaataaaacccttacttataaacctaaagaaaaacaggttcaggatctatatgtctatatgtagaagactataaaactttgataagagaaatcaaagaagatcaaaataaatgaacagatatatcctgtatccatagatagaagactcaatattataaaaatgtcagttcttcctaactttatagactcaattcaattctattcaaaatcccagcaggctattttgtagatgttgacaaagaataaccaacataacactgaagaagcacaaagacagaggagaaatactacctgattttaagacttttactagaagctgcagtaatcaagactttgtggtactggcaaaagaacagatacataagttaatagtacagaatagagagcccagaaatagacaccacacaaatataattaactgacctgtgtcagggaacaaagacaatccaatgcataaaagaatagtcttttcagttaatggtgctgcaacaaggagatgtctgtatgtgaaaaagtgaacctagacataggttttagatatttcacaaaaattaactcaaaatagaccatagaactaaatatgaaatgcaaagtgttaataattctaaaagaatacaagagaaaatgtatttgatcttgggttttgtgatggggaacaccaaagacacagaccatgaagggaaaaaaatggtaagcttttaaaatataagttctgtttggaaaaaggcacttaattaaaagataagccacagattgggggaaaatattttcaaagtacatatctaataaaggtattctagtcaactgtatagagaactcttaaaactcagcaataagaaaacaaatgaccaattaaaaaataggcaaaagatctgaacagacaccataccaaaaaacaaaaacaaatacaaatgataaatacacttatgtaaagatgcttaacattttctgtcactggagataaaaaataataaaataccactacacatgtactcatatacatgtacacagtacacatatacactacacacagtacacatgtattcccatgtaatagaatggctaaaatccatccaaagcctgatcatgccaacttctgttgaaaaggcaagcaacattaattggtgatggaaatgcaaaatagcacagccacttttgaagacagtttggcagtttcttagaaagctaaatgttgtcctgccatatatctagccactacgctccttggtatttacccaactaatctgaaaacttacgtccacataaatgccagcacatgaatattacagctttattcataatgaccaaaacctgaaattaactaaaatatcattcaataggtggatggataaactgtgatacatttatacaatagaatactatcaagcaataaaaaggattaacccatcaagccacacaaaaacatggataaatcatagatgcatattgctgagtaaaagaagccaatctgaaaagaatacatacaatattcttcatttttgtaacattctgggcaaggcaaaactatagatatcaatggttggcagggttcaggcgaaggggcagggatttaatagataaatcacagcaaatctattctgtatggtactgtaatagtgtatacattatactgtgcgtttgtcaaaacacagtgaactttaaagcacaaatgaaccttaatgtacacaaattttaaaaaatcatttaggagtttgggggatccaagatggaacacagtgtctgacaaaagaatccaggtgttttacaaatgtattagacaagcttacgaataatgttggggagaaaagataatgacttaagtaactttgaaaatgagtggaatctgttaagactagaggcaaagtgactgtacaggagcactgcacactatttgataaagttgttttctgtaggtgtatgagttagcaattctaaatcatgatacatatgtatattggaattgaacaattaagtaaatggttggcagatggtgtacattttcttattgttggaatgaaaagttacagacaagaagaaaagaatgatttgtgttgtaatggattagagttggaaacgtcagtgtaaacttatgtttagtttaatatgcagacagatggttacacatagaaatatagatgcatgtatttacatagttattgtacacaccctgtgtcaactgagaatgcttagaagcaatgacactctagtaacaatgggcacacctagaacccagcccttagtttctaataccattctccaatagaacaaatcagggatccttgtagaaatggctgattctaagactggttaggaaatgtacaagatgagcctggagcatcatatagtgccagagagtaaggaagtactaaaacaagaaccccacattgatgaaagtatatcaaagggactcaggaaccaaccaaaagagcttccagtggtcaaatctggaacaaatttttaaaaataaatagcataatattagattacaacccaaagtataaaatatccatgaatccatattgatgtaaataatcaaatgaataaataaactggggagaacatagattttttgtgcagaataatttcatatagtttttatagatacttttgcccttaaggaggttgaactccttactcgtcaagtgtgggaagaaagtcattaggcacattggtgactttctttcaaagagtacagggtggaaatgggggatggaagggaagagtaactgtgcaggggagaaacctgacaagcactatctctacatggtaatcaaggttaacatcagtagtgataaatcatgctgatagtatatacctttgatatgacgtgataaaaattgcactttacctctacagtcttcctcccaaaaacccataagatcagtatcattatgagaaaaatcatcaaacaaatcccacatgagatatactctacaaaatacttgactagttttgctcaaaactgtgaaggtcctcaaaaaggaaagcttgagaaagtgtgacagtcaagaagagcctaaatagacaagacaactaaatggaatatggcatcctatatgggatcctagaagagtaatagtacattatgtaaaactatggaaatctgaataaagtgggctttagttaataataatctatcaatattggttcgttgagtgtgacaaatgtgccatattaatacaagatgttaacaggaggggaaactgggtatagggtatttgggaactctgtttcagcttcactttttaaaaaatcttcaaatgtttacttcaaaaatgaattcaaaatcactcaatgtaaatcactatggtaacataagagagaagaaaagttatatgatcatctcaaaagagaaaaagcatttgataaaatataaaaactattctttataaatctctttattggaactacgaatttatgggaactaaaaattgaaaaaaatttaatgagataaagggtatttacaaaataaattaattgtaaaattattgacagtggagatagagaaagcttttttatgagattgggaataaaagaggattttttttcatcatttctattcattactatactggatgtcctaactaggggagtagagtcatagaataaggattggaaatggaaaggtataagtttcattatttactgacaagaaacaagtctgaacatgatcaattaaaattaggaagttaattgagcaagattgctgggttaaaaagcagataactaaaatgtatttctatgtaaaatgacaaatgaaaaatgaagtttttaaaagataacatttttgggaacatcagaaacatcaattccataggaaaaaattcacacaaaatattatgaaacattatggaaaggaagcaagtaataccttacaaatggagggatataatatattcacagtggcaaattcaattacatatactatacatgttaattctcccccaaattcacttaaagatcccaacgtaagagcattctaaatctgaatgccatttattaaatgttcaatctaatttcaagaattatatatgacacaaaaagtcaagaagagccaagatagtcttgatgaagatgacaattttgcatgagttacatggccaaaatttaaggcctactattgcaaggttacagttactgacaaaagacagaaaactagcctaatggagcaaaatagagactccactccacaagcagatcaatagatatatgattacttgctttatgataaaagtgccactcctgcatgatgaggaaagaatggtttgttcaatagttagtgctggatatcaatacataaaaaagtgaattccttttcaaaccatacagatccatcatttctaggtgtaatgttggtctattcatgaaaggcaaaacagtaaagcttcttgagcatagcataacataggagggtgtcatcataatttggcagaaagtgaaaaataccaataacactaagcataaaggaaaatattgatgaattagtctgcatccaaattaaaatttttatttctcaaagtatataatcagtgaagaagcatcgtataaaagatacaacttgtacatgtcaaaaagttagaaaacacttaaatgggtacttcacaaaagaggatatctgaatggccaataagcctatgaaaaggtattcaaggtcattagccatgagaaaaataattcagacaacaatcagataaacatcttccagtatatctagacagtccccaatttataatggtttgatttatgatttttccactttatgatgttgtgaaagtggtatgcattcagtagaaaccataccttggattttgaattttcatttcccgggctagccactggcagtatgatactctagtgaggctaggcagcagcagtgagccatagctcctagcagtcatgcagttatgaaggtaaacaaccaatacttcatcgcgtactgtgctgccaccattttgacccactgtaggctaatgtaagtgttctgagcacatttaaggtaggctaggcaaagctatgatgttcagtacattaggtgtactaaaagcattttttatttacagtgtttttaacttatagtaggtttattaggaggtaactccttcataaatcaaggatcatctgtttaaaatttgaaagtgtgtgttttttagaattctcttagtattcactgaagttgaatggaggcaacatactctcaggtatatggttaacaaaaattcatgcatgattgacccaaaatatgtatacatgaatgcttatcatggtgccatatctaatagcaaaaattgaaaacaaagtgcccaggaggagttgaaggataagtaaaccttaaaatatgcacatattctctcaaggaacgtggatagtattgtgactgattcttctccatgtgtgatccacatagatgataagatcatcatgagaagaacttaattttatacttgagctttgctttgactgaaagatgagaaattttgtgattattggtatcatctctatgatgtcatattacctagattcacatattcttaactccattaaaatagaaattatatttgtgggcggggaacttattttcatccatctctgtttccttccaattgagcaattccttattttatgttaacctgattttagtggttcattgccataattcttagaaattatatctcattttttcctgtgattttactgtattgaagtaaatctggttggcaggatatacaatattacatgaatgaaatttgcctttggtaactgagaaagttcaaatagaccttggttctagcgaagacttgtttctaaggaatttagattcattctttcagacagtatgaatatcattatggggtcttcttcatgagttatgtatgtgatgggattcttgtaagattttcaccttttacctgagcttgccttgactgaaagttgagaaaattttgtgattcattggtataatttctacagtgcaatatttatttggatctaagcatgcaagtaaaaaaattcatccctgttatagtatttcaggtttgcagtacgttatgacatttgtagatcattgatggactatgaatattcaagggacctggcaattgtacccaggggattgagatccagatacttgtttgtttgcccatagatataaaattaggagcttcctgatatctaatttacttttttaggaataacacccatgagatacagttctcatctactgccctactcctgtccttagataaataacaccggaagaagaagactctctggcctcttacatcagggacacatgaaaagccacactgaatatgtatgaactccaatatactttcacagaagggtttaaggatgccatccctggttataatttttaggaccaaatatatatatatatacacacatacacacacatttaggatagatatatatttaggatatataggataaatatatatatttagtgccatggtttgggtcatgaggaggtttgatgacataaaaattatgctcataagtattatgctgagacccattcttgggaggagatgtgggggtgtcctaggctgtgcaaaacatagctatggaaacagaagttattaagagaaaagaacaagcagtcagtgagaatttagataagagactgtaatagaataaaagtatcagattagtgaatggttgtcctagtaatttggaagaaaaggaataaaaaatggagtcagactactaaatggcaaaaataaagacttgaagaacttaattttatacctgagctttgctttgattgaaagttgagaaatcttgtgatttgtcggtatcatcatctcaaatcaacttatttttcatctcaacatgaagaatatcagctctagccttttggaatttcagcaactcagatgcttgttagaacttatccaggactgcttgcaggacccaaaatactaataatccatatgcctttttttccagctgaaattagctgtcttaagagttgtttttcagtgctctgaggatatccacaaatatatcccaaggcactctgaagtgtgttttcaatctttggccctgcacactggggatgcccactggatgttgcatggagtgttgcctccagttgactttgatagacacaataaacaccacgtgagagccccctcatgaaggagggctgaggacttggagtccaattctccacctcccctgacagataggctattcaatgccttgggaatccgacatgaaggactgcttatagcagtccttgaaaactttctacagaatgtgaactgggagaagctaaatgctgtactcacaagctgggtgacttctccattgatttttaccatagctcactgaaacattttctaaattaacaggtataaattcacagacagatcagaatagatccttggtcctttccatttttctggcacttttgttgccaggaattcaaatacaactaagagaaaaagtgggtagctagcaagaacagatagtttctcaaatattagtggcagtaacccaactttgagaaaatatggagaaagagaagaaaaaacccttaagactgcagtgttagctgcccagttacaattattcacaaagtgagcaaatacttatttgggccaccaataaataagagggcacaagctaacgggaaattaatacgtcactcatgtaaaaagtcaacacattagaaaaaggaatcttggatgagattgagaaagatgcaagggataaaacctgacaagctttacaacctccttgaggaggtcttccctactctgtaaaatcagacagaaaatcattggcaaatggagcaaagcatgggcaaaactgatataatgaggaaacagagctgggaaaggataaatttatgtgtctgtttctgtttcctatcttttaatccttttttaccctttcttctggatactggagcaacgtattctgcaatttctacaggccttttctgttttatcctaaactaggaaaatatccagatataagtatttctggactatctgctacctcttctttctcctctgaggttttcatgcaaataggcgaggtcctatttgcataaaataggaagaatatgccttgtctcctaatatgcccaataatcttttaagaaagggcctgctgtgtaaaccaagggctatgatcttctgtactctgaagagagtgcttttggagcttctgggatgcaaggtatctacattgctaaatatgtgctttctgaaacaaaagatggctgtgggagagtaggagtctcactcaatgctggagaagcactcccaagttacagaaaataaacccatatctatgagtcctaggaacaaatgataaagatttaacaaaagagatcaataccattgttgtaacttacaacagagaaaaaccttggccatgtatagaacattttctctatttttacctcaaatatgatgtaattagaaaaattttaaaaaacgtggcatagttaaaaaaaaatggcacattcacttcataatgcttccatattgcctgtgggaaagttaggaaaacttgacagggaaggtcaaactgtttatagatttatgcatgatcttagagaaacaagttgtgattcctctgacacttgtaattcccagccttgccactgttttaatatctgttcctgagttatctaagtatttttctgtcatggatttatgttcaatgttttgttctccatgtttagctggggagtcgaggttcctgtttgagtttacctgtggagcgggaggctttcaatatttgtggcaacggatcttcctggaattcagagagtcacctactccattctctgggcatttataagaaaatataaagaatattcctcacattaggattccatactaattgttattgatagctgctaataacttacatgctagtaaagaagacattttagctttactaaatttcttagactcccaggacgtaaaacctcgctagctaagttgcaatattaccaactgaagtaaaatatttgggatctgtgttattggcagatggaaggtggttgcatcttgaagtcagcctaatatacaaatgaaacaacatgccaaaaaaaaacttcaccgattttgaggattaattgtagatctttgcgttttatgaaaaggctaagcctctcactgagatgttacatgaaacatcactagaactctttattaaagtcaaaataaggctgaagaagtcttttatgcccttaaaatagctgctatttcttcacttgtattacttttttaaccttgttaaaaaaggagttctaccttttctgtcttgagattaagggttactccaaaattaggccttgattataggcacattgcttactttcccaggttcttgtattttgtctctctggaaatgcgatgatatttataaggtacagtggcaaccactcccctgattaaaaaggctcattcagtccttgactctgagaaatttaacttacttacaggtacttcatgttgttactgctattttacaagttcataagacacaacacttgtcagtatgctgtcaaacgagctaagaacaagtcttattgtgtgatcctaatgctattctaggaaggtgtaaccttttgacagctattctgtggccagatcttgacagaataagttgaacttgactgtctcagagtgattgaggaagacactggagcatggtctaatttttgtaatattcctattcccaatgttgactgaatattcatgaatatattctgtgtgaaagacccacaaaggaatataaaagcatgttctacggtaatcaaccctcatgaagcttagaggcttctgtttttcgaaacataaaatcagcccaagtggcagaattgtagttattataccagctgttaaattagccaccagttataaagcagatatctatactggtaataactatatgtttgtggtctgttatgtgactagccaactttggaagaatagatgctaacgtcaataggaactaaaatattacatgagaagctaatttctgatttagtagagtcattcaaacttctctaacagatttatgtaatttattgtagagctcacagtggaaaacaagattaactctttaaaaagaaattaatttgcagacctagctgtgaagggcttctgacgtttagactggggaaatcaaacctctatcacttctgtccaaaacctcctattcataatttcagaaatagccaactctcttaagaattagaaaattaggaatgaaggagaactaagatgaacaccataggaaaatgagaattacataatgaaatctttcctttattccgattgttatatgattgagtggctttttcatgccaccaacaagttcgttcaagcaaaaggaatatgctgacaacttgaaatctttgtaatagcatcatataattcaggaaataatatgaagatatgctctttgtcagaaaaattctttccttacctaaaataagtcaagaaagcctactaaggcccatgatacctaggatctgctggcacaagaactttatagaacttccacctttagaagatagtaaatatttttaccagtgttgtgtattggtgtctggataggctaaagcagatgctcaaacagtgatcaagctcttactgaatcatatcatctcaaccactggaattcctgaatatctggaattcagtaggggaatcattctgtatttgtgggaattcgggaattttgtaatactctacaaataccaataatttacctacctgttatccccagtcttctgaacaagtggaatgagtgaaccacataccctaaagaattatttagctgaattatttagctaagttatgtaaaaccttaccatccgtttcatttaaaataagattaaatccctctagcaagcccaacattactccctttgagtttggaaggtctactaatcttgggcttaagcctaaccctttctctgatacaatggaaaatcctcatgaccatatatgatacttaaagagtttgtgggtttccctaggctcaccttgccaacatgtggccagatgctgaaaaagccgcctggggaagtgtgtcattgatattgaacaggagattcagtctatatcaaagtgttctgatgacagactgtgaccacactggacagaaccctatcaagtgtggttgagaattcatagtgctatcaagatgaaggagaaacccaagtggatacacgcttcacatgtgagaccaacatccaccatcgagtggggtataattcccatttaggaccttaaggataaattctctagatagtaaccttgaataatatgcaagctaaagagaaaaacttatttgatagacagcaggagagatagactgttttgttattaatacgttcttcttaattattttgaccattataattttgatacttagtttgtattaattttgatacttagtttgtatcaattgaacataaagcttattattagtctttcttttaaaagttagtatctcaacctcaaggaattttgtggtaattaaaaattgtcctgaatatgagatcaggacttaagaaacccctttctttgtcataatacttcaaactcaccaactggatgatttaaattcagaagacatgaaaaatttcaaatcttcccactgattagtcaatattacaaaaatcttaaatatcatcaccctttgtgttattgaagatactgatgagaagaaatttttaactaattaagttgaacgtaattatattcaaattgaaagtccctgaagggtatcacaaaactccaacaactctgtatcttttttttttttgagcagagtttcaccttattgcccaggctagagtgcaatggcacgatcttggctcaccacaacctctgcctcccaggttcaagcgattctcctgcctcagcctcctgagtagctgggattatagacatgcaccaccatgcctggctaattttgtattttttgtagagatggggtttctccatgttggtcaggatggtctcaaacttccaacctcaggtgatccacccgcctttgactcccaaagtgctgggattacaggtgtaagccaccacgcccggcccaactctagatcttaaatagccatgggggtccaatttaataaagcttaaatagacacacagatgagaaaatatcccagcccaaatggtgagggttagtttcttcaaaacccccaaaacgtatcatcacctaaaaatgagcttaccctgtttagaacctggcagtctccagtccccatacttacaaactcgaggataattaaatggtctgtatcatttaatattacaatagctaatgtgagtaaactgaattctacttgtacatgataggctttaccactatgaaatgtttttacacagggactaaaatggcactatgatcaaactgaaagagatttctttttttaatagatggggtctggctttgttgcctacactggagtgcagtagcacaatcatagctgtctatcgcctgtaactcctgggctcaagggcttcctccgtctcagcttcctgagtagctgggactacagggacatgccaccatgcctgcctatttttttttgtagagtcagggtcttgctcaggctggtttcgaacttctggcctcaagtgatcctgctgcctcggccttccgaagcactgggttcgcagacataagccaccatacctggccagagattattaaatacagtattagggggaataaaactaggactacaattgtaaactcttctgatatagaaacaattactgataaacagtgcattggacaatttgcagaaagatgcaaacatgatagaatcaaaatctaaacaagatatgacaaagaaaaacaaaaatggaattgggaaagcatttggaattggacatctggtaataaaattctattgcaaaaaaatatatagtaaagaattttcagaagccttcacttgcattagtgcacaaccactggttattcaacaactacaatgtatacttgctggtactgaagtacaagattatacctactcagacaaacaattaggtattggacatactactgtctatgtagagattaaatgatagtgtaaaaaggttgatcatattataggtaaaagagctgaaatctggcattgcagattgaaatttctgaaaactgaaataataaaactaatttcactaaagtatgtacattttcttatttacatagtttataatgtgttatataattcatgaatcttcaaaagaaatatactgagctattcaataaaaatttacattacagctttaggccaccaagccccatctattgattatgtacttggtgtaaattggcggggggaacaaaacaagagtgaaaactgagcctcaaaatacaaagcatgtagcaaaacagactactaaaattattctcaatttctaagcccattatatgatgcaggagaattcttatgtgtaggtaataaagaatctgttcaaatatgcatcagtggtatgacagtttcaaataacccactgaactaggaaatattcaccaccaaggaggtcaggtatactgatttggtcaacctggatattgacatgggatgttcttacggattgacagctccacttgatgctatcctatcacaaaatattattacctgatgttgatataattaacaagtcaatacaaaaagtaaggtctctctacaagacaagactaacatctctgtaatataaatgggactctgagtgtaatagatttagggtttctgcaagaattttgaaagttaaggatccaacgcctgtaatcccagcactttgggaggccgagacgggtggatcacgaggtcaagagattgagaccatcctggccaacatggtgaaaccccgtctctaataaaaatacaaaaaaaaaaaaaaaatagctggacatggtggcacacacctgtaatccccgctactcgggaggctgaggcaggagaatcgcgtgaaccagggaggcagaggttgcagtgagccgagatcgtaccactgcactctggcctggcaacagagcgagactctgtctcaaaaaaacaggaaagcaaaagaaaaagttaaggatcctaccaacaaaattggaatatgagactgaggaaattcctattccagctaaacccagaattgattatgttgatgaacacatgaatttcatgtgtgtgaaaacatatgaactcctcattgtcagtctaatgagagtgaaaacaacacatcgaagatgcggggagacgacaatacagagtgggctcataactgcattctagatactgggattactttccattaaggtatataattttagaatatctcacaaatagcccatgcaaaatcctgcggaaaggcaaccataaatatagagagaatatgtaaaaaagtggcatggtctagtatatgccaaacaaggcaagggtatacaaaaacctcaaggtcccagtatgacaaatcatgcttgtattgcacacccattaaaaagtcttctaaaaagtttttttaatggtgtgcaggcaggtttattcagaaaaagctcggattcatacttgtaaaagtctgagaaaagcattaaaatgctattatgatacagttgacccaaacaacacaggtttgagctgtgcaggtccacttatctgtggattttcttctacctctgccactgagacagaaagacaaactcctcctgctcctcagactactcagcatgaagatgaggatgaagacctttaggatgattcacttcttcctaatgaatagtgaatgtattacttccttaataacgtttttttttctctagcttcttgtaagaatacagtatataatatatgcaacacaaaaaatacgtgttaatcaactgctttatgttatcagtaaggcttccagtcaatgggagactaactactaattaagtttttggggagtcaagttatatgcagattctccactgagcaaatgttcagcactcttaactcctgtggtgttcaagtgtcaactgtatatatgtttaagagttattgtttacccagtagatcaagccaagaccaagttaggtttatgtgtttttggcttaacctaagaaaatgttcagactaaagcagtccatcaatagaacagactgccttttaaaccagggaacaacttgtctttgtaggtattttaggtatatgaatgaccatatgtgatctgctttgggtcatctatggtcccttccaacttaaaacttctctattcatgaacattgcataactgaattgtggatttcatataaataatatcttgttgcctactttaggtttgaaatgttttccttctcagttgcatagatatgtatagcaccatccccactatgaactctcatgtagaaaataccagattctaaagtcatctgtgaggctaaatgtcagacttaggcacttccacataatgctgcaaaaagcaacagcttaaaggtattacttgctcaacatgtcattccaaacacatacactatgattagcagctgaatttaacagtatctttccactttgaaaaacactttatatacctttacaaagaagccatagtatctcagggtagaaaaactcaacaggtagaaaacatggccttctcttagaaatgagctacgtaattttgagtacttatctcaaaatcattgcagaaacatatctagtgcttatggaaaaagaatcaaaagatctttttttttagctaaagattttgagtttttcttgtgacatttaagtcttttaatgtatgctgatttttatgattatctaactgtttcataatggttattcttgcctccatgaaagggaagactagaacaaaaacctgacaagaacaagttctagctccatcaccgacttactgagtgaccctaggcaaatcatgtgggctctttcttgtgttttaagttttacctccaatgaagtaactgcctcagactagctgtgaagctctcataaagtgatggatttgaaaatgccttgcaaagaatgagcagttaatacatagaaagtttcatgtacttccgtatattgcatgatgcccacccagggttaggttgataacagttgttgatccaataatgaaagaaataaaaagaactctttaaaataacgaagtaaaatagctaattttcctgttgtagttttaaaaattatataaactatataactaaacatatttatgtttattatatataatatgatatgcaattacataagacattattatataatgtttttatataatgcttaagtaattaaacaattatatttaaatataagttatactttccttccccagataagacaaagaacctgtttacttctctgagggatttattggttcctgtgaaatctgtggaggccgctaacactccatagccagagaatgacaacatatgattttcttttcagtcttgtagtatccacagtagtgatgtctgtccatgtacaagtgtctgtccaggacatccattaaattccatgcctgctctgtgtgttatgagggcagggacagaagacagattcactggtggtactttcaaacaatgtggtaggccttccttttggggtctgccatgacaatgataccccaggcggcaatgctaaggcccatgaccatcttcataatggtccatggacccggggggtatcccatcttcatgggcttctgtgccacccagtacacatacccgcctgcccccatcagccgcaacccagaaagcacgtgacagctccagcaggtctccaacaggtggtgttctgctggtgaggtcggcgatccgggtgtagctggggttgcaggcttggcaggcacggcggcggtatcgggaggcacagcgatcttgagggactcaaaaggctgggacaactgagaccccgtgttctggaactcggcctccctaaaaattatgttttaaaaaatacatagaatcggtaagatgaggaaaaagcataaaacggtcaaaaacactgggataattcaaggttcattttgacaatggtaatacaaatagaaaaactgacaaaaaagaaaatacatcttacattagaaaacatacaagagtagttgtatacaaacgaagacacgtaccaaaaataagttacaaaatatgaatgcatatacataaaaaatgtagtttcaaacaattcaaaagtaaaatgatgcaagacattaaaatattcacaaacacgctcgaaaaataagagctgacgcccaaattagaccagttcaacggaagtgtggggtgtggttggggatccgccgcagaaatcacgtggcgcccaggccaaggctgcaatttcccatgctgcttggagaagacgcctgggagggctcccaccatgcccaggggcaggctatgtgactgcccggtctgcagctgtaagtggtttctgggccagtctctttgtctggtcatgacctggttggtggccctagcttgtgccgagtggtcccggagtggcccagggggttgtgtgtggggagccagcgtgggcagcggaggtgctccctggggcctgcagtagggcacagcctctgcatcttgtgtgagcccagtgacccgcctgtcctgtccttccagggttgggtggcagggagggccaagggtgccctgcgtccgtgacgggtcagcgtttccagcaaatgggtccatggagggagagcctagctgagccggcgggctctaccaccttcatgaggttctgtttggacacctgtcctactcctgttcccccagatggtgaccatggaggaagacttgtgttgggcccaatggccctcggccagtgtccgtctgccaggtgccagcccccggtgcgctgaagctcaggccattcctgatgccctggcctcctgcactgagctgtggtgagcccatccgggtcctgctggatacatgggcggggaggggggtgccctgggttgtgttgatgatgagaaccttatattatcctgaagagaggtgatgacttaaaaatcatgctcaataggattacgctgaggcccagcctaggtgagaattttggaagaggatgctgggatccagaggcccccgacggggccactgtatttcgggctgcagacctagaggccctgaagggcatctgaaggtggcccaagcctatctctgagcaaccccgtgaggcagtcaaggatccctgtgtgggcataggctggggctctggttccctaggggcagggcatgtgggtggctcctccctgacccccattctcccctgtgtctttcagtgagctcttctgcccaggcaggccccctggcattgaccggcataggtgagtggatcctgctggggtcatgggccatgagccaggctgctggggtcgccaagggtcagcctttgggacaggagggtttccttagggagccaacctgaatccccactggggagggctaggttctccaggagggcagcttccttgggagtctgacccaaggaggatatcttctctaaagccctgcagtggtgagggtggtccaggcagcaaagggttccttcaaccccacccaggacagcgcccagctgagactcagtgtgcaggtctggccatgaggactgcccaggtcacataagggggtccataggagctccggggcaccacaggggtcacacaggagctctccttccccagagaggggtgagcgattgggcctatggggtcaggcctttggagatcaaggattgggccccacccatgaacctgaatgggactgagcctttgagcaatggaccatcccagtggtgcctcggagcctagtcgggggtgatgtggcttcaagggggttgggtcaaggctgagctctggccggtgcctggtagtgctgcaggctggccctgggactcgctggctttgggcaaaggggccagcccgtgtcccactggaggtcaccccttccctgtgggcaactagcaggaagggtggcatccttagctgggaaggcccactgtcgagggtcctgtccagggaatttgcctcccaggcttcttctgatccacggactcacctccagggtggtggggtcttgggcccgaggaaaggagaagataccctgtgttccccagttggctgagtgtggcttggctctgtgtttgggaggtgtgtagggtatgaatggggacccaccagagaacacacatggcccagggccccaggttatgatttcccatgcacacttggagagaactctgggtgagtgccctccactcccaggcacaggctatgcaactgccaggtctgcagtggcatgtggcttccaggtcagcctccttggttggccatgagcaggttggttgccctgtcctgtgcccagtggtcttggagtggcccaggggtcctgcaggggagctggtgtgggtagtggaggtgcttgtggggcctgcaatagagcgcagcctaggtgccttgcacgagctcagtgacccacctgccctgtcctagtcctagctcagtgacccacccccgctttgcagtgatggggagtaccaagcgtctcctgcgtctgtgatgggtcagtgttcccatcacatgggtccatggagggagagcatgcatgagctggcaccacccaccaccttcccactatggaggcgtgaggccatgtttggacacatgtcttcttgtccccccagacagtgagcctggaggaagacttgccctggtcccactgtccctgggccagtgtccatcagccaggtgcccagaccccagtgcgctgaagctcagccctccctggcactctggtctcctgcactgagctgtggtgagcacatccaggtcctgctggatgtttgcatggggaggggctttccccgggttgggtcgatgatgagaagcttctgttttcttgaagagaggtgatgacttaaaaatcatgctcaataggattatgctgaggcccagcctaggtgagaattttggaagaggatgctgggatccccggcaggagggattttgggctggagacctggaggccctgaagggtatctgcaggggccccatccctgtctctgcacttgtctgtgaggcagcccagtttccctgtgtgggcttcgtgtcagtgctctggttccctggagcagggcacgtgggtggctcatccctgaagtcacgttctccctttgtgtctttcagtgagctcttccgcccatgagggccccctggccttgagcagcataggtgagcggatcctgctgggctcatggaccaggccacatggggtcactgagggtcagccttcaggacaggagggattcctcagggagacaacctgaatccccactggtgagggattggttctccaggagaaccacctccttgggaatctgacccaaggaggacaccttccctgaagccctgcaggagtgacagtggtccaggcaggaaagggttccattagtcccatgcagggcagctcccagctgagacttggtgctagggtctggcctcgaggactgcccaggccacatgaggcagggtctcaggctgctatttccagtgcatgcttggagagggagcctgggtaggccccctccctgtgcaggggcaggctgtgcatctgctggggctgcagcggtgcctgccttcaggaccagcctccttggttggcttgagctggatagtggccttggccccacccaggggtcatggtgcagcccaggaattgcaggggagctggcatggggagtggaggtgctccaggggcttgcagtagggcacagcctgggcatcttgcttgagcccagtgaccagcctgccctgttttccagggttcagtggcagggaggaccaagggtcccccacgtccatgactatcactgtttcacatggatcccatcaggtgggtccatggagggagagcatgtgtgagtcagcaccccctgcctcctttcccgcatggaggcatgaggttctgttcggacacttttccctgtctctccagatggtgaccctgaaggaggacttgtgttgggcccaatggcctggggccagtgtctgtcagccaggtgcccagcccctggcgtgctgaagtttgggcccttcctggtgccctgttctatcgggggaacccgcccccaataattcaacgtaggtccttttctattttccctaagtgtcggccggtctgagaaataaagggaaagagtacaaaagaaagaaattttaaagctgggtgtccgggggagacatcacatgtcggcaggttccatgatgccacccaagctgcaaaaccagcaagtttttattagtgattttcaaaggggagggagtgtacaaatagggtgtgggtcacagaaatcacatgcttcacaaggcaataaaatatcagaaggcaaatgagggcagagcaccagggccaaattgaaattgctaatgaagtttcgggcacgcattgtcattgataacatcttatcaggagacagggtttgagagcagacaaccggtctgaccaaaatttattaggcaggaatttcctcgtcctaataggcctaggagcgcttcgggagaccagggcttatttcatcccttatctacaactgtataagacagacattcccagagcggccattttagagacctccccctaggaaggcattctctttctcagggttgttccttgctgagaaaaataattcagcaatatttctcctattcgcttttgtaagaagagaaatatggctctgttccgcccggctctcaggcagtcaggcctgatggttgtctcccttgttccctgaacatcgctgttatcctgttcttttttcaaggtgcccagatttcatattgtttaaacacacatgttttacgaacaatttgtgcagtgaacgcaatcatcacagggtcctgaggcgaaatacatcctcagcttacgaagatgacgggattaagagattaaagtaaagacaggcataggaaataataagagtattgatttgggaagtgataaatgtccatgaaatcttcacaatttgtgttcttctgccatggcttcagcaggtccctccgtttggggtccctgacttccctcaacactggtctcttccactgagccttggtgagcccatctaggtcctactggatgcatgtgtggggaggggggtgccctgggttgggtcaatgatgagaaccttatattgtcctgaagagaggtgatgacttaaaaatcatgcttagtaggattacgctgaggcctagcctaggtgagaatgttggaagaggatactggatgctgaggtccctggctgagctactgtattttgggatggagatctggtgactctaagggcacctgaagggccagaccctgtctctatgaggcagcccaggctccctgtgcaggcttgctgttggcactctggttccctggggtgggacatattggtggctcctccctgagccctgttctccccttgtgtctttcagtgagctcttccaccaaggagggccccctggcattgactggcataggtgagtggatcctgctggtgtcatgggccatgggccaggccacgtggggtcaccaagggtcagccttcaggaaagaagggtttcctcagggagccaaactgaatccccactgggaagagatgggttctccaggagggcggcttcctgggaaacaggaaccaaggaggacgccttccctgaagccctgcaggggtgacggtggtccaggcaggaaagggttccttcaattccacccagggcagctcccagctgagtctcggtgctcgcgtctggactgccctgactatgtggggggccacaggggctctggggtgccttgggggtcacacaggtgctctttgtccctggagaaaggtgggtgatcaggcccatggagttgagcagtggagattcaaggattgcacctgacacatggtcctgaatggaacccaccctgttgagcaatgggccatcccatgggcctcttcaagcctgaagaggggcggtgctgtttcactgggtttaggtcaaggctgagctctggccggtgcctggtggtgctgcagtctagctgttggactcgtgggctttgggccagtggggcagcctgcatccctctggaagtcaccccttccctgtggctggaagttaccccttcccagtgggcgaatgtggggaagggtcacctcctgaagtgagaaggcccactattgagggtcctgtcctggcaatttgctgcccatgctgcttctgagccatggagacacctccagtgtggtgggatcttgggcccaaggaagggagaagacactgtgccccccgattagctgagtgtggccaggctgtgtgtttatgaggtgtgaggggcatggatggaaactcaccagagaaagcatgtggccctgggaccccaggtcgtggtttccagtatgtgcccagatacagcacatgggtgggtgcccaccatgcacagggactggctatgtgactgccagctgtgcagcagcatcaggcatatgggccagcctccttggttgacaatgaactggttgctggccctggcctgtgcccagtagtcctggggtgaccctggtgtcatacaggggagctggcatgtgtagtggaggtgcttgtggggcttgcagtagggcacagccctggcttctagcctgagcccagtgacctgcctgtcctatcctttcggtgttcagtggcggagagagcattgggtgccctgcatccatgatgggtaagtattccacatggatctcatcacatgggtccatggaaggtgagcatccctgagctggcacaccacaccttctgtccacatggaggggtgaggttgtgtttgggcacttgtcctcttcctgttccttgagatggtgaccccagaggaggacatgcgttgggcccgctgtccctggccagtggccatcagccaagtgcctagcccctattgcactgaaactcgggcccttcctgtcaccttggtctcctgcgttgagcttgggtgagcccatccgggtgccactggatgcctaggcagggaggggggtgccctgggttgggtcgatgatgagaactttatattgttctgaagagaggtgatgacttaaaaatcatgctcaataggattacgctgaggcccagcctaggtgagaattttggaaggggacactagaatcccgaggtccccagcagggctgctgtattttaggctggatacctcgaggccctgaagggcacctcatggaggggcccaatcctgtctgtgctcctctattaggcacaccagactttctgtgtgggcttggtgtccacgctcagcttccctggggtgggacacgttggcggctcctccgtgagccccattatcctctgtgtctttcagtgagctcttccccccagcagacccctgggattgacgagcataggtgagtggagactgctggtgtcatgggccatgagccaagctgcgtggggtccccaagggtcagccctcgggccacctgggtttcctcaggagctgatctgaatcccaactggggatgtgttctccaggagggcagcttccttgggaatcagacataaggaggaggccttctctgaagccccgcaggggtggcagttgtccaggcaggaaagggtttcctcagccccacgcagggcagtgctcagctcagacttggtgcttgggtcaggcctctaacatggccaggccacatgaggggggcaacaagggctccggggagccaagggcatctcacgggggctctccaaccctggagaagggtgggtgattcggtccatggggtcaggccatggagattcatggattgcagcaaacccaggaccctcaatgggactgaccctataagcagtgggccctcccagtggcacctctttgagccatttgtggggcggcgctgtttctctgaggttgggtcaagactagctctggccagtgcctgatggtggtgcaatccactcctgggactcgtgggctctgggccaaggctgcagcccatgtcccgctgggggtcaccccttcattgtgggcgagtggcagtaatggcctcctgagttgggaaggcccgcagtggaaggacctttcctggaaatttgcagtccaggctgcttctcagccattaggacaactccagcgggttggggggcaggggcgggtcttaggcccaaagaaaggagaagataccatatgtctcccggttggctgagtgtggccctgctgtgtgtgtgggaggtgttgtgtggggcatggattgggacacaccagagaaagcttgtggccctggagccccaggctgcgatttccagtgcaccttgaggaaaggagggtgggtgccctccatgcacagggcagactgtgcaactgccaggtaggcaacagcacgtggtgtccgggccagggtccttggtttgctgtgagctctttggtgtccgtggcccctacccaaggatccagataccacccggggtcatgcaggggagctagcatgggcaatggaggtgctcaaggggcctgcagtagggcacagcccaggtgtcttgcctgagcccaggaacccacctgccctgtccttccatggttcagtggctgggagagcaaagggttccgctgatctatgacacatcagtgtttcccatggatcccatcacatgggtccacggagagagagcatgtgtgagctggcacccccaaccccattccctgtatggaggcgtgagcccatggttggacacatgtcctcctcctgtccccccagatggtgactgtggaagaagacttgctttgggaccgctggccccaggccagtggttgtcatccaggtgcccagcccttggtgcacttgagctcaagcccttcctggtgccctggcctcctgccctaagctgtggtgagcccatccaggtcccactggatgcatgcatggggaggagggtgccctgggttggatcgatgatgagaaccttatattgtcctgaagagaggtgatgacttaaaaatcatgctcaataggattacgctgaggcccagccttggtgagaattttggaagaggatgctgagatcccaaggtctctggcagggccactgtattttgggctggagacctggaggccctgaagggcatcttaggggtgcccgaccccatctctgcgctcctccttgaggcagcccaggctcccttgcgggcttggtgtcagccctccagttccctggggttgaggcacattggaggctccttcctgagcccccattctcccctgtgtctttcagcgagctcttctgcccagggggacccctggccttaagtgggataggtaagtggatcctgctggggtcgtggaccatgagccaggtcgctttgggtcactgagagtcacccttcaggccacgagggattcctcagggagcccatctgaaacccaccagggacggatggtttctccaggaggacagcttccttggaagtcggtcccaagaaggatgccttccctgaagccgtgcagagatgatggacgtccaagcaggaagggcttccttcaactcaatgcagtgcacatcctagctgagactcagtgcacaagtcaggcctggaggacttcccaggccacatgagggggtccacagggtctccaggggccacgggtgttatgagggtgctctctgtccccgaggcttgcagaggggcagggtgtgggtgatcggacttatggagtcaggccgtgaagattcaaggattgggcccaacccatggcccagcatgggccgaacctgtagagcaatgggccatcccggtggtgcatccttgagccttgtgggggtggtgtgaccttagtggggttgggtcaagcctgagctctggccttcacctggtggtgctgcaggctggccctgggaatttgggctttgggccaagggtgcagtctgtgtcccgctaaaggtcacccctccccaaagtggagtggccagaaggatggcatcctgtggtagaagtcccactgtcaagggtcctgtcctggcaatttgttgcccaggctgcttctaagccatgggttcacctccaaagtggcggggtcttgagccgaaggaaaggggaagacatcatgtgttccctgattgactgagcatggcctggctctgcatttggaggtgtgcggtgcacgaatggggacccatcagagaaggcatgtggccctggggctccaggatttgatttctggtgtgagcttttacagggggtctgtagtggcacgtagcattcaggtcagcctacttggtttgctctgagcttgttggtggtcctggccctgcccagtggtcccattgtggcatagagtcatgtgagggagctgtggcaaggagggccaagggttccccacattcatgatcgttactgtttacatggatcccatctcttgagtccatggagggacagcatgtgtgagccagcaccccctgcccactttcctgcatggaggcgtgaggccgtatttctatacgtgtcccccacccctccagatggtgaccccagaggaagacgtgcattgggtccgctggccccaggccagtgtctctcagccatgtgctcaacacctggtgagctgaagctcaggcccttcctggcatcctggtctcctgcactgagctgtggtgagcacatctgggttcctctggatacgtgtgcagggagggggatgcactgggtcgggtcaatgatgagaaccttatattgttctgaagagaggtgatgacttaaaaatcatgctcaataggattacgctgaggcccagcctaggtgagaattttggaagaggatgctgggatcccaagttccccagcatggccagtatattttaggcaggagaccctgaggctctgaacggcatctccggggggcacaaccctggctctgggctcctctgggaggcagcccaggttccctgtgcaggcttgggctctggttccctgagcccccattctccctcgtgtgtttcagtgagctcgtcctcctaggtggggcccccaggcattgaccggcataggtgagtggtcctgctggggtcatgggtcatcagcaggttggagtcaccaagggtcagcctttgagacaggagggtttccacaggcagccgacctgaatccacaccatggagggatagattggtcctccaagagggctgttttttttcggaatcagacccaaggaggataccttccctgcagccctgcggggatgacggtggtccaggcagggaagggttccttcagtctcacgcaggtcagctcccagctgagtctcagtgcattggtctggcctccaggactgaccaggccacgtgaggggggcaacaggggcttcgggatgcagtggggtcacacaggatctctccatccccagagaaaggtgggcatagaacccatggattcgagctgcagagattcaagaatcgcacacgaattattgccctgaatgggacccaccctgttgagcaatgtcccatcccagggcacctctttgagcctgaagggggtggtgctgtttccctaggtttgggtcaaggctgagctctggccagtgcctggtggtgctgtagtcctgtcatggactcgttagctttacgccaaggggtcagcccacgtcctactggggatctccccttccctgtggctggaagtcaccccttccccattggcaagtgtcaggaagggtgacctcctgaggtggaagtcctgttgagggtcttgtccctggaatatgccacgcatgctgcttctgagccatggggtcacctccagggtagcgggtcttgggcccaaggaaaggagaagtcaccatgtgtcccccgattagccaagtgcggccctgctctgtgtttaggaggtgtgtggggcatggatggggacccaccagagaaagcatgtggcccagggaccccaggttgcaatttctaggacatgctgggatagggcacctgtgtgggtgtccacagtgcacagggataggctatgtgacttgcaggtctgcagcggcatctggcatccaggccagcctccttggtgggccgtgaactgaatggtggcgctggcctgtgcccagtatatctggtatgaccctggggtcgtgtgggggagccggcatgggcagtggaggtgcttatgggacctgcagtaggacacagtcggggcttcttgcccaagcccagtgacccgcttgccctgtccttccagggttcggtggctgagagagcttttgttgccctgtgtccgtgacgggccagtgttctgcatgcatcccatcacatggatccatggagggtgagcatccctgggctgacacaccccaccttctgcccccatggaggggtgaggttgtgttttcacacctgtcttactcctgtttccccagatgttgagcccagaggaagacttgcactgggcccaatggccccaggtcagcgtccatcagccaggtgtccagcccctggtgcactgaagatcgggcccttcctggtgccctggtctcctgcattgagctgtggtgagcacatccggatcctgctggatgcgtgtgcggggaagggggtgccctgggttgggtcaatgagaaccttatattgtcctgaagagaggtgataacttaaaaatcatgctcaataataggattacgctgaggcccagtctaggtgagaggtttggaagaggatgctgggattccgaggtccccaggagggcccctgtatttttggctggagacctggaggccctgaagggcatcttgtgggtgcccaaccctgtctctgcgctcctccttgaggcagcccaggctccctgtgcaggcttggtgtcagccctccagttccctgggtttgaggcacatgggaagctcctttctgagccccgttctcctcttgtgtctttcagtgagctcttccacatggaagacccctgtcattgactggcataggtgagtggctggcatcatgggccatgagccaggccgcgtgaggtcgccaagggtcagccttcgggaaagaagggtttcctcagggagccaacctgaatccccactgggaagatatgggttctccaggagggcgacttcctgggaaacaagaaccaaggaggtccccttccctgaagccctgcaggggtgacggtggtccaggcaggaaagggttccttcagttccacccagggcagctcccagctgaggctcggtgcttgcgtctggacttaaggactgccctggccatatgaggggtgccacagtggctctggggtgccatggggtcacacaggcactctctgtccctggagaaaggtgggtgattgggcccatggagttgagctgttgagatgcaagttttgcacctgacacatggccctgaatgggacccaccctgttgagcaatgggccatcccatgggcctcttcgagcctgaaggggggcggtgctgtttcactgggtttaggtcaaagctgacctctggccgccacctggtggtgctgcagtccagcccttggactcgtgggctttgggccaagggggcagcctgcatcccactgaaagtcaccccttccctgtggctggaagttatcccttcctcatgggcgagtgttgggaagggtggcctcctgaagtgggaaggcccgctattgagggtctgctcctggcaatttgctgcccatgctgcttctgagccatggagtcaccaccagtgtggtggggtcttggacccgaagaaaggagaagacactgtgccccccgattagctgagtgtggccaggctgtgtgtttgcgaggtgtgaagggcatggatggagactcaccagagaaagcatgtggccctggggccccaggttgtggtttccagtatgtgcttggatatggcatatgggtgggtgcctaccatgcacagggactggctatgtgactgccagctgtgcagcagcatcaggcatacgggccagcctccttggttgaccatgaactggttgctggccctggcctgtgcccagtagtcctggggtgaccctggtgtcatgtaggggagctggcatgtgtagtggaggtgctcgtgtggtctgcagtagggagcagccctggcttctagcctgagcccagtgacctgcctgtcctgtcctttcagggttcagtggcggagagagcatcaggtggcccacgtctgtgatgggccagtattccacatggatctcatcacatgggtccatggaaggcgagcatccctgagctggcacaccccaccttctgccagcatggaagggtgaggttgcatttggcacctgtcctcttcctgttcctcgagatggtgaccccagaggaggacttgcattgggcccactgtccccgggccagtggccatcagccgggtgcctagcccctgttgcactgaagctcaggcccttcctgttgccctggtctcctgcattgagcttgggtgagcccatccggttgccactggatgcctaagcagggaggggggttccctgggttgggtcaatgatgagaaccttacattgttctgaagagagatgatgacttaaaaatcatgctcaataggattacgctgaggcccagcctaggtgagaattttggaagaggacgctgggatccctaggtccctgacagggccactgtattttgggctggagacctggagtccttgaagggcatctggagggggcccaaacctgtctctacgttcctccatgaggcagtccaggctccctgtgcgagcttcgtgtcggtgctcagattccccttggtggtgcatgtgggtggctcatccctgagcccctgttctccccttgtgtctttcagtgaactcgtttgcccaggaggacccctggccttgagcagcataggtcagtggatcctactggggtcatgggccatggaccaggccacgtggggtcactgagggtcagctatcaggacaggagggattcctcagggagacaacctgaatccccactggtgagggattggttctccagaagggccgcctccttgggaatctgacccaaggaggacaccttccctgaagtgctacaggagtgacattggtccaggcaggaaagggttccattagtcccatgcaggtcagctcccagctgagacttggtgctagggtctggccttgaggactgcccaagccacatgaaggtggccccaggctgtgatttttggtgcgtgcttggagagggagtctgggcaccctccctgcacaggggcaggctgtgcgtctgccaggtctacagtggcgcctagcttcagagcaagcttccttggttggccttagctggttggtggccctggctcctacccaggggtcacaatgcagcccaggaagtgcagggaagccggcttggacagtggaggtgctccaggggcctgcggtagggcacagcctcggcatcttgcctgagcctagttactcgcctgtcctgtccttccagggtttggtggtggggagatacaagggttccccaggtccataactgtcctcgtttcacatggatcccatcacatgagtccacggatgtagagcatgtgtagccagcagcccctccccgctttcctgcatggaatcttaaggccctatttggacacctttccccgtccctccagatggtgagcacagaggaagaattgcgttaggccctttggccccggaccagtgtctgccagccacgtgctcagcctcccgtgcgctaaagctcaggtccttcctgtcatcctggtatcctgcactgaggtgtggtgagtccatccaggtccctctggatgtgtgagtggggatgggggtgtcctgggttgggtcgatgatgagaaccttatattgtcctgaagagaggtgatgacttaaaaatcatgctcaataggattacgctgaggcccaacttaggtgagaattttgaaagaggatgctgggaatcacaaggtccccggcaggaccactgtattttaggcgggagacctcgaggccctgaagggcatatcatggaggggtacccaacccagtctgtgctcctccattaggcacaccaggcttcctgtgtgggcttggtgtctgcactcagcttccccgggggtgggacacattggtggctccttcctgagtcgcattctcctctgtgtctttcagtgagctcttccccccagcaggccccctgggattgactggcaaaggtgagtggatactgctcgtgtcatgggctgtgagccaagctgcgtggggtccccaagggtcagccctcgggtcacctgggtttcctcaggagctgatctgaatcctgactggggatgtgttctccaggagggcagcttccttgggaatctgacacaaggaggaggccttctctggagccctgcaggggtggtggtggtccaggcaggaaagggtttcctcagctccacacaggacagtggagctgggcagtgctcagctcagacttggtgctcaggtcaggcctctaggatggccaggccacatgacgggggccacaagggctccagggcaccacagacatctcatgggggctctccaaccctggagaagggtgggcaatttggcccattgggtcgggtcatggagcttcaaggattgcaccaaacccatatccctcaatgggaccgaccctattaagcaatgggccatcccagtggcacctctttgagccatgtggtgggtggcgctgtttctctgaggttgggtcaagactagctccggccagtgcctgatggtggtgcagtccagtcctgggactcgtgggctttgggccaagggtgcagcccgtgtcctactggggatcaccccttccttatgagggagtggtgggaagggtatcctcctgaggtaggaaggcccgctgtggaaggaactttcctggaaatttgcagtccagactgcttctgagccatgaggtcatctccggggtggcggggtcttgggcccaaggaaaggagaagacaccatatgtctcccgattggttgagtatggctccactctgtgtgtgggaggtgttgtgtggggcatggattgggacccaccagagaaagctcgtggcactggaaccccaagctgcaatttccagtgcaccttgggaaggggactgggtgctcaccctccatgcacagggcaggctgtgcagctgccaagttggcagtggtgcgtggcatccgggccagcgtccttggttcgctgtgagctggttggtgtccttgacgcctgcccaggggtcccagtgctgcttggggtcatgaggggagccagcgtgggcaagggaggcctgcagtagggcacagcccgggggtcttgcctgagcccaggatcctgccggccctgtccttccatggttcggtggctgggagggcaaagggtcccccacgtctgagacacatcagtgtttcacatggatctcatcacatgggtccatagagagagagcaagcgtgagctgacaccccccacccccttccctgtatagaggtctgagcccctggttggacacatgtcttcctcctgtccccccagatggtgtctgtggaggaagacttgccattgggttgctggccccaggccagtggttgtcatccaggtgcccagccttggtgcactgaagctcaggcccttcctggtgctctggtctcctgcactgagctgtggtgagcacatccgggtcccactggatgggtgtgtgtggtggggggtgccctgggttgggtcgatgatgagaaccttatattgtctgaagagaggtgatgacttaaaaatcatgctcaataggattacgctgaggcccagcctaggtgagaattttggaagaggatgctgggaattacaagttccctgtgaagtccactgtattttgagctagagacctggaggctctgagggcatctggagggtgcccaaccctgtctctgcactcctccatgaggcagcccaggctcactctgtgggcttggtgtcggcgctcctgttacccaagggtggggtactttggcatctcctccctgagcccccattctcccctgtgtctttcagtgacctcttttgcccggcagaccccctggcattgaccagcataggtgagtggatcctgctggggtcatgggtcatgagccaggctgtgtggggttgccgagcatcagcctttggctgcaagggtttcctcaggaactgacccgaatgcccacctgggatgggttctccaggagggcagcttccttaggaatcggacccaaggaggataccttccatgaagccctgcaggggttgtggtggtccaggcagtaaagggtttcctcagccccatgcagggcagcacccagctgaaactcggtgcttaagtcaggcctctaggatggcccgtccacatgaggggaaccacaagggcactggggcgccaagggggtcttatgggggctctccgaccttggagaggtatgtgtgattcggcccatgaggtcaggttttggattttcaaggatctctccaaacccatggccctgaatgggaccgaccctattaagctatgggccatcccagtggtgcctctttgagccaagtgtggggtggcactgtttccatgaggttgggtcaagactagctctggtgaccccatgatggtgctgcagtctggccctgggactcgtgggctttgggccaagggtatagcccatgtcccaccaggggccacaccttccttgtgggcaagtggcggacagggtgtcctcctgaggtgagaaggcctgctgtggaaggacctgtccaggctgcttccaagctatggggtcacctacagggtggtggggtcaaggaaaggagaagacaccatgtgtctcccgattggctgagtgtggccccactctgtgtgtgggaggtgttgtgtgaggcatggatggggacatatcagagaacacacgaggccctgggtccccaggctgcaatttccggtgtggtgtggagcagggcctgggtgcttgccctccacacacaggggcaggctgtgctactgccagattggcagcagtacgtggcatccaggccagcctccttggttggccgtgagacggtaggtggccctggctgacacccaggggccagtacagccctggggtcatgtgaggcaactggagtgggtagtggaggtgctcaaggtgcctgcagtagggcatagccagggcgtcttgcctgagcccagtgacctacctgccctgtccttccagggttcagtggtgcagagggccaaagttcccctgtgtccatgacacatcagtgtttcacatggatcccatcacatgggtccatggtgggagagcaatcgtgagctagcatcccccacccccttcctgcatggaggcgtgaggttccatttggacacatgtccacctcctgtcccccagatagtgagactggaagaaaactttcattgggcccgctgtcccggggtgagtggtcatcagtcaggtgcccagcccttggtgtggtgaagctcaggctcttcctggcgccctggtctcctgcacggagctgcggtgagcacatccgggtcccgatggatgcatgcgtggggatggagggcgtgccctgagttgggtcaatgatgagaaccttatattgtcctgaagagaggtgatgacttaaaaatcatgctcaataggattacgctgaggcccagcttaggtgagaattctggaagaggatgctgagatccgaagtcccctggaagggccactgtattttgggctggagtccttgaggccctgaaggacaccttcggggtgcccaacccagtctctgcactcctctgtgtggcagccaaggctccttgtgcaggcttggtgttggcattctggttccctgggggtggagcacatcgacggctcctccctgagcccccgttcttctctgtgtctttcagtgagctcttctacccaggcgggcccctgcccttgagcggcataggtgagtggatcttgctggggtcacgggccaagagccaggccacggggggtcgctgagggtcacctttcaggccacgagggtttccttagggagctgacctgaatccccaccagagatggatggtttctccggaagggcagcttccttgttaattgatcccaagaaggacgccttccctgaaaccctgcaggggtaatggaggcccaggcagcagagagttccttcaacccaatacagtgcagcagcttgttgccttgatgctccccctccctggagaaaggtgggcatagggcccgtggagttgagttgcagagatttaaggatcgcacaggacttattgacctaaatgggactgaccctgttgagcaacgtgcacttggtgcatgggtcaggtgtggagcactgcccaggccacatgaggggtccactgggtctctgggggccacgggtgttatgcaggagctctccgtccccaaggcttgcaggggggtaggatgtcggtgatcgagcttatgcagtcaggccgtgaagattcaaggattgggcccaacccatggccctgatgggaccgaccctgttgagcaatgggctatcccactggtgcctccttgagcctggtgggggcagtgcggcctcagtgggcttggatcaaggctgagctctggccagcacctggtgtttggccctgggaatcgtgggctttgggccaagggttcagcctgtgtcccactggagttcatccctaccggaagtggagtggatggaagggtggcatcctgtggtggaagacccaccgttaagggtcctgtcctggcaatttgatgcccaggctacttctgagccatggagtcacctccagggtagcagggtcttgagccaaaggaaagttgaggacatcatgtgtcctctgattggccgagcgtggcccagctctgtgtttaggaggtgtgcggtgcatgaatggggacccaccagagaaggcatgtggccctggggccccaggatgtgatttctggtgtgtgcttataaagggtgcctggatgggttcatttaatgcccaggggcaggccatgtgactgccaggtctgcagtggtacgtggcatccaggccagcctccttgatttgctgtgagctatttggtgcccatggccctgcccagtggtcctgatgcagcccagattcgagcaggggatttggcgtgggcagtggaggtgctccagggtcctgcactagggtgcagcctgggcgttttgctcgaaccctgtgaccctcctgccccgtccttccagggttcagtggccaagggttcctcgcgtaaatgaccatcactgttttacatggatctcatctcatgagtccatggagggagagcatgtgtgagccagcaccccctgcccactttcctgcatggaggcatgaggccttgtttggacacctgtcccccacccttccagatggtgaccccagaggaagacttgcgttgggcccactggctctgggctcagcccctggtgagctgaagctcaggcccttcctggcaccctggtctgctgcactgagctgcggtgagcctatctgggtcccactggatgcatgggttgcggggcagtggagggtgatgccctgggttgggtcgatgatgagaaccttatattgtcctgaagagaggtgatgacttaaaaatcatgctcaataggattacgctgaggcccagcctaggtgagaattttggaagaaggtgctgggatccggagttccctggaatgaccaatgtattttgggctggagaccttgaggccctgaacagcagcatctcgtgggggcccaaccccttctccgtgctcctctgtgaggcagcccaggctccctgtgtgggcttggtgttagtgctccggttctgtgaacccccattctccccttgtgtctttcagtgagctcttccacccaggtgcaaccccctggcattgaccagcataggtgagtggtcccgctggggtcatgggtcatcagtcatgcagtgtggggtcaccaagagtcagcctttgagacaggagggtttccacaggcagctgacctgaatccacaccatggaagggtaggttggtcctccaagagggctgtttttttgggaatcggacccaaggatgatatctttcctgcagccctgcagtgatgacggtggtccaggcaggaaaagtttccttcaatctcatgcagggcagctcccagctgagtctcagtgcactggtctggcctcgaggactgaccaggccacgtgaggggggccacaggggctttgggatgccatggggtcacacaagagctccccatccctggagaaaggtgggcatagagcccatggagttgagctgcagatatttaaggatcacacaggatttatagccctgaatgggaccgaccctgttgagcaatgtgccatccatcctatggtacctctttgggcctggatggggtgttgctgtttccctaggttttggtcaaggctgagctctggccagtgcctggtggtgctacagtccagccacggacttgttagctttaggccaagggatcagtccacgtcctgctggggatctccccttccctgtggctggaagtcaccccttccccattggcaagtgtgaggaagggtggcctcctgaggtggaaggcctgctgttgagggtcttgtccctggaatatgccacccacactgcttctgagccatagggtcacctccaggatagtgggtattgggccaaaggaaagaagtcaccatgtgtcccctgattagccaagtgtggccctgctctgtgtttaggaggtgtgtggggcatggatggggacccaccagagaaagcatgtggccctgggactccaggttgtgatttccagttcatgctgggatagggcacctggatgggtgcccacaatgcaccggggcaggctatgtgactgccagctttgcagcggcatctggcatccgggccagcctccttggttggccatgaactggttggtggccctggcctgtgcccagtagctctgtcgtaatcctggggtcatgcgagggagccggcatgggcagtggaggtgctcgtgggacctgcggtaggacacagccaggtcttcttgcccgagcccagtgacccacctgccctgtccttccagggttcagtggttgagagtacagggtgacttgtgtctgtgacaagccagtgttctgcatggatcccatcacgtggatccatggacggcaagcatccctgagccgccacaccccaccttctgcctccatggaggggtgaggttgtgtgtggacgcctgtcctactcctgtttccccaggtattgagcctggaggaagacttgaattggtcccaatggtcccaggccagcatccatcagctaggtgctgagcccctggtgcactgaagattgggcacttcctggcaccctggtgtgctgcaccgagctgtgatgagcacatccgggtcctgctggatgcatgcgccgggaaggacgtgccctgagttgggtcgatgatgagaaccttatattatcctgaagagaggtgatgacttaaaaatcatgctcaataggattacgctgaggcccagtctaggtgagagttttggaagaggatgctgggatcctgaggtcccctggtagagccaattgtattttgggctggagacctggaagccctgaagggcatctgggaggcccaaccctgtctctgtgctcctccatgaggcagccctggctccccatgtaggcttggtgatggccttcctgttccctgggggtggggcacatgggtagctcctccctgacccccattctctcctgtgtctttcagtgagctcttccccacaggtgggccccctggcattgactagcatcggtgagtggatcctgctggggtcgtgggccgtgcaccaggctgcatggggtcaccaagtattagccttcaggacaggagggtttcctcagggagtcgaccttaatcctcacctgtggagagatgggtttgtcctctaggagggcagcttcctgggaaatcagacccaagacgatgccttccctgaagccctgcaggggtgacggtggtccagtctggaaagggttccttcagtctcatgcagggcagctcccagctgacacttggtgtgagagtctgtccttgaggactgcccaggacaaatgagtgggacaacagaggctcccggataccacagggatcactcaggggctctccgtccctggaaatgggtgggcgatcgggcccatggggtggggctgcggagattcaaggatcgtgccctgctcatggccctgaatgcaaatgaccctgttgagcaatgggtcacaccagtagctcctttttgagcctggtgggtggcggctcagcttcaactggttgggtcaaggctgagccatgactggtgctttgtggtgccgcaggccaaccctgggactcatgggctttgggtcaagggtgcagcccgcctgctgctgggggtcaccccttcttcgaggtcagtggcgggaagggtcacgtcccgaggttggaaagccccctcatgagggacctgtcctgggaatttgttgcccaggctgcttctgagccatgtggtcacttccgggtggcggggtcttgggcccaaggaaaggagagggcaccatgtggctcctgattggctcagtgtggcccagctctgtgtttgacaggggtctggggtgtggatgaggacccaccagacaaagcacgtggccctgggcccaggctgtgatttctggtgcgtgcttggagaaggatcctgggcaggcattctctccaaacaggggcaggttgtgggactgccagattggcagcagtgcctggcatccaggccagcatccttggttggctgtgagctggttggtgaccttggaccctgcccagggtttccgttgtggtccagagtcatgcagtggggccagtgtgagcagtggaggtgctccaggggcctgctgtatggcacagccagggcatcttacccaagccctcctgcactggtctcctgcactgagctgtggtgagcccatctgggttcctgtgatgcctgtgcggggagggggttgccctgggttgggtcgatgatgagaaacttatattgtctgaagagaggtgatgacttaaaaatcatgctcaataggattacgctgaggcccagcctaggtgagaattttggaagaggatgctgggaattatgagttccctggcagaaccactgtattttgggctggagacctggaggctctgagggcatctggagggtgcccaaccctgtctctgcgctcctccgtgaggcagcccaggctcactatgtgggcttggtgttggcactcctgttacccgggggtggggcattttggcatctcctttctgagcccccaatctcccctgtgtctttcagtgagctcttctgcccagcagcctccctggcagtgaccagcataggtgagtggatcctgctggggtaatggcccatgagccaggctgtgtggggtcaccaagcatcagccttcagccataagagtttcctcaggagctgacccgaatgcccacctgggatgggttctccagaagagtggcttccttggaaatcatacccaaggaagataccttccctgaagccctgcaggggttgcagtggtccaggcagtaaagggttttctcaacctcatgcagggcagtgccccactaagactcagtgctctggtcaggcctttaggatggccaggccacatgagaggggccacaagggctctggggcaccaaggggttcttgcaggggctcttcaaccttggagaggtgtgtgtaattcagcccatgaggtcaggctgtggattttcaaggattgcaccaaacccatggccctgaatgggacaaaccctaataagttatgggccatcccagtggtgcctctttgagccaagtgtggggtggcactgtttcctaagggtgagtcaagactagctctggctggcacctgatggtggtgcaatcctgccctgggattggtgggctttgggacatgggtacagcccatgtcccattggggtcaccccttcattgtggacaggtggcgggaagcatgtcctcctgaggtgggaaggcctgctgtggaagaccctgtctcagaaatttgctgtcttggctgcttctgagctatggcgtcacctctgtggtggcgggagtctcgggtgaatggatcctgctggggtcatgggccatgagccaggccggggtggggtccctgagcgtcacctttcgggtcatgagggtttcctaagggagccgacctgaatccccaccagggatgaatggtttctctgggaagcaggtttccttggaaatcagtcccaagaaggacaccttccctgaaaccttgcaggggtaacagaggtccaggcaagagagggttctttcaacccaacgcagtgcagatcctagctgagacttggtgcacaggtgagtcctggaggactgcccaggccacatgagggcatccacagggtctccgtggccaggagtcttatacgggagccctctgtccccgaggcttgcagaggggttgggtgtgggtgatctggcttacggagtcaggccgtgaacattcaagggtcgggaaccacccatggccctgaatgggaccgaccctgttgagcaatggccatcctggtggtggcaccttgagcctggtgggggtggcgctgcctcagtggggttgggtcaaggctgagctctgcctgtcaccttgtggttggccctgggaatcatgggctttgggccaagggtgcagcctgcgtcccgcttgaggtcactcctacctgaagtggagtggccggaagggtggcatcctgtggtgggagacccacggtcaaggatcctgtgctggcaatttgctgcgcagcctggttctgagtcatggggtcacctccagggtgacagggtctttgtcaaagggaaggagaggacattatgtggcccctgattggccaagcatggcccagctctgtgtttgggaggtatgcggtgcctgaatggggacccaccagagaaggcacatggccctggggccccaggatggtatttctggtgtgagcttataaagggtgcatggatgggtgcattccatgcccagtggcgggttatgtgactgccaggtctgcagtggcacatggggtccgggccagcctccttggtttgccatgagctggttggtggcccaggccctgcctagtggtctcattgcagcccagagtcatgtgggggagctggcgtgggcagtcgaggtgctccagggtcctacagtagggtgcagcctgggcgtcttgctggaatcccatgacccacctgccctatccttccagggttgagtggcagggagggccaagggttcctcgtgtgcatgactgtcactgttttacatggatctcatctcatgagtccatggtgggagagcatgtgtgagccagcacaccctacccactttgccctatggaggcacaaggccctgtttggacacctgtcccccacccctccagatgctgaccctggaggaagaattgcactgggcccactggccccgggaaaatgtccctcagccaggtgcttagcccctggtaatctgaagctcaggcccttcctgatgccctggtctcctgcactgagctgtggtgagcacatctgggtcccaatggatgcatgcatgcgttgtggggtggtggtgtcctgggttgggtcgatgatgagaaccttatatgttctgaagagaggtgatgacttaaaaatcatgctcaataggattacgctgaggcccagcctaggtgagaattttggaagaggatgctgggatttctaggtccctgtcatgggcactgtattttggactggagacctccgggccctgaacagcatctcgggggggactctaccctgtctccacattacatgtgaggcagcccaggctccctttgtgggcttggtgtctgcactctggttccctgtggtagggcagcttgctgggtccttcctgagcccctgttctccctttgtgtcttctgtctttcagtgagctcttcagcccaggtgggctccctgacactgatgcgcataggtgagtggattctgctggcatcatgggccatgagccaagctgcgtagggtcaccaaaggtcactctttaggccacgtgggtttcctcagggagccgacctgaatccccaccaggttgggacagtttctccaggaggctggcttccttgggaatcagacccaagacaatgccttccctgaagccttacaggggtaacagttgtccagacaggaaagggtcccctcagtcccattgaaggcagctcccagctgagactcagtgtgcgagtctggcctcaaggatggcccaggccacatgaaggaggccacaggggctctggggtgccacaggggtcacacgagagctctctttccctggagtggggtgctcgaatgagcccatggggtcaggctgcagagattcaaggatcgcatcccaaccgtggccctaaatgcgaccgaccatgttgagtaatgggccatctcagtggggcctctttgagcctggtggggggcggggctgtttccctgggtttgggtcaaggctgagctctggccagcgcctggtgatgctgcaggccagcccaggttcttgtgggcgttggtccattcggcagccctgtcctcctggaggtcaccccttgcctattggtgattggctggatcctgaggtggaaagacctgctgttgatggtcctgtcccaggaatttaccacccaggctgcttctgagccatggggtcacctccagggtggcggagtcttggggctaagaaaaaagaggacactatgtagcccacggttggccaagggtggcctgactctgtgtttgggacatgtgcggggcatggatagggacccgccagagaaagcacgtggcccggggactccaggcttcgatttcaggtgtggcttgcaaatagcacctaggcaggtgcccaccacgccctggggcaggctatgcaacttccatctccacagtggcgcatggcttctgggccattctccttggttggccatgagctgattggttcccctggcctgtgccctgtggtcccggagtggctctgggatcgtgtggggcagccagcatggacagtggagatgctatcaaggccttcagtagggtgcagcccaggtttcttgcctgaacccagtgacccacctaccctgtgttttcagggtttgctgacagggaaggccaaacgtgccccacgtccatgctaggtcagtgttcctcatggaccccatcacatgggtatcccttaccccttccccacatggaagtatgaggctctgtttggacacatgtcctcttcctgtccccccagatggtgagcctggaggaagacttgcattgggcccaatggacccaggccagtggccatcagccaggtgcccaccctggtgtgctgaagcgcgggacctacctgttgtcctggtttcctacactgagctgaggtgagcacatctgggtccctctggatgcatgcatggggcggggggtgccctggtttgggtcaatgatgagaaccttatattatcctgaagagaggtgatgacttaaaaatcatgctcaataggattacgctgaggcccagcctaggtgagaatttggaagaggatgctgggatcccaaagtcccagtaggggactttatttatttattttgggctggagccctggaggccctgaagggcatctggggggcccagccctgtctctgtgctcctccgtgaggcagcccagcctccctgtgtgggcttgctgttggtggtccagttccttggggcggggcacgtggacagctcctccttgagcccccctgctccacttgtgtctttcagtgagctcttcaacccaggcggggcaccctggcattcaccagcataggtgagtggatcctgctgccatcgtgggccatgggccaggctgggtagagtcactgagggtcagccttcgggacaggagagtttcctcagggagcgaacctgaatccccaccagggagggataggttggtcctccagaagggtggcttcctgagaaatcggacccaagggggacgccttccctggagccctgcagtgatgacggtggtccaggcaggagagggttccttcagtctcacacatagtagctcccagctgagtctaggtgttcgagtctggccttgaggactgcccaggccacctgaggggccaacagggactctgggacaccatgggggtcacataggagctctccattcatggagaaagatggatgatagggcccatggagtcgagctgtggagatttaaggattgcgcccaatgtatggccctgaatgggacagaccctgttgagtaatgagccattctatgggcctcatcgagccttgagcggggcggtgctgtttccctatgtttgagtcaaggctggactctggccggtgcctggtggtgctgaggtctggccatggactcgttggctttgggccaaggggtcagcctgctccccctggaagtccccccttccccgtggctggaagtcatcccttcccaaggggcaagtgtcgggaatggttgcctcctgaggttgcaaggcctgctatctagggtcttgtctttggaatatgctgcccatgctgcttctgagtcatggggtcacctccagggtagcggatcttgggcccagggacagaagatgccgtgtgtcccctgattagctgattgtagccctgctctgtgttcaggaggtgtgtggggcatggatgcagacccaccagagaaaactgtggcccttagaccccaggttgcaatttccattatgtgctgggatagggcatctgggtgggcacccactatgcacagagataggctatgtgactgccagggctgtagcggcatctgacatctaggccagcttccttggtttcctgcgaatgagttggtggccctggcctgtgcctagtagttctggggtgaccccgggtcgtgtgggggagccagcaggggcccagtgaccagcctgccctgtccttccagagttctgtggctaagagagcactgggtaccctgtgtccgtgatgggccagtgttccgcatgcaaacgatcacatgggtccatggagggcaagcatacttgaactgccacaccccaccttctgctcacatacaggagtgaggttgtgtttggacagctgtcctactcctgttcccctagactgtgaaatgggaggaagaattgtgttgggcccaatggccctgggccagtatccgtcagcctggtgtccagcccctggtgtgctgaagctcatgcccttcctggtgccctagtttcctgcactgagcttggtgagcccatttgggtactgctggatgcatgggtggggagggaggtgccctgggttgggtcgatgatgagaaccttatattgtcctgaagagaggtgatgacttaaaaatcattctcaaaaggattatgctgaggcccaccctaggtgacaattttggaagaggacactggaaatcaatgaggtccctggcagggccactataatttggggtggagacctggaagccctgcagggcacctcgtgggggcccaaccctgtctcttcactcccctgtgaggcagcccaagctccctctgtaggcttggtgtcggcactctgctttcctggaggcggggcattttggctgctccttcctgagcccctgttctcccctgtgtctttcagtgagctcttttgcccagaagactccctggcattgatcggcataggtgagtgtctcctgcttgggtcatgggccatgagccagaccatagggttgccgagggtcagcatttgagccatgagggtttcctcaggaggcgacctgaatccccacctgggatgggttctccaggagggcagcttccttgtgaatctgagccaagtaagatgccttctctgaagccctgcaggggtgccagttgtgcaggcaagaaagggttccctcagccccaggcagggcagcgcccagcagagactcggtggttgggttaggcctctaggatgaccaggccacatgaggggggccacaagggctctggggcacaacaggggcttcgcagggtctctgcgaccccaaagagtggtgggcgattcggcccatgggatcgggccccagattcaaagatcacaccacacccatggccctgaatggaaccgaccctgttaagcattggggcatcccaggggtgccactttgaacctggtgtggggtgccgctgtttgcctgaggttgggtcgagactagctccggccagcacctgatggtggtgcagtccggccctgagattagtgggctgtgggcccagggtgcagcctgtgtcccgctgggggtcacctcttccttgtgggcgagtggtggaagggcatcctcctgaagtgggaaggcccgctgtggaaggaactgtcctggaaatttgccatccaggctgcttctgagccatggggtcgcctccagagtggcagggtcttgggcccaaggaaaggagaggacactgtgtttccctcaattagctgagtgtggccctgctctctgtgtgggaggtgttgtgtggggcatggatagggacccaccagagacaacacatggccctcgggccccaggctgcaatttctcagtgcatgcttggagacggtcctgggcctcctccatgcccagggtcaggctgtgcaactgtcaggttagcggcggcatgtggtgtctgggcctgtctacttcgttgtccgtgagctgctggtggccctagccctttcccaggggttcaggtgcagccctggggttgtgtgggacagccagtgtgggcagtggagctgctctggaggcctgctttagggtgcagcctgggtgtcttgcccgagtgtagtgacccgcctgccgtgtcctcacggggttccctagcaggaagggccaagggtcccctgtgtctgtgacacgtgagtgtttcccatgggtcccatcaaatgggtccacggagggagagcatgagtgaactggtaccccccacccccaccctcttccccacctggaggcatgagcccctggttggacatatgtcctcctcctgtacccccagatggcagcgctggaggaggacttgtactggggccgctggccccacatcagtgtccgtcatcccggcgtccagcccctggtgtgctgaagctcaggcccttccttgtgccctagtctcctgcactgagcttggtgagcccattcggatactgctggatgcatgggtcgggagggaggtgccctgggttgggtcgatgatgagaaccttatattgtcctgaagagaggtgatgacttaaaaatcattctcaaaaggattatgctgaggcccggcctaggttagaattttggaagaggatgctgggatcctgaggtccccaggagagcccctttatttttggctggagacctggaggccctgaagggtatctggggggcccagccctgtccctatactcctctgtgaggcagcccaggctctctgtgtgggcttggtgttggcactctggttttctgggggcggttcaggttgctggttccttctgaaccattgttctccccttgattctttcagtgagctcttctgctcaggcgggtcccctggcattgaccagcataggtaagtggatcctgctgggttcatgggccatgagccagaccacatggagtgactgagggtcagccttcaggacaggaagatttcctcggggagccaacctgaatccccaccgtggagggatgtgttagtcctccaggagggtggcttcctagggaatctgaccccaggaggacacctttgctgaagccctgcaggggtgatggtggtccaggctggaaagttttccttcagtctcatgtggggcagctccctgctgacattccgtgcctgcgtctgaccttgaggactgcccgggccacatgagtggggcaacaagggctccagggtgccacggggattatgagtggggctctccatccccggagagaggtgggcaatcaggcccatgtggtcaggcttgtagggttcggtggtggggagagccaaggtttccctgggtccattaccgtcactgtttcacctggatcccatcacatgggtccatggagggagagcatgtgtgaacaggcaccccttgctccctttcccacatgagcccctggttggacatatgtcctcctcctgtccccccagatggtggccctggaggaggacttgtattggggccactggccccacgtcagtgttcgtcagcctggcatccagcccctggtgtgctgaagctcaggcccttcctgttgccctagtctcctgcactgagcttggtgagtccattcggggactgctggatgcatgggcgggtagggaggtgccctgggttgggtcgatgatgagaaccttatattgtcctgaagagaggtgatgacttaaaaatcattctcaaaaggattatgctgaggcccggcctaggttagaattttggaagaggattctcggatcctgagatccccagccaggccactgaatttttggctggagtccttgaggccctgaagggtgtctgagggctgctgaaacctgtctctgtgcttgtccgtgaggcaacccacattcgctgtgtggacttggtgttggccttcccgttctccggggatgggacatactgtcagcttgtccctgagtacccgttctcccctgtgtctttcagtgagctcttctgcccaggtggtccccctggtcttgatgggcataggtgagtacatcctgctggtgtcctggtccatgagccagggtgcgtacggttgccggaggtcacctttaggccatgtgggtttcctcagggagctgacctgaatccccactgggagggatggtttctccaggaggatgtcttccatagaaactggttccaagaaggatgccttccctgaagctgtgcaggggtgacgatggtccaggcaggaaagggtccattcaacccaatgcagtacagcttctagctgagactcggtgcacgggtgagggcttgaggactcccaggcaacatgaggggttccacaggatctccggaggccacaggtgttaagcaggaactctccatccttgaggcttgctgggggtggcgggatggcagcagggtgtgggtgatcgagtttatggattcaggccaagattcaagggtcaggccccacccattgccctgatgggaccaaccctgttgtgcaatgggctgtcccactggtgcctccttgagcctggtgtgggcagcgtggcttcaatggggttgggtcaaggctgagctctggcccgcacctggtggttggccctgggaattgtggactttgggccaagggtgcagcccgcctgcctctggaggtcatcctacccagaggtggagtggccggaagggtggcaggcatcctgtggtgaaaggcccactgttgagggtcctgtcccaccaatttgctgttcaggctgcttctaagccatgggttcacctccagagaggcgggatcttgagcccagggaaaggagagggcatcatgtgtcccctgattggctgagaatggggagagtgtttgggtggtatgtggtgcatgaatggggacccaccagagaaggcgcgtggccctgggccccaggatgcaatttccggcgtgcttatagagggcgtctgagtggacactctccatgcccaggcgcaggctatgtgactgccaggtctgcagcagtttgtggcatctgggctagcctccttgattgcttatgagctggttgatagccctggcctgtgccgaggggtcctggtgcggccctggggttgttcaggggaagccggcatgggcagtggaggtgctcttggggcctgcagtagggcacagcccaggtgttcttgcttgagcgcagtgaaccacctgccctttccttccagggttcggtagcagggagggccaagggtcccccacgtccatgacaggtcagcgttcctcctggatcccatcacatgggtacatgcagggagagcatgtgtgagccggcactccccactctcttccccgcattgcagggtgaggccctgtttggacccatcttccagctatctcaccagatggtgagcccagaggaagaccccgtggctctgggccagtgtgcgtcagccaggtccccagcccccagtgtgctgaagctcaggcccttcccaacgccctggtctcctgcactgaggtgtggtgagcacaaccaggtcccactggatgcatgcacagggagggatgtgccctaggttgggtcgatgatgagaaccttatattgtcctgaagagaggtgatgacttaaaaatcatgctcaataggattatgctgaggcccagtctaggttaaaattctggaagaggatgctgggatcccaagttcacaggcagggccactgtattttggactagagaactcgaggccctaaagggcatcttgagggggtccaacctgtctctgtgctcctccatgaggcagccctggctccctgtgtggccttggtgttggtgctctggttcccaggcgtggcatgtgggcacctccttccagagcccccattctcccctgtctctttcagtgagctcttccgcccatttgggccctctgacattgaccggcataggtgagtggatcctctttgggtcatgggtcatgagcgaggcaaagtggggtcaccatgcatctgccttcgggccatgagagtttcctaaaagtgtggacctgaattcccaccggggatgagttatccagaagggccacttccttgggaatcggacccaagaaggacgcctgtcctgaagcccagcaggggtggtggtggtccaggcaggaaagggttcattcagcaccaagcaggcagctcccatctgagacttggtgcatcggtcaggccttgaggactgcccaggacacatgaggtggccacaggggctccggggcactacagggggtctgcagagaggggtaggcgattgggtccgtgggggtcatgccgcggagtttcaaggacacccatggccctgaatgggactgaccctgttgagtaatgggccatcccaatggcacctccttgagtctggcggtgggtggtgctgtttccctggggctaggtcaaggctgagctctggctagtgcctgtggtgctgcaggctggccctagaactcatgggctttgggccatggggacagcttgtgtcatgcttggggtcaccccttcccggaggttgaatggcgggagtggtggcttcctaaggtgggaagtcctgctattgagcaacctgtcctgggaatttgccacccaggctgcttctgagacatgaggtcacctccagagtggcagcatcttgggtccaaggaaagaggagcataacatgtgtccccagattggttgagtgtggcctagctctgtgtttgggaggtgtgcagggtgtggatggggatgtatcaaagaaagtacatagccctggagccccaggctgtgatttccagtgtgtgcttggagaggggcaggagcaggctctcgactgccaggtctgcagcagcgcgtggcatccgggcaagccttctggttggccatgtgctggttggtggccctggcctgtgcccagtggtctcagggtagacctggcattgtgcagggcagccagcagggcagtggaggtgctctcaggacctgcagtagggcgcagcctggactttttgtgtgagaccagtgacccacctgcactgtccttccagggttgggtggctgggagggccaagggtggtccatgtttgtctccgtgacacatcagtgctctgcatggatcctatcacatggatatcccctacccaccttccccacatggaagcatgaggccttacttggacatgtgtcctcctgtcctagatggtgagctcggaggaagacttgcattgggcccaatggagctgggccagtttctgtcagccaggtccccagctcctgatgcactgaagctcaggcccttcctggagccctggtctcctgccctgagctgtggtgagcccatctgggtcccactggatgcatgcatgggagggggttgccctcggttgggtcgatgatgagaaccttatattttctgaagagaggtgatgacttaaaaatcatgctcaataggattacgctgaggcccaacctaggggagaattttggaagaggacgctgggatcctgaggtccgtggcagggccaccgtattttgggctggagacctcaaggccctgaagggcatcttggcagcccccagccctgtctctgcactcctccgtgaggcagcccaggctccctgtgtgggcttggtgtcagagtcccattccccaggggcggggcaggttggcggctcctccctgagtcccctttctcccttgtgtctttgagtgacttcttctgcccaggtgggccccctggcgttgaccagcataggtgagtggaacctgctggtgtcatgggccatgagccaggccatgtggggactccaggtcagccttcaggacaggagagtttcctcagggagcaggggaatccccactggggagggatgggttctcccagagggccactttcttttgaatcggacccatggaggacatcttctctgaagacctgcagaagtgatgatgtttcaagcagcaaagggttttttcagcccctgcagggcaggcagctcccagatgagattctgtgcatgggtcaggcctcaagaactgcccaggccacatgcggggtgccacacaggctgtgaggcaccacaggggtcatgcaggagctctcggtcttcaggcttgttgtgggggtggtgacagagtgatcaggcccacagggtcaggctgcagtgtttcaaggatcgcgcccacctgtggccctgaatgggaccgatgctgttgagcaatgagccatcccagtggctccacattgagcctggtgggggcgccactgtttcagtggggatgggtgaagcttgagctctggccagcacctgatggtgttgcaggctggcccagggacttgtgggctttgggccaggtcggcagcctgagttctgctgggggtcacatctttcctgagtttcagtgtcaggatgcatggcctccttaggtgggaaggcctgctgtggagggtcctgtcctgggaatttgctgcccaggctgcttctgagccatggcgtcacctccaggtggtggggtcttgggcccaaggagcagagaagacaccatgtggcccctgattggtcgagtatggcctggctctgagtttgggaggtgtgcagggcatggatggggacccaccagagaaagcacgggccaatgaagccccaggctgcgatttctgatgcgcacttggagagggcgcctggttgggcgcccaccatgcccaagggtaggctatgcaactaccaggtctgcggcagtgcctggcatcaggaccagcctcctttgttggctgtgagctggttggtggccctagcccgtgtccagtgatctctgtgcagccctggggtcatgtggagcagccagtgtaggcaggggaggttatcttgaggtgtgcagtaggcacatcccaggcatcttgcccgagcccagtgacctccctgccctgtccttccagggttcggtggcggggaggcccaagggtaccctgtgtccatgacaggtcagtatttcatgtgaatcccatcacatgggccctcctcctgtccccccagatggtgagcctggaggaagacttgcactgggccttctgtgcgccggccagaggccatcaaccaggtgcccaggtccttttgtactgaagcttgggcccttcctggcaccctggtctccttcatggagctggtgagcccatccgggttcttctggatgtatgcatggggagcggggtgcactgggttgggtcaatgatgagaaccttatattgtcctgaagagaggtgatgacttaaaaatcatgctcaataggattacgctgagtcccagcctaggtgacaattttggaagtggacactgagaatcacaaggaccctggcagggccactgtattttgggctggagacctggaggccctcaagggcctctcacagggacccaaccctgtctctgcactcctccgtgaagcacagcaggctccctgtgcggacttggtgttggcactgtttcccaggggcagggcacattggtggcttttccctgagtccccattcttgccttgtgtctttcagtgagctcttcagctcagaagggccccttcaccttgattagcctaggtgagtgcatcctgctggtgtcatgggccatgagtcaggccgcgtggggtcaccaagggtcagtctttaggacaggagggtttcctcagggagccaacctgtatttccaccggggagggatggtttctacaggagggcggcttccttgggaactggacccaagatgttgccttcctgaagccctgcagggatgacagtggtccaggcagcaaagacttccttcagccccgtgcaggagagctcccagctgagactcagtgcatgtgtcaggcctcgaggattgccgaggccacatgatgggggccacagggcctccggggcaccacgggggtcatgcaagagttctctttccctggagaggggtgcttgaatgagcctatgggattgggccgtggagattcaaggattgtacccaactatgtcccaaaatgggactgaccctgttgagctatggaccatcccatggtgcctctttgagcttggtggggggcagtgctgtttccctgggtttgggtcaaggctgagctctggccagtgcctggtgaggctgtgggccggacctgggactcgtgagctttaggccaagtcgacagcttgtgtcctgctggaggtcaccccttccccatgggtgagtggctggaagagtggaatgtgcggtgggaaggcccgctgttgatggtcctatcctgagaatttgctgcccagactctctgtgccatggggtcatgtccagggtggcagggtcttgggcctagggaaaggaaaggacaccatgtggcccaggattggccaagggtggcccggatctgtgtttgggacatgtgtggggcatggatggggacccaccagagaaagcacatggccctggtactccaggctgtgatttcaggtgtggcttggagagagtgcctgggcaggtgcccaccatgcccagcggcaggctatgcaacttccatgtccacggtggcacatggcttctgggccaggctcctcggttggccatgagcatgtcggtgaccctgtcccatgctcagtggtcctggggcagccctgggatcgtgtgaaggagaagtcagagggggcactggatgtgccctcaaggtctgcaatagcatgaagaccaggggtcttgcccaagcccagtgatccacctgccctgttttttcagggtttggtgatggggagggccgagagtgccctgtatccgtgacaggtcagtgttccacatggatcccatcacatgggtatcccttaccccattccccacctggaggtatgaggccctgtttggacacatgtcctcctcctgtccatccagatggtgagcctgaaggaagacttgcatcaggaccaatggaccctggcaagtgtccgtcagccaggtgctcagcccctggtgcactgaagctcaggcccttcctggccccttgatctcctgcactgagctgtggtgagcacatccgggtcccgctggatgtatgtgtgggcagggggggtgccctgggttgggtcaatgatgagaaccctatattgtgttgaagagaggtgatgacttaaaattaccatgctcaatgattacgctgaggcccaacctaggtgagaaatttggaggaggatgctgggatcccgagatttccggcagggccactgtattttgggctggagccctggaggccctgaaaggtatctggaggaggcccaactctgtctctgcactcctctgtgaggcagcccaggctccctgtgcgggcttggtgttggcctttctgttccccagtgaagtggcacgtgggtggctcctccctgagccccagttctccccttgtgtctttcagtgagctcttctgccaagggggggcctcctggcattgaccaacataggtgagtggatcctgctggcatcatgggcatgggttcactgagggtcagacttcaggccatgagggtttcctcagggagctgaccccaattcccatcagggagggatggtttctccaggagggcggcttccttgggaatcttacctgaggaggatgccttccctgaagatctgcaggaatgacaatggtccagatagcaaagggttccttcagccccatgcaggacatcgcccagttgagacttggtgtgcaggtcaggccttgaggactgcccaggccacatgaggcgggccagaagggctccagggtgccacgggtttcacttgggagctctcggtccccgggcatgttcctggggggggtggtgatggggtcgggccatggaggttcaaggatctcatcccacctgtgaccctgaatggggctgatcctgttgaacaatgggccatcccagtggcacgtattgagcctggtcaggggtggtgcagtttcaatggggttgggtcaaggttgagatctggccagctcctggtggtgcttcaggccagtcctgtgacccatgggctttgggctaagggggcatcccatgtcccatgggggtcacctgttctccatgtttgagtggcagtaacagtggcattctgaggtgggaaggtccactgtctagggtgttgtaccgggaatttgccaccccgccttcttagccaaggggtcacctccagggtctcgggatcttgggcccaaggaaacgagaagataccatgtggcccttgattggccgagtgtggcccagctctgtgtttgagaggtgtgggatatgaatggggtcccaccagtgaaagctcatggcccaggtccccaggctgtgatttttagtgcacacttggggagggctcctcagtgggtgcccaccacgcccagaggcaggctatgtgactgccaggtctgcaacggtgcatagcttccaggctaccctccttggttggctgggagcgggttggtggccatggcccatgcccagtggtcacagggcaaccctgggatcatgcaggggagctggtgagggcagtggaggtgctctccggaacggaagtatggctcagcccaggtatctggcccaaacccaatgaccagcctgccttgtttctcagggtttggtgatggggagggccaagggtgccctgcatctgtgatgggtctgttccacatagaacccattacaggggatcccttctccacatggagatgtgaggccctatttggacacatatcctcctcctgtccccccagatggtgagcctggaggaagatttgcattgggcccaatggccctgggccagtgtctgtcagccagtttcccagcccctggtgcactgaagctcaggcctttcctggcatcctggcctcctgcactgagctgtggtgagtatatcatggtcctgctggatgcatgtgcagggagggaaggtgccttgggttcagtcagtgtcgagaaccttatattgttctgaagagaggtggtgacttaaaaatcatgctcaataggattacgctgaggcccagcctagttgagaattttggaaggggacagtaggatcccgaagtccctggcagggcccttatattttaggctggagacttcaaggccctgaagggcacctggaggtggctcaacctgtctctgtgctcctccatgaggcagtccaggctccctctgtgggctttctgttggcactctggttccctgggccagggaacgttggtggctcctccctgagcccctgttctccccttgtgtctttcagtgagtgcttctgcccaggcaggccacttggcattgaccggtataggtgagtggatcctgctggggtcatgggtcatgagcaaggccacatgggtcgccgagggtcagccttacagccataagggttttctcagggagcccacctgaattcccaccggggaggcataggttctccaggagggcggcgttttggggaatcagacccaagggggacaccttccctgaagccctgcaagggtgatggtggtccaggcaggaaagggtttttttcagccccacacaaggcagctcctagctgagaatcggtgcttgggtcagacctcaaggattgcccaggccacatgagggcgactgagagcctccggggcaccacaggggtcacgtgggagctctcggtgcctggcgtgtgatgcacaaatggacctcttgggtttgttcatggagattcaaggatcgcaccccaccatgcccctgaatgggatggtccctcttgagaaatgggccatcccagtgggtctcctggagcctggttggggggtggcattgtttccctggggttgggtgaaggcagagttctggccggcacctggtggtgctgcaggtcagcactgggacccgtgggcgttgggccaaaggagagcccgaatcccactgggggtcaccctttttccaacatcaaatgtctggaagggtggcctcctgaggtgggaagtcctgctgttgagggacatgtcctgggaatttgtcactcaagcttcttctgagctttggtgtcacatccagggtggcagggtcttgggtccaagcaaagcagagggcaccatgtgtctcctgattggccaagtgttgctggctctgtgtgggaggtgtgcagagtatggatggggacccacgagagaaagcacgtagcactgcaactccaggctatgatttctgttgcatgcttggagagggtgcctggacaagcgtgccatgcccaggggcaggctgggcaactaccaggtcttcagcggagtgtgacatctgggccagcctccttggttggccgtgacctggttggtggcccggctctgtgcctactggccccagggcagccctgggatcatgcaggggagccattttgaacagtggaggtgctcttggggcctgtagtatggcacagcctaggtgttttgctcaagcccagtgacccacctgccctgtcctctccgggatcggtggaagggagggccaaaggtgctccgtgtacttgatgagtcagtatttcacattgaactcatcacatgtgtccatggagggtgagcaagggtgagatggcactgctgacccccttccccacgtagaggtcagtttggacacttgtcttcctcctgtctccccacatggcgaccccagaggaaaacttgtgttgggcccgctgtcactgggccaatgtcagtcagccaggtgcccagcccctggtgcgctgaagcttgggcccttctggcacccttggctcctgcactgagctgtggtgagcccatctgggtcctgctggatgcatgtgcagggagggggatacctgggttaggtcgattatgagaaccttatattgtcctgaagagaggtgatgacttaaaaatcatgcccaataggattacgctgaggcccagcctaggtgagagttttggaagaggatgctgggattctgaggtccctgacagagtaaatgtattttgggctggagaccttgaggccctgaagggcatctggtgggcccacccctatctctgtgctcctccgtgaggcagcccaggctccctgtgctggcttggtatctgggctccggatccctggttatggggcatgttggagtctccttcctgagtccccgttctcccctgtgtcttttggtgagctcttctgcccaagtggtccccgcggccttgagcggcataggtgagtgcatcctgtttcggtcatgggccatgagtgatgcagcatggggtcctcgacattcagccttcgggccactagggttttctcaggctgccaacctactccccaccagggagcaatggtttctccaggagggccacttccttgggaatctgacccaaggagcacatctttcctgaagccctgcaggggtgacagtggtccaggcagcaaagggttccttcagcccaatgtagggcagctcccagctgaaactcggtggacagctcaggcctggagtactgtccagggcacatggggaggaggggcacagggaatgtggcgcaccctagaggttacactggagttctctctccctggagaggggtgagtgattgggcccacacagtcaggctgtgaagattcaaggaatgctccacacccatggccttgaatgggaccaaccctgttgagcagtgggccatcttatggtacctccttgagtctggtgagggatggcactgtttcagtgaggttgggtcaagactgagctctggctggcacctggtgctgctgcaggccctgggacttgggggccttcagtcaagggggcagctctgatcctgctggggacaaaccttccttgaggtccagtggtgaagagtgtcctcctaaggtgggaaggcctgctgtcaagggaatttgccacccaggctgcttctgagccttggggtcacctcagggtggcagggtcttgtgcccaaggaaaggagaagacaccatctggttcctgattggctgagtgtagccgggctctgtgtgtcggagttgggcagggcatggatggggacccaccagagaaagtgtggcccaggggccccccaggcttggagagggcaccagggccggtgcccacaatgctcaggtgctggctctgggagggccaggtctgcagcggcttttggcatctggccaaccaccttggttggccaggagctggttgatggccctgtcctgtgtcctgtgccctgtgccctgtgtccctggtatggccctggggtcatgtgtgggagctggcctgagcagtggaggtgctcttggggcctgcagtagggtacagcctaggcatcttgcctgagccagcactgtcttttgctttccctgtctttccagggtttggtggcagagagggcaaaggatgccccacatctgtgttgggtcagtgttcagcatggatcccatcacatgggtatcccttagccccttccctgcattgatatgtgaggccctggttggacacatgtcctccttctgtccctctagatggtgagcctggaggaagatgtgtgggacccgcaggccgagggccagtgtctctcagccaggtgctcagcccccagtgggctgaaactctgacccttcctggcaccctgctctcctgcactgtgctgtggtgagcacatccgggttccactggatgtttgtgcagggagggggttccctgggttgggtcaatgatgagaacagggccacatgaggggggccagaggggctacagagtgccatggggtaacaagggagctcttggtccctggagtgtggtgtgtgaatgggcccatggggttgggtagcagagattcaaggatcctgctctacccatggccctgaatgtgaccatcgctgttgagcaatgggccatcccagtgggtctcctggggcctggttggggggcggagttgtttccctgggattgggtcaaggttgactctggctggcacctggtggtgttgcaggtcagccctgggactcatgggctttgggccagggacagcccgcatcccgctgggggtcacccaagtgttgtgaagggtggcctcctgagttgggaaggcccgctattgaggcatctgtactgggaatttgttgctcacgctgcatgggagccatggtatcacctccagggtggcagtcttgggaccaagcaaaggagggggcagcatgagactccggattggctatgtgtgactggctatgtgtcttggaggtatgtggagtatggatggggacccaccagagaaaacaagtgaccctgaggccccatgctgtcttttctggtgcctgcatggagagggtgcctgtacgcatgcccaccatgcccaggggcaggctgtgccactgtcaggtctgcagtagcatgtggcatctgggccagcctccttggttggctgtgacctggctggtggcccggacctctgcccagtggtcccagggcagccctagggtcatgcggaggagcagttttggccagtggaggtgcccttgggtcctgcagtcgtgcataccctgggcgttttgcctgagcccagtgacctacctgccttgtccttcccgggttcggtggcagggagagacacttgcataggtgatgagtcagtatttcgcatggatctcatcacatgtgtccatggagggggagcaagcgtgagctggcacccaacacccctttctccacatggagggtggtcacatgttctccacctgttcccctagatggtgagacttctgttgggcttgcttttcctgggccagtgtccatcagccaggtgctcagccatcggtgcgctgaagctccagcccttcctggtgccctgatctcctgcactgagctgtgatgagtacatccgggttccactggatgcatgtgcgggaaggggggtgccctgggttgggtcagtgatgagaaccttatattgtcctgaagagaggtgatgacttaaaaatcatgctcaataggattacgctgaggcccagcctgggggagaattttggaaaaggatgctgggatcccagggtccccaacagggccactgtattttggacctgggacctggtggctctgaagggcatctggaggtggcccaacctgtctctgcactctagtttccctgtgtgggcttggtgtcggtgctccagttccctgggggcagggaatgttgatggctccttcctgagtccctgttctcgcctttgtctttcagtgagctctttcacctaggagggccccttggcattgactggcataggtgagtggatcctgctggtgttatggatcatgagccagaccatatggggtccccaaggatcagcctttgggccacaagggttttctcagggagctgacctgaatttccacctgagacggaaaggttctcctggaaggcaggctttttggaatcggacccaaggaggacaccttctctgaagccctgaaggggtgatggtggtccaggcaggaaagggttccttctgcctaacataggacagtgcctagttgagactcggtgctgcagtaaggccttgaggactgcccaggctacatgaggggggccagaggggctacggggcaccacagggttaatggtgacctcttggtccccagagtgtggtgcgtgaatggacccatggtgttgggttgtggagattcaaggatagtgccccacctatggccctgaatgcaactgtccctgtttagcaatgggccatctcagtgggtctcctggagcctggtggggggcagagttgtttccttgtgactgggttaaggtagagctctggccagcacctggtggtgtggcaggtcagccctgggactcttgggcttttgaccaaggggcagcctgtatcccgctgggggtcatcctatctctgaggtcaagtgtcgtgaagggtggcctcctgaagtgggaaggctcgctgtcgagggacctgtcctaggattttattgctcaggctgcttctgagccatggtgtcacctctagggtgatggggtcttgggaacaagcaaaggggagggcaccatgttgctccggattgggcaagtgtggcccagctctgtgtgtgtgaggtgtgcagaacatggatggtgacccaccagagaaagcacatggccctgtagctctaggttgtgatttccgtgcacacttggagacagcatcttgatgtgtgcccaacacgcccaggggcagactatgcgatagccaggtctgcagcggtgtgtggcatctgggccagccacctttgttggccatgagctggctcatggccctgacccatgcccactggtgtcagggggccctggcgtcgtgtgaggagccatctgtggcagtggaggtagactcagggcctgcagtatggcgcaacccatgcattttgcctgagctcagtgacctacctgccctgttcctccagggtttggtggcagggggagccaagggtgccccacattggtgacgagttagtacttcacatggatctcataacatgtgtccgtggagggcaagcaaatgtgagcccgcacccactactgccttccccacatggaggtcagtttggacacatatcatcctgctgtcccccaaatggtgagaccgaagaagacttgccctgggccctctgttcttgggccagtgtcagtcagccaggtgcccagctctaagtgcgctgaagcttgggcctttcctggaatgctcggctcccgcactgagccagggtgagcacatccgggtactgctggatgcatgtgtggggcaggggtgcgccctgggttgggctgatgatgagaaccttatattgtcctgaaaagaggtgatgacttaacaatcatgctcaataggattacattgaagcccaggataggtaagaattagggaagatgatgcagggatcccaagatctccagctagaccacacttattttgcactggagaacttgagaacttgaagggcatctcaggggagcccaaccctgtctctgagctccttcgtgaggcagcccaggctccccttgcgggcttggtgtctgtgctccgcttctccagggacagggcaatttggtgttccttcctgaatgctccttcttccctgtgtccttcagtgagctcttctgcccaggtggggtccctagctttgagcggcataggtcagtgcatcctgttggggtcatgggccatgagtgaggcagcatggggttggtgagagtcagccttcaggccactagggttttctcagggagccaaccgattactcaccgggagggatggttcctccaggagggtcacttcttgggaatctgaccctaggagcacacatttcctgaagctcggcagggagatggtggtccaggcaggaaagggttccttcaacctaacgtagggcagttcccagctgaaactaggtgggcaggtgaggcttgaggactgcccagtccacatgaaaggggccacaggggctttggggtgccctgggagtcatgctggagttcttcccccaagagggatgggtgatagggtccacgtggtcaggctgcggagattcaaggaatgccacccacccatggccctgaatgggaccaaccctgttgagcaatgggccattttcggcatgtttcaatgcagttgggtcaaggctgagcgctggctggtgcctggtggtgctgcaggccggccctggggctcatgggctttatgccaagggggcaactcccatcccactggggtaatcccttccttgaggtccagtggtgggaagggtggcctcctgaggtgggcagacctgctgtcaagggacctgtcctgggaatttgccacctaggctgcttctgagccatggggtcacctccaggatggcggggtcttcagcccaaggaaaggagaggacaccatgtggtttctgattggctgagtgtggcctggctgtatgtgtgggaggtgtgcagggcatggatggggactcatcagagaaagaatgtggccctggaggcccccaggctttgatttctggtgtgtgcttggagtgggcaccagggtggccctaccatgcccaggggcaaggtctttgcctgccaggtctggagtggctcctggcatcaggaccaccctccttggctcaaccaaccttcagcaggttggctgccttggcccgtgccccatggtcccggtacgaccctggggttgttcgggggatctggcccaggcagtggaggtgctcttggggcccacagtagggcacagcccaggcctcttgccccagcccagtaacccacttgccctgtctttccagggttttgtggcagggaaggccaagggtgctctgcgtccatgttgggtcagtgttctgtaaggattccattacaagggtatcccctacccaccttccctacattgatacatgaggccctggttggacacatgtcctcctcctgtccctacagatggtgaccctgaagaaagacttcagttgggcctgaaggccccgggccagtgtccatcatccaggtgctcagctcccagtgcactgaagctcagacccttcctggttccctggtctcttgcactgagctctggtgagcacaactgggtgctgctggatgcatgcatggggaggggggtgccctgggttggggtggtgatgagaaccttgtattcttctgaagagaggtgatgacttaaaaaccatgctcaataggattacacttaggccgaacctaggtgagaatgttggaagaggacgttgggatcctattatccctggcagagccactgtattttgggctggagacctggaggccctgaaagggcatctggagggggcccaaccctgtctctgtgctcctgcatgagggtccccaggctccctgtccagccttggtgttggtgctctggtaccctggggatggaacaagttggtggctctttcctgagcccccattctccctttgtgtctttcagtgagcttttctgcccaggtgggcaccctggcattgattagcctccttggttgtccatgacctggctggtggcccgatcctgtgcccagtggtcccagggcagccctggcatcatacggggcagctgttttgggcagtggaggtgctctccaggcctgaagtatggcacagcctgggcattttacctgagaccagtgacctgcctgccttgtccttcctgggttcggtggcagggagggccaagggtgccctgcgtcagtgatgagtcagtattttgtgtggatctcatcacctgtccatggagggaaagcaagcatgagctggcacccaacacccccttctccgcatggagggtggtcacatgtcctccacctgtgcccccagatggtgagacttgaggaagacttccactgggcctgcttttcctgagccagtgcccatcacccaggtgctcagtccctggtgcactgaagctccagcccttcctggcgccctggtctcctgaactgagctgtggtgagcacatccgggtttcactggatgtttgtgcggggagggggttctctgggttgggtcaatgatgagaaccttatattgtcctgaagagaggtgatgacttaaaaatcatgctcaataggattacgctgaggcccagcctaggggagaattttggcagaggatgccgggatcccaagatttccgggagggccacttgtattttgggttggagacctggaggccctgaagggcgtctggaggtggcccagtgctttctttgcgctcctctgtgaggcagcccaggctccctttgtgggcttggtgtttgcgctcctcttctccagtgatggggcacgttgggggctcctccctgagtcctggttctccccttgtgtctttcagtgagctcttctgccaagcggttcccctggcattgaccaacataggtgagtggatcctgctggcatcatgggctatgagctaggccgcatgggtttgctgagggtcagacttcaggccccaagggtttcctcagggaaccgacctcaattcccaccatgtgactgccaggtttgcaacagtgcatagcttccgagctaccctccttggttggccgggagctggttggaggctgtggcccatgcctagtagtcacagggcaggcagactgccctgttttttcagggtgtggtgacggggagggccaagggtgccctgcatccatgatgggtcagggatttcaggagggatggtttctccaggagggcagcttccttgggaatcttacccaaggaggatgtcttccctgaagccctgcaggggtgacgatggtccagatagcaaaggtttccttcagccccatgcaggacatcacctagttgagatatggtatgtgggtcaggccttgaagactgcccaggccacctgaggggcccagaagggctctggggtgccacaggtgttatgtaggagctctcagtccccagacttgtttcgtggggttggtgacggggttgggttgtggaggttcaaggatttcatcccacctgtgaccctgaatggggccaaccctgttgagcaacaggccatcccaatggcacgtattgagcctggtggggtgtggtgcagtttcaatagggttgagtcaaggctgagatccatctggtgcttggtgctgctgctggccagccctgggacccgtgggctttgggctaagggggtagcccacatcctattgagggtaacccattctccgagtttgagtaacggttaacagtggcattctgaggtgggaaggcccactgtctagggtcctatactgggaatttgccaccccgggttcttctgagacaagtggtcacctccagggtcatggggtcttgggcccaaggaaaggagaagataccatgtggcccttgattggctacatgtggcccaggtctgtttgggaggtgtgtgggatgtggatggggtcccaccaatgaaagcacatggcctgggtccccaggctgtgattttcagtgcacacttggagagggtgcctcggcgggtacctaccacatccatgggcaggctatgtgactaccaggtttgcaacagtgcatagcttccaagctaccctccttggttggtcgggagctggttggaggctgtggcccatgcctagtggtcacagggcaggcagacggccctgttttttcagggtatggtgatggggagggccaagcatccatgatgagtcggtgttccacatggaacccattacgtgggtatctcttaccccttcctcatatggagatgtgaggccctatttggacacatatcctcctcctgtacccccagatggtgagcctggaggaagacttgcgttgggcccaaaggccctagaccagtgtctgtcagccaggttcccaacccccgatgcgctgaagctcaagcctttcctggcaccctggtctcctgcactgagctgtggtgagtatatcctggtcctgctggatgcatgtgcagggaggtgggtgccttgggttgggtcaatgatgagaaccttatattgttctgaagagaggtgattatttaaaaatcatgctcaataggattacgctgaggcccagcctagttgagaattttggaggaggacactgggataccgaagtcccccgcagggactctgtattttgggctggagaccttgaagccctgaagggcatctggaggtggcccaacctgtctctgtgctcctccctgaggcagcccaggctccttttgtgggcttggtgttggggctccagttccccaggtcagggaatattggtagctctttactgagcccctgttctccctttgtgtctttcagtgagctcttctgcccaggcgggccccctggaattgatgggtataggtgagtgcatcctgctggggtcatgggccatgagccaggccacgtggggtcaccaggggtcccccttctggccatgagggttttctcagggaaccgacctgaattaccactggggaggcataggttctccaggagggcggctattttgggaatcggatccaagggggacaccttccctgaagccctgtgggtgtgatggtggtccaggcaggaaagggtcccttccaccccacacagggcagctcatagctgagagttgatgctcaggtcaggcctcaaggatttcccaggccacatgagggggacagaggagctctgggtgccacgggggtcacataggagctctcagtattcggtatgtcatgcacaaatgggcctcttgggttggattgtggagattaaaggatcgcgcaccaccgtggccctgaataggaccatccttattgagcaatgggccatcccagtgagtctcctggagcctggtggaggggagggggtggcattgtttccctggggatgggtcaaggcagagctctggccagcaccttgtggcttctgcaggtcagccttgggactcatgggcattgggccaagggggagcccgcgtcccactgggggtcaccctttttccgacgtcaagtatctggaagagtggcctcctgatgtgggaaggcctgctgtcgagggacgtgtcccaggagtttgtcgctcaagtttcttctgagctttggggtcacatccagggtggcggggtcttgggcccaagcaaagcagagggcaccaagtgtctcctgattggccatgtggctgtctctgtgtgtgggaggtttacagagtatggatggggacccaccagaggaagcacgtggccctgcagcaccaggctgtgatttctgttgcacacttggagaggttgcctggacacgtgcccttcatgcccagtgacagactatgcaactaccaggtctgcagcagggtgtgacatctgggctagcctccttggttggccgccacctggctggtggcccggatctgtgcccaacagtcccagtgcagcactggggtcatgcaggggagctgttttggacagtggaggtgctctcggggcctgcaatatgatgcagcctgggcgttttgctcaagcccagtgacccacctgccctttcctttctgggttcagtggaagggagggccaacagtgtagtgcgtacttaacaagtcagtatttcacattgaactcatcacatgtgtccatggagggcaagcaaaggtgagctggcacccccgacccccttccccaaacggaggtcagtttgggcacacgtctccctcctgtctccccagatggtgaccccggaggaaaatttgtgttgggcccactatccctgggccaatgtcagtcagctaggcacccagcccccagtgcgctgaagctcaggaccttcctagtgccctcggctcctgcactgagctctggtgagtccatctgggtcctgctggatgcatgagctgggggcgggagggtgccctgggttgggtcagtgatgagaaccttatattgtcctgaagaaaggtgatgacttaaaaatcatgctcaataggattacactgaggcccagcctaggtgataattttggaagaggatgctggaattctgaggtccctgacagagcagctgtattttgggctggagaccttgaggccctgaagggcatcttgtgggcccacccctatctctgtgctcctctgtgaggcagcccaggctccctgtgctggcttggtatccgggctctgggtccctggtgacggggcatgttggaggctccttcctgagcccctgttctcccttgtcattcagtgaactcttctgcacaagtgacccccccagccttgagcggcataggtgagtgcatcctgttttggtcatgggccatgagtgatgcagcatggggtccctgacattctgcctttgggccaccagggttttctcaggctgccaacctactccccaccagggagcgatggtttctcaggagggctgcttccttgggaatctgacccaaggagcaagtctctcctgaggccctgcaggggtgacagtggtccaggctggaaagggttccttcagcccaatgtagggcagctcccagctgaaactcagtgggcaggtcaggcctcgagtattgcccaaggcacatgggggagtgaggcacgggggatacagtgcgccgtggaggtcacactggagttctcccctccctggagagggatgagtgactgggtccacacggtcaggctgtggagattcaaggcatgctccacacccatggccttgaatgggaccaaccctgttgagcaataggccatcttagtggcacctccttgagcctggtgggggacggcactgtttcaatgaggttgggtcaagagtgagctctggctggcacctggtggtgctgcaggccctgggacttgtggactttgggccaagggagcagctctgatcctgctggggacaagccttccttgaggtccagtggtgaaaagagtgtcctcctgagatggcaaggcctgctgtcgagggacctgttctaggaatttgctgcccaggctgcttctgagccttggggtcacctcagggggtggcagggtcttgagcccaagaaaggaaaagacacgatgtggttcctgattggctgagtgtgacccggctctgtgtgtcagagttgggcaggacatggattgagacccaccatagaaagcatgtgatcctggaagcccctaggcttggagagggcaccagggccagcgcccaccacgcctaggtacgatctctcggacttccaggtctgcagcggctcttggcgtctgggccagcatgcttggttggccaggggctggttggtggccctgtcttgtgccctgtgtccccggtatggccctggggttgtgtgtggtagcaggcctgggcagtggaggtgctcttggggcctgcagtagggtgctgcccaggcatcttgcccgagccaggtgacacgcttgccctgtctttccagggtttggcggcagggagggccaagggtgcccagtgtccgtgagggatcagtattcagcatggatcccatcacatgagtatcccttagccccttctctacattgatgtgtgaggccctggttagacacatttcctcctcctgtccctccagatggtaagcctggaggaagacttgtgttgggcccacaggccccaggccaatgtctgtcagccaggtgctcagcctctggtgcgctgaaactctgacccttcctggcacactggtctcctgcactgagctggggtaagcacatctgggttgcactggatgtttgtgtggggagggggttccctaggttgggtcaatgatgagaacctgatattgccctgaagagagatgatgacttaaaaatcatgttcaataggattacgctgaggcctagcctaggtgagaattttggaagcagatgctgggatcccaaggtcccttgcagggccatcgtatgttgaactggagacctggaggctctgaagggcatctggaggtcgtgcaacctgtctctgcactcctctgtgaggcagcccaggctccctgtgtggggttggtgttggtgctatggttccctgggggtggggaacattggtggctccctccagagcccctgttctcaccttgtgcctttcagattttccacctaggaggtccacctggcattgactgacataggtgagtggatcctgctggggtcatgggtcatgagccagaccatggggggatcccagagattcagtctttgggcaacagttttctcagggagcagacctgaatttccacctgggagggaagggttctcctggagggcgacttttttgggaatcggacccaaggaggatgccttccctgaagccctgccggggtgatggtggtccaggcaggaaagttccttctgctcaatgcagggcagcacccagctgagactcggtgctccggtaaggcctccagaactgcccaggtcacataaggggggccagaggggctacgaggtgccacggggtaacaggggagctcttggtccccagagtgtggtgcatgaatgggcccattccgttgggtctcagagatttaaggattgcaccacaccatggccctgaatgcaaccgtccctgttgatcaatgggccatcccatgggtctcctggagcctggtgggaggcagtgttgttttcctggggttgggtcaaggcggagctctggctggtacctggtggtgctgcaggtcagccctgggacttgtgggctttgggccaaggggcatcccgcatcccgctgggggccaccctttctccatggtcgagtgtcgtgaagggtggcctcctgagttgggaaggcttgctattgaggcacttgtactgtgaatttgttgctcaggctgcttgggagccatggtgtcacctccagggtggcagggtcttgggaccaagcaaaggagtgggcaccatgtcactgcagataggccatgtgtgactggctctgtgtctgggagatatgtggagtatgaatggggacccaccattcatagagaaagcaagtggccctgcagcccgaggctatgatttccggtgcacacttggagagggtgcctttacacccaagtaccaggctcagaggtaggctatgccactatcaggtctgcagtggcacgtggcatctgggccagcctccttggttggccatgacctggctggtggcctgggcctgtgcccagtgttcccagggtagttctagggtgctgcgggggagctgttttggctagtggaggtgctcttgggtcctgcagtacagcacagcctgggcgttttgcctgagcccagtgacctgcctgccttgcccttcccaggatcggtggtagggaagaccaggggtgcccggcataggtgatgagtcagtatttcacatggatatcatcacatgtgtccatggagggggagcaaacatgagctggcacccgccacccccttctccacatgaagggtggtcacacgttctccatctgttcctccagatggtgagacttctgtcggcctcgcttttcctgggccagtgtccatcagccaggtgctcagccccagtgcactgaagctccagcccttcctggcgccctggactgagctgtggtgagcacatccgggttccactggatgcgtatgtgggaaggggggtgccctgggttgggtcaatgatgagaaccgtatattgtcctgaagagcggtgatgacttaaaaataatgctcaataggattacgctgaggcccaccctaagtgagaaatttggtaggggatgttgggatcccgagatttctggcagggccactgtagtttgggttggaggcctggaggccctgaagggcatctggaggtggctcaactctttctctgtgctcctccgtgtagcagcccaggctccctgtgcgggcttggtgttgttgcttctgttccttgggggcagggcatgtgggtggctcctccctgagccccagttctccccttgtgtctttcagtgagctcttctgccaagggggtcctcctggcattgaccaacataggtgagtggatcctgctgctgtcatggtccgtgagccaggctgcttggggttgccaagggtcagacttcgggccatgaaggtttcctcagggagctgaccctaattcccatgagggaggcatggtttctccaggaggtcagcttccttgggaatctgtgacttgacagggttgagtcgcagaggttcaaggatctcatcccacctgtaaccctgaatggggcccaccctgttgagcaactggccatcccagtggcacatattgagcctggtggggggtggtgcagtttcaatggggttgggtcaaggctgagatatggctggtgcctggtggtgctgcagtccagccctgggatccgtgggctttgggctgagggggaagcctgcatcctattgggggtaacctgttctccaaatttgagtgattggtgggaaggcctactgtctgaggtcctgtactgggaatttgccacctcagcttcttctgagccatagggtcacctccagggtcatggggtcttgggaccaaggaaaagagaagataccatgtggcccttgattggccgagtgtagcccagctctgtgtttgggaggtgtgtgggatgtggatagggtcccacctgtgaaagcatgtggcccgggtccccaggctgtgattttcagtgcacacttggagagggcaccttggtgggtgcccaccatgtccaggggcaggctatgtgactgccaggtttgcaatggtgtgtagcttccttctaccctccttggttggctgggagtgggttggttgctgtggcccatgcccagtggtcacagggcaggcagactgccttgttttttcagggtatgctgacagggagggccatgggtgccctgcattcatgatgagtcagtgttccacatggaacccattatgtgggtatctcttattccttctacatatggagatgtgaggccctatttggacacatgtcctcctcctgtacccccaggtggtgagcctggaggaagacttgcattgggcccaatggccctggaccagtgtctgtcagccaggttcccagcccccgatgcgctgaagctcaagcctttcctggcaccctggtctcctgcactgagctgtggtgagcatatcctggtcctgctggatgcatgcgtggggaggggttgtcctaggttgggtcaatgatgagaaccttataatgttctgaagagaggtgatgacttaaaaatcatgctcaataggattacgctgaggcccagcctaggtgataattttggaagaggacactgggtcccgaagccccctgcagggcccctgtgttttgggctggagaccttgaggccctgaaaggcatctggtggacccaactctatctctgccctcctcaatgaggcagcccagcctccctgtactggcttggtatccgggctccgggtctctggggacggggcacattggaggctccttcctgagcccccattctctcctgtgtctttcagtgagctcttcggcccaagtggtccccccggccttaagcggcataggtgagtgcatcctgttttgatcatgggccatgagtgttgcagcatggggtccccgacattcagccttcaggccactaggcttttctcaggctgcaaacctactctccaccagggagcgatggtttctcaggagggccacttccttcggaatctgacccatggagcacgcctttcctgaagccctgcagaggtgacagtggtccaggcaggaaggggttccttcagccccaatgtagggcagctcccagctgaaacttggtggacagatcaggcctggagtactgcccagggcatatggggaggagggacacagggaatgtggcgcaccctagaggtcacactggagttctgtctccctggagaggggtgagtgattgggcccacatggtcaggctgtggagattcaaggaatgctccacaccgatggccttgaatgggaccaaccctattgagcaatgggccatcttagtggcacctccttgaacctggtgggggatggcactctttcaatgaggttgggtcaaggctgagctctggctggcacccagtggtgctgcaggctggccctgggacttgtgggctttgggccaagggggaagcttccatcctgctgggaacaacccttccttgaggtccagtggcaggaaggggggcttcctgaggtggaaagccctactgttgagggacctgtcctgggaatttgctgtccaagctgcttctgagccatggggtcacctctagggtggtggggtcttgagcccaaggaaaggagaggacaccatgtggttcctgattggctgagtgtggcccggctctgtgtgtcggagttgtgcagggtatggattgggacccaccagtgaaagcacatggccctggaggtccgcaggcttggagagggcaccagatctggcacccaccatgcccaggtacaggctctgggactgccaggttgcagcagctcttggcatctgggccaccctccttggttggccaggagctagttggtggccctgtcccatgccccatgtccctggtatggccatggggtcatgcagaggaaccggccctggcatggaggtgctcttgcaacatgcagtagggtgcatcccaggcatcttgcctgagccaggtgacccgcttgccctgtctctccagggtttggtggcagggagggccaagggtgccccgtgtccatgttgggtcagtgttcagcatggatcccattgcatgagtatcacttagctccttcccagcattgatatgtgaggccctggttggacacttgtcctcctgtccctccagatggtgagcctggaggaagactcgtgttgggcccacaggccccaggccagtgtacgtcagccaggtgctcagcccatggtgtgctgaagctctgacccttcctgactccgtggtctcctgcactgagctgtgatgaccatatccaggtcctgctagatgcatgcgtggggaggcagggtgccctgggttgggtcaatgatgagaaccttgtattatcttgaagagaggtgatgacttaaaaatcatgctcaataggattacactgaggcccagactaggtgagaattttggaagaggatgctgggatcctgaggtccccaacagggccaccatattttgggctggagacctggaggtcctgaagggcatctgtagggggcccaaccctgtctctgcactcctccctgaggcagcccatgctccctattcgggatcggtattggtgctccacttccctgggggcaggacacgtgggtggctactccctgagcccccgttctccccttgtgtctttcagtgagctcttccaaacaggtgggctccctagcattgaccgacagaggtgagtggatccttctgggattatgggccatgagccaggccatgtggggtccccaaggttcagcctttggatcccgagagttgtctcagacagccaacctgatttgccacctgggagagatggcttctccaggagggtgggtttttgggaattggacccaaggaggacgccttccctgaagccctactgggatgatggtggtccaggcaggaaagggttccttcacccagctgagactcggtgttccagtaaggcctcaaggacctccctgccacatgaaggggcccagaggggctacgaggcaccacaggagtgacaggggagctcttggtccccagagtgtggtacatgaatgggcccatggggttgagtcgcagagattcaaggatgctgcaccacccatggccctgaatgtgactctcctcctggagcctggtggggggtggcgttttttccctggggttcggtcaaggtggaactctggtcagtacctggtggtaatgtaggtcagccctgggactcgtgggctttgggccaacggacagcccacatccctctgggggtcaccctttctctgaggtcgagtgtcgtgaagggtggcctcctgaggtgggaaagcccaatgtcgaaggacctgtactgagaatttgttgcttaggctgcttaggatccatgttgtcacctccagggtggtgggatcttgggaccaagcaaaggagagggcaccatgtggctgccagtggctatgtgtgactggctctgtgtctgagaggtgtgtggatggggacccaccagagaaagcaagtggccctgcagccccaagatgtgatttctggtgcaggcttggagagggtgcctatacctgctcccaccacgcccaggggcaggctttgccactgcaggtctgcagtgccacgtggcatctgggccagccaccttggttggccgtgacctggctggtagcccgtgcctgtgcccagtgttcccagggctgccctggggtcttgctggggagctgttttgggcagtggaaatgctcttggggcctgcagtatggcacagcctgggggcattttgcctgagcccagtgacctgcctgccttgtccttcctgggttcggtggcagggagggccaagggtgccctacattggtgacaagtcaatattttgcatggatctcatcacgtgtccatggaggtgggggcaagcgtgagctggcacgcaccccattctccccatggagggtggtcacatgtactccacctgtgtccctagatggtgagactggaggaagacttccattgggcccacttttcatgggacagtgtccatcagccaggtgctcagcccccagtgcattgaagacccagcccatcctggcaccctagtctcctgcactgagctgtgctgagcacatctggcttccactggaagttttttttgcgaggaggggcttccctgggttgggtcaatgatgagaaccttatattgtcctgaagagaggtgatgacttaaaaatcatgctcaataggattacgctgaggcccaacctaggggagaattttggaagaggattatgggatcccaaggtccccaacaaggccactgcattttgggctagagacctggaggctcttaagagcatctggaggtggcccaacctgtctctgctccttcgtgatgcagcccaggctccctgtgtgggattggtgttggtgctccatttccctggcatggggaatgttggtggctccttcctgagctcctgttctcgccttgtgtctttcagtgagctctgccacccaggacatccccctggcattgactggcataggtgagtggatcctgctggggtcattggtcatgagccagaccatgtggagtccccaaggttcagcctttgggccacaaaggttttctcagggagcagacctgaatttcacccgggagggaagggttgtcctggagggtggcttttttgggaacctaacccaaggaggacccattccctgaagccctgcaggggtgatggtggtccaggcaggaaagggttccttctgctcaatgcagggcaacacccagctaagatgcggtgatctggtaaggcctccagaactgcccaggccatatgaggggggccagaggggctacagggtgccacaggggtaacaggggagctcttggtccttggagtgtggtgcctgaatggacccatgggattgggttgtgtagattcaaggatcacaccctacccacagccctgaatgtgactcttcctcttgagcaatgggccatctcagtgggtctcctggagcctggtcggggggtggtgttgtttccctggggttgggtctaggtggagctctggctggtacctggtggtgctgcagatcatccctgggacttttgggctttgggccaagggacagcccgcatcccgcttggggtcagcctatctccatggtcaagtgtcatgaagggtggccccctgaggtgagaaggcctactgtcaagggatctgtcccaggattttgttgctcaggctgcttctgagccatggcgtcacatccacagtggcagggtcttgggcctgagcatagcagagggcaccatgtcgttctggattggccaagtatggcctagctctgtgtgcgggaggtgtgcagagcatggacggtgacccaccagagaaagcacgtggccctgcatcccaggctgtgatttccaatgcacacttggagagggtgtcttgatttgtgcccaccatgcccaggggcagactacgtgatagccaggtctgcagcctgagccacgtgtggcatctgggccagccaccttggttggccgtgagctggctggtggccttggcctgtggccagtggtgccagggcggccctggggtcgtgtgggggagccatgttgggcagtggaggtgctgtcagggcctgcagtacagtgcagcctgggcatttggcctgagcccagtcacccgcctgctctgttcctccagggtttggtggcggggagggccaagggtgccccgcatccgtgacgactcagtaattcacatggatcacatcacatttttccttggagggcaagcaaatgtgagcccccaccccccactgccttccccacatggaggtcattttggacacatatcctcctctagtccccctagatggtgagactggaggaagacttgcattatgcccgctgttcctgggccagtgtcagtcagccaggttcccagctccaagtgtgctgaagctcaggcccttcctggcaccctcagctcctgcactgagctggggttacatccgggttccactgtttgcatgcaaagggaggggtgtaccctgggttgggctgatgatgagaaccttatattgtcctgaaaaaaggtgatgacttaaacatcatgcttaatagtattatgctgaagcccaagctaggtgagaattttggaagatgaggctgggatcctgagatccccggcagggccacacttattttgggctggaaaatttcaagacctgaagcgcatcttgtgggggggcaatcctgtctctgtgcttctccgtgaggcagcccaggctcccgttgcgggcttggtgcccatgcttcgcttccccaggggtggggcaatttggcatcctcttcctgagccctccttcttccctgtgtctttcagtaagttcttcttcccaggtggggcccctggctttgagcggcatgggtcagagcatcctgtcagggtcatgggccatgagtgaggcagcgtcggttcgtcgagagtcagcctttgggccactggggttttctcagggagccaacaggttacccatcaggagggatggttcctccaggagggtcgcttccttgggaatctgactctaggagcatgcatttcctgaagctctgcagggtgatggtggtccaggcgggaaagggttccttcagcccaacataatgcagttcccagctgaaactcggtggcagatcaggctcaaggactgctcgggccacatgatgggggccacaggggatttggggtgccctgggggtcatgctggagttcttgccccaagaggggtgggtgatagggcccatgcgatcaggctgcggagattcaaggaatgctacccacccatggccctgaatgggactgaccctgttgaacaatgggccattttaatggtgcctccttgagcctggtaggtagtggcattgtttcaatgcggttgggtcaaggctgaactctggctggtgcccggtggtgcccacatgggctttgggccaagggggcagctcatatccctctggggtcaccccttccttgagattcagtggcaggaagggtgttctcctgaggtggaagacctgctgtcaagggacttgtcctgggaatttgccacctaggctgcttctgagccatggagtcacctccagggtggcagggtcttgagcccagggaaaggagacaccatatggtttctgactgggagtgtggcctggatctgtgtgtgggaggtgtgcagggcatggatggggacccatcagagaaagcatgtggccctgtaggcccccaggctttgatttctggtgtgtgcttgcagtgggcaccagggcagccctaccatgcccaggggcaggctctgtgactgccaggtctggagtggctcctggcatgaagaccacgctccttggttggccatgagcaggttggttgccctagcctgtgccctgtggtcctggtgcagccctggggttgtttggggagacagcaccggcagtggaggtgctctcaaggcctgcagtagggcgcagcccaggtgtcttgcccgagcccagtaacccacttgccctgtctttccagggtttggtggcagggagggccaactgtgccccgcatctgaaatggatcagtgttctgcatggatcccatcacaagggtatcccctacccaacttctgtgcattgttatgtgaggccctggttggacacatgtcctcctcctgtccctgcagatgctgaccctggaggaagacttgtgtcgggcccccaggccccaggccagtgtccatcagccaggtgctcagctcccagtgcgctgaagctcagacccttcctggcaccctggtgtccagcactgagctgtggtgagcccatccgggtcctgctggatgcatgaatggggaggggcctgcccagagttgggtcaatgatgagaaccttacattgtcctgaagagagatgatgacttaaaaatcatgctcaataggattacgctgaggcccagcctaggtgagaattttggaagaggacggctgggatcctgagatcccagtcagggtcactgtattttgggctggagacctggaggccctaaagggcatctggaagggggcccagccctgtctctgtgctcctccgtgaggcaacccacactccctgtgtgggcttggtgttggtgctctggttccccagggacagggcgggttggtggctccttcctgagcccctattctccctttgtgtctttcagtgagcttttccacccaggtgggccccctggcattgaccgacataggtgagtgcatcctactgggataatgggccactagatagtctgtgtggggttgctgaggtttagcctttgggccacaagggttttctcaggcagccaacctgaattcccacctgggagagatgggttctccaggaggcagcttttttgggaatcagacccaaggaggacaccttccctgaagccctgcaggggtgatggtggtccaggcaggaaagggttccttctgcccaactcgaggcccaatgcagggcagtgcccccctgagaattggtgctctggtaagggctcgaggactgcccaggccacatgaaggaggtcagaggggctatggggaaccatgggggcaacaggggagctcttggcccccggagtgtggtacatgaatgggcccatggggttgggtcacggagattcaaggattgcatctcacccacggccctgaatgcgaccatccctgttgagcaatgggccatcccagtgggtctcctggggcctggtgtggggtggcattgttttcctggggttgggtcaaggcggagctctgactggtacctgatggtgctgcaggtcagccctgggactcgtgggctttgggccaagaggcagcccgcatcctgctgggggtcgccttttctccgaggttgagtgtcgtgaaggatggcctcctgaggtgggaaggcccactgtcaaggcacctagactaggaattgttcctcaggctgcttgggagccatggtgtcacctccagggtggcgggatcttgggactaagcaaaggaggggacactacgtggctcccaattggccatgtgtggctggctctgtgcctgggaagtgtgtggagtatggatggggacccaccagagaaagcaagtggccctgcagtcccagaatgtaatttctggtgtaggcttggagagggtgcctatatgcatgcccaccatgcccaggagcaggctatgccacttcagggtctgcaggggcacctggcatatgggccagcctccttcgttggctgtgacctgggtggtggcctgtgcttgtgcccagtggtcccagggtagccctggggtcgtgcaggggagccgttttgggcagtggatgtgctctcgggtcctacagtacagcacagcctgggtgttttgctcaagcccagtgacctgcctgccttgtccttcccgggttcagtggcagggagagccaagggtgccccacattggtgacgagtcagtattttgcatggatctcatcacacgtgaccatgaaggacgagcaagcatgagctggcaccagccacccccttctccgcgtggagggtggtcacatgtcctccacctgtgcccccagatgatgagactggaggaagacttccattgggcccacttttcctgggccagtgtccatcagccaggtgctcagcccctggtgtactgaagctccagcctttcctggtgccccagtcttctgcactaagctgtggtgagcacatccgggttccactggatttttgtgcggggagggggttttctacgttgggtcaatgatgagaatcttatattgtcctgaagagaggtgatgacttaaaaatcatgctcaataggattacgctgaggcccagcctaggtgagaattttggaaggggattatgggatgctgaggtcctcagcaaggccactgtattttgggctagagacctggaggctctgaagggcatctggaggtggcccaacctgtctctgcgctcctccatgaggcagcccaggctccctgtgcagggttggtgttggtgctccggttctctggtgtggggaatgttggtggctccttcctgagccctcattctcaccttgtgtctttcagtgagctcttccacccaggagggccccttggcattgactggcataggtgagtggatcctgctggggtcattggtcatgagctagaccgtgtggggtccccgaggttcagccttcagtccacaagggttttctcggggagcagacctgaatttccacctgggagggaagggttctcctggagggtagtttttttgggaatctagcccaaggaggatgccttccctgaagccctgcaagggtgatggtggtccaggcaggagagggttccttctgcccaatgcaggacagctcccagttgagactgagtgctccagtaaggtctccaggactgcccaggccacatgaaggaggccagaggggctatggagcaccactggggtaataggggagctcttggtccctggagtgtggtgtgtgaatggggtttggtcacggagattcaaggatcacaccccacccatggccctgaaagtgaccatccctattgagcaatgggccatcccaccgggtctcctggagtctggtgcagggcgacgttttttccctggggttgggtcaaggtggagctctggtacctggtcatgctgcaggtcagccttgggactcgtaagctttgggccaagggacagctggcatcctgctggggggtcaccctatctctggggtcgaatgtcacgaagggtggcctcctgaggtgggaaggcccattgtcgagggacctgtcccaggattttgttgctcaggcttcttctgagccatggtatcacctccagggtgacagggtcttgggcccaagcaaaggagagggcaccatgtcgctctgagttggccaagtgtagcctagctctgtggtgggaggtgtgcagagcatggctggtgacccaccagagaaagcacgtggccctgcagccccaagctgtgatttccagtacatgcttagagagggcatcttgatgtgagcccaccacacccaggggcagactacgtgactgccaggactgcagtggcacatggcatctgggccagccttcttggttggccatgacctagctaatggccctggcccgtgccttggggtcatgcaggggagccctcttggacagtggaggtcctctcagggcctgcaatatggcgcaggctgggcatttggcccgagcccagtgacctacctgccctgtccttccagggttgggtggcagggagggacaagggtgccccatgtcagtgacaagtcagtatttcacatggatctcatcacatgtgcccatggaggacgagcaagcgggaactggcacccgctacttccttccctacatagaggccattttggacacatgttctccacctctctcccagatggtgagacgggaggaagacttgtgttgggcctgctgttcctgggccagtggccatcagcctgttgcccagcccctgaggcgctgaagctcaggcccttcctcacaccctggtctcctgcactagctgtggtgagcacatccgggtcccgctggatgcatgcaagaggtggttggtctcgtgggttgggtcgatgatgagaaccttatattttcctgaagagaggtgatgacttaaaaatcatgctcaataggattacgctgaggcccagcctaggtgagaactttggaagaggatgctgggatcctgagatcccaggcagggccactatattttggggtggagaactcaaggccctgaagggcctctcagggggtgccaccctgtctctgtgcccctctgtaaggcagcccaggctccctgtgtgggcttggtgtctggtctctggttccccgggggcggggcatgttggtggctccttcctgagcccgctttctcccccatgtctttcagtgagctcttctgcccaggtggggcccatggccttacacgacataggtgagtgtatcctgttggggtcatgggccatgaatgaggcagcatggggccatttagggtcagccttcgggccactagagttttctcagggtgcgaccggggagggaacatttctccagtagggtcacttccttggaaatctgatcctaggagcacgcatttcttgaagtcctgcaaaggtgatggtggtccagacaggagagggttccttcagcccaacatagcgcagctcccagctgaaactcggaaggctggtcaggcctcgaggactgcccaggccacatgaggtgggcaacaggggctctggggcaacctgggggtcacgctggagttctccctctctggacagtggtgggtgattgggcccacgcagacaggccccggagattcaggactgcaccccatccatggccctgaatgggaccgaccctgttgagtaatgggccatctcagtggtacctccttgagcctggtagggggagacactgtttcaatgcagttgaatcaaggctgagctctggctggtgcctggtggtgctgcaggcagccctgagggttgtggtctttgggacaaggggtagctcacatcccactggggtcaccccttccttgagattcagtggccaaaagggtgtcctcctgagatgggaagtcctgctgtcgagggacctgttctgggaatttgccacacaggctgcttctgagccacggggtcacctccagggtggtagggtcttgatcccaaggaaaggagaggacaccatgtggtttcttattgaccaagtgtggcctggctttgtgtgtgggaggtgtaacgcaagatgaggacccaccagagaaagcacgtggctctggaggcccccagggtttgatttccggtgtgtgcttggagagggcaccaggttgggcacccaccacgcccagggcaggctctgcgactgccaggtctgcattggctcctggtgtcagggccagactcattggttggccatgagcaggttggttgccctgacccatccccatggtcccagtgtggccctggggtttttcaggggagccggctcaagcagtggaggtgcgcttagggcctgcagtagggaacagcccaggcatcttgcctgagcccagtaacctgcttgccttgtctttccagggtttggtggccgggagggccaatgatgctctgcgtctgtgttggatcagtgttcttcatggattccatcacgtgggtatcccctacccaccttccccttgctcatacgtgaggccctggttggacacatgtccttctcctgtcaccccagatggtgagccttgaggaagacttgtattgggcccccacaggccccaggccagtgtccgtcagcctggtgctcacccccagtgtgctgaagctcagaccctccgtggcaccctggtctcctgcactgagctgtggtgagcacattcaggttccgctggatgcatgcatggagaggggcttgcccttggttgggtcagtgatgagaaccttctattgtcctgaagagaggtgatgacttaaaaatcatgctcaataggattacgctgaggcccaacctaggtgagtatgttggaagaagacactgggatcccgagatctccaacagggcactgtattttgggttggagacctggaggccctgaagggcatctggaaggaggcccaaccctgtctctgtgctcttccttggggcagcccaggctacctctgcgggcttggtgttggtgctccagttccctggggccagggaacattgctggctccttcctgagcccccattcctcccttgtgtctttcagtgaacttttcctcccagatgggccccctggcattgactggcataggtgagtgcatcctgctggggtcatgggccatcagccaggccatgtggggtcgctgaggttcagcctttgggccacaagggttttctcaggcagccgacctgaattcccacctgggagagacgggttctccaggagggcagcttttttgggaattagacccaaggaggatacctgaagccctgcaggggtgacggtggtccaggcaggaaagggttccatcagcccgggcaaggcagctcctagctgacactcggtgttcgggtcagtccttgaggactgcctgaacacgagggggtccagaggggctctgggtgccacgggggtcacatgggagctctcagtccctagagtgtggtgtgtgaatggacccttagggttaggtcttggagataaaaggattgtgctccacccatggcctggaatgtgaccgtccctgttgagtaatgggccattccagtgggtctcctggagcctgatgggaggtggcgttgtcttcctggggttgagtcaaggcagagctctggcccatacctggttgtgctgcaggtcagccctgggactcgtgggctttgggccgaggggcagcccgcatcccgctggagattaccctatctctgagatcaagcgtcatagagggtgacctcctgagaagggaaggcccactgtcgagggacctttcctaggattttgttgctcaggctgcttggaatccattgtgtcacctccagggtgatggaggtttgggcccaagcaatggagagggcaccatgtgtctcctgattgttcaagtgtgtcggagatatgcggggtatggatggtggcccaccaaagaaagcatgtgactcaagctgtgatttccagtgcatgcttagagagggcgcctgtatgcgtgccccacatgcccggggtaggctatgcaactgccaggtctgcagtggcgcatggcatcttggccagccttcttggttggccatgacctggctaatgaccctggcctgtgcccagtgatcccagggaagccctggtgtcatgcagcggaggcctcttgggcagtggaggtgctcttaaagcctgcagcatggcacggcctgggcatttatcccaagcccaatgaactacctgccctgtccttccagggttcggtggcaggcagggccaagggtgccccgtgttggtgacaagtcagtatttcacatggctctcatcacatgtgtccgtggaagataagcaagtgtgaactggcacgtcctacctccttccctacatggaggtaactttggacacatgttctccacctctctcccagatggtgagaccggaggaagacttgcattgggcctgttgttcctgggccagtggccatcagcctgttgcccagcccctgatgcgctgaagctcgggcccttcctcgcgccctggtctcctgcactgagctgtggtgagcacatccgggtcctgctggatgcatgcacgaggtgattgatcccctcagttgggtcgatgatgagaaccttatattgttctgaagagaggtgatgacttaaaaatcatgctcaataggattacgctgaggcccagcctaggtgagaattttggaagaggatgctgggatcccgagatccctggcagggccactatattttgggctggagaacttgaggccctgaagggcatctcaggggggtccaaccctatctctgtgcccctccatgaggcagcccaggctccctgtgtgggcatggtgtccgggctctggttccctgggggtggggcatgttggtggctccttcctgagcctgctttctcccccatgtctttcagtgagctcttctgcccaggtgaggcccatggccttaagcggcataggtgagtgtatcctgttggggtcatgggccatgaatgaggcagcatggggccatttatggtcagccttcgggccactagggttttctcagggtgcgaccggggagggaatgtttctccagtagggtcacttccttgggaatctgaccctaggagcatgcatttcgtgaagccctgcaaaggtgatggtggtcccggcaggaaagggttccttcagcccaacatagagcagctcccagctgaaactcagcgggctggtcaggcctcgaggactgcccaggccacatgaggtgggcaacaggggctctggggcaacctgggggtcacgctggagttctccctctctggacagtggtgggtgattgggcccacgcagacaggccccggagattcaggactgcaccccatccatggccctgaatgggaccgaccctgttgagtaatgggccatctcagtggtacctccttgagcctggtagggggaggcactgtttcaatgcagttgaatcaaggctgagctctggctggtgcctggtggtgctgcaggcagccctgggggttgtggtctttgggacaaggggccagctcacgtccctctggggtctccccttccttgagattcagtggccgaaaggatgtcctcctgaggtgggaagtcctgctgtcgagggacctgttctgggaatttgccacacaggctgcttctgagccacggggtcacctccagggtggtagggtcttgatcccaaggaaaggagaggacaccatgtggtttcttattgaccaagtgggacctggctctgtgtgtgggaggtgtagggcaagatgaggacccaccagagaaagtacgtggccctggaggcccccaggctttgatttctggtgtgtgcttggagagggcaccagggtgggcacccaccatgcccagggtaggctctgcaatggccaggtctgcattggctcctggtgttagggccagactcgctggttggccatgagcaggttggttgccctcacccgtccccatagtcccagtgcggccctggggttgttcgggggagccggcccgagcagtggaggtgctgttggggcctgcagtagggcatcttgccccagcccagtgacccaccttccctgtctttccaaggtttggtggccagcagggccaatggtgccctgtgtctgtgatgagtcagtgttcttcatggattccatcacatgggtatcccctacccacattcccctcgctcatatgtgaggccctggttggacacatgtccttctcctgtcaccaccccagatggtgagcctggaggaagacttgtattgggaccctacaggccccaggccagtgtctgtcagcctggtgctcatcccccagtgcgctgaagctcagaccctccctggcaccctggtctcctgcactgagctgtggtgagcacatccaggttctgctggatgcatgcatggggagggccttgattgggtcaatgatgagaaccttatattgtcctgaagagaggtgatgacttaaaaatcatgctcaataggattacgctgaggcccaggctaggtgagaattttggaagggagcgctgggatgccaagatccccggcagggccactagccactgtattttatactgaagaacttgaggccccaaagggcatctcaggggtcctagccctgtctctgtgcccctccgtgaggcagcccaggctccctgtgttgacttggtgtccaggctctgcttcctggggatagggcatgttggcagctccttcctgagcccacgttctcccctgtgtcttctattgagctcttctgcccaggtggggcccatgcccttaagcagtataggtgagtgtatcctgttgcggtcatgggccataaatgaggcagtgtggggtcatcgagggtcagccttcaggccactagcgttttctccaggtgcccccggggagggaacattgctccagtagggtcacttccttgggaatctgaccctaggagcacgcatttcctgaagccctgcaaaggtgatggtggtccaggcaggaaagcgttccttcagcccaacatacagcagctcccagctgaaatttggtgggctcgtcaggccttgaggactgcccaggcttcatgatgggggacacagaagctctggggctccctggggctcacactggagttctccctccctgaagagtggtgggtgattgggcccacagtcaggtggcggagattcaaggaatgcccccacccctggccctgaatgggaccaactctgttgagtaatgggccatcttaatggcgcctccttgagcctgttgggggtgggttgctgtttcaataaggttgagtcaaagctgagctctgactgggcgcctggtggtactgcaggccggcccttccttgggccaagggggcagcttgtgtcccgctggtgtcatcccttccttgaggtccagtggtggaaagggtagcctcctatggtgggaaggcctgctgctcagggacctgtcctggaaatttgccatccaggctgcttctgagccatggggtcacctccagggtagtggggtcttgagtccaagaaaaggagaggacaccatgtggttcctgattggccaaggctccttggttggccaggagcaggttggttgccctggcccatgccccatggtcctggtgtggccctggggttgttcaggggagctggcccaggccgtgaaggtgctctcagggcctgcagtagagtgcagcccaggcatcttgccccagcccagtgacccacttaccctgtctttctaaggtttggtggccaggagggccaatggtgccttgtgcccatgttgggtcagtgttctgcatggatccccatcatatgggtattccctacccaccctccctgcactgatatgtgaggccctggttggacacatgtcctcctcctgtcccttcagatggtgagtctggaggaagacttgtgttggacccccacaggccccaggccagtgtccatcagcctggtgctaatcccccagtgctctggagtttggaccctccctggcaccctggtctcctgcactgagctgtggtgagcacatggatgcatgcttggggtgggggttgcccttggttgggtcaatgatgagaaccttatattgtcctgaagagcggtgatgacttaaaaatcatgctcaataggattacgctgaggcccagcctaggtgagaattttggaagaggacactgggctccccggaatggccactgtattttgcgctggacacctgcaggccctgagggccatctggaaggtccaaccctgtctctctgctcctccaggaggcagcccaggctccctgagggggcttggtgtcgggctcctgttccccggggttggggccggttggtggctccttcctgagcccccattctccccttgtgtctttcagtgagctcttccacccgggcgggcccccggcattgactggcataggtgagtggatcctgcttgtgtcatgggccatgaaccggtccatgtggggtcaccaagggtcagcctttgggataagagggtttcctcagggaaccaacctgaattcccatcagagaggtatgggttctccaggagggccgcttttttgggaattggacccaaggaggataacttccctgatctctgcaggagtgacggtggtccaggcaggaaagagttccttcagccccacccagcgcagcgttctgttgagactcagtgctcaggtcaggcctggaggatttctcaggccatctgagggggttagaggggagctctttgtccatggagtgtggtgcttgaatctgcccttggggttgggtcatggagattcaaggatggtgcctcacccatggccctgattggaattgtccattgagaaatacgccattccagtgggcctcctggagcctgatggggggtggtgtttttttccctggggttgagtcgttgatggggactcaccatagaaagcatgtggctctggaggcccccaggctttgatttccagtgcctgcttggagtgggcaccagggccggcacccaccatgcccaagggcaggctctgcgactgccaggtctgcattggctcctggcatcaggaccagcctccttggttggccatcagctgcttggttgccctggcccatgccccgtggtcctggtgtggccctggggtggttgagtggagctggcccaggcagtggaggtgctcttggggcctgcagtagggtgcagcccaggcatcttgcctgatcccagtgacctgcttgccctgtctttccaggattttgtggcagggagggccaagggtgccctgcatccgtgatgggtcagtgttccacgtggatcccattacgtgggtccatagaggatgagcatgcgtgagccagcgcccccttcccacttcttctcatggagctgtgaggccctgtgtggacagctgtcttcctcttgtcccaccaggtggtgagcccggaggaggacttgcgttcggcccgctggtcccagtgtgtccggaattggtgggttcttggtctcactgacttcaagaatgaagctgcggaccctcgctgtgagtgttacagctcttaaggtggcatgtctggagtttgttccttctgatgttcggatgtgttcggagtttcttccttctggtgggtttgtggtctcgctggcttcaggagtgaagctgcagaccttcgcggtgagtgttacagctcataaaagcagtgtggacccaaagagtgagcagtagcaagatttattgcaaagagtgaaagaacaaagcttccacagtttggaaggggacccaagtgggttgccactgctggctggggcagcctgcttttattctcttatctggccccacacacatcctgctgattggtagagctgagtgatctgttttgacagggcgctgattggtgcgtttacaatccctgagctagacacaaaggttctccatgtccccactagattagctagatacagagtgttgacacaaaggttctccaagtccccaccggagtagctagatacagagtgtctattggtgcattcacaaaccctgagcttgacacagagtgctgattggtgtgtttgcaaaccttgagccagatacagagcgcggattggtgtatttacagtccctgagctagacataaaggttctccaaggccccaccagagaagctagatacagagtgtcgattggtgcattcacaaaccctgagctagacacagggtgctgattggtgtgtttacaaaccttgagctagatacagagtgccgattggtgtatttacaatccctgagctagacataaaggttctccaaggccccaccagactcaggagcccagctgtcttcacccagtggatcccgcactggggctgcaggtggagctgcctgccagtcctgcgccatgcgcccgcactcctcagcccttgtgtggttgatgggactgggcaccgtggagcagggggcggcactcgtcggggaggctctggctgcacaggagcccatggagggggtgggaggctcaggcatggcaggctgcaggtcccgagccctgccccgagggaaggcagctaaggcccggtgagaaatcaagtgcagcgccggtgggctggcactgctgggggacccagtataccctctgcagctgctggcccgggtgctaagcccctcattgcctggggccggcagggccggcccgctgctccgagtgtggggcccgccaagcccacacccacccggaactccagctggcccacaagcgccccgcgcagccccggttcccacttgcgcctctccctccacacctccctgcaagctgagggagcaggctccggccttggccagcccagaaaggggctcccacagtgcagcagtgggctgaagggctcctcaagtgccaccaaagtgggagcccaggcagaggaggcgccaagagcaagtgagggctgtgaggactgccagcacgctgtcacctttcatcaggacagtgtctgtcagccaggtgcacagcccttggtgtgctggagcttgggcttttcttggcagcctggtgtcctgcattgagcggtggtgagcttgtccaggtcccgctggttacctgcacggtgacgggggtgccctcggttaggttgatgatgagaaccttattttgtctcgaggagaggttatgtgatgggtgttgtggcagctctttgtatttcattttcttcagtgctttttgtgtgttctctttgtattttttaccgctttgtgtattttactttcacaaaggcagcagcaaatgttttattggtggtggtatttttcatttttatttacttcctaatttgatagtgttttagttggaatacacagtctcattgtagttgttcagaaatatgctttttttctgtacattatatgattgtgcataatttttgccagttttttttttaattggggactacagttgaatgcactgcctatctcctactttactgaaacagattgtatggaaatctaaagacgagaaagtagacaagcacagcagaggacatttattttgatataaccacagaaattcattgatatgaccttatcatattgatggtttttcaaagaaatataaaatctttcgataatggattgtctcagttgcgtttctccttatatcatgttttgccttcaatacaaattgcaatgcttagaaatttaaagaacaccttctgaagtggaagatctagctaaagaattagattggtattggctgaaatgttgcagtaatcacatgatagggttaatacaacatgagttacatgctgagtgctctaaggtagaaagtaggtaacaaggaataacaggtaggtaatgtaagtcgggagaaggaaactctaggacagaatcattagaaaaggcttgacgtcaacagcagtgtatagaatttacagtgtatagaatttacagtgcatagaatttacaataagtgcctttttttgtgctcatcaatgctcttgcttatattgtaggaggagttagttcccttgaagaaatatcaatacaaatttccaaattgcaatgcagagggaaaaaagaatgagaaagtaaaaaatatccaagaactctggaagcatttcaaaaagtgtaaaaatgcatagtgacaatgtcaggagaataaggagataaaggaaaagaaatatttgacacaacaatgacttgagcactttctaaaattaatgatggacagaaacccacatgttcaggaagctcagagagcactctgcagaataaaaatattttacaaatcgacacctttgcatttcatatttaaagtccagaaaatcatagactaagggaaaagcttgataggagcaataggaagaaaaccatcttacctatggagcaacaagaataaaaattgctttgaaattatcttcagaatccatgaaagcaagaagtgagtcagggtgaaatatttagtgttaaaagtaagaaacaaaaaaaagtaccaactttgaattttctgctcatcaaaattattcttcaaaagtgaaggagaaatactctctgagaccaacaaaaattgctagaacttcttgccactacaccaaccttttaataaacgtaacaagaaattcttcagaaaggataaaaatgacataggtcggaaaatctaatttacataaagaaatgaaaagcattggagaagaaatatatgaagaaaaattaaatatatatgtattttttgattcataattgatctttcaacaatttgttcaaaataataacaagattatatttggtgattataggttatggaaaagtgaaatgaatgacagcaatattataagtcatccggttccaagatggccgaataggaacagctccagtttacagctcccagtgtgagtgacgcagaagacagttgatttctgcatttccaactgacgtaccaggttcatctcactggggcttgttggacagtgggtgcagcccatggagtgtaagccgaagcaggacgaggcatcacctcacctgggaagtgcaagaggtcagggaattccctttcctagccaagggaagcgtgacagatggtacctggaaaattgggacactcccaccctaatactgtgcttttccaactgtcttagcaaacggcacaccaggagattatatcccgtgcctggcttggagggtcccacatccacggagccttgctcactgctagcacagtagtctgagatcaaactgcaaggcagcagtgaggctgggggaggggcatccaccattgctgaggcttgagtaggtaaacaaagcggctgggaagctcgaactgggtggagcccaccacagctcaaggaggcctgcctgcttccgtagactccacctctaggggcagggcatagcagaacaaaaggcaacagaaacttctgcagacttaaacatccctgacagctttgaagagagtagtggttctcccagtacagagtttcagatctgagaacagacaggctgcctccttaaatgggtccctgacccccaagtagcctaactgagagacacctcccagtaggggctgactgatacctcatacagctgggtgcccctctgagacgaagcttccagaggaaggatcaggcagcaacatttgccgttctgcaatatttgctgttttgcagcctccactggtgatacccaagcaaacagggtctggagtggacttccagcaaactccaacagacctgcagctgaggatcctgactgttagaaggaaaactaacaaagagaaaggacatccacaccaaaaccccatctgtacgtcaccatcatcaaagaccaaaggtagatgaaaccacaaagatggggagaaaccagagcagaaaaactgaaaattctaaaaatcagagcacctcttctcctccaaaggaatgcagctccctgccagcaatggaacaaagctggacggagaatgactttgacgagctgacagaagtaggcttcagatgatcgctaataacaaacttctctgagctaaaggatgaggttcaaacccatcgcaaagaagctaaaaaccttgaaaaaagattagatgagtggctaactagaataaacagcatagagaagaccttaaatgacctgatggagctgaaaccatggcacaagaactacgtcacacatgcacaagcttcagtagccgatttgatcaagtggaagaaagggtatcagtgattcaagatcaaatgaatgaaatgaagcaagaagagaagtttagagaaaaaagagtaaaaagaaacaaagcctaaaaaagtaaaaaagtaaaacaaagtaaaaaagaaacatgggactatgtgaaaacaccaaatctacgtctgattggtgtacttgaaagtgatggggagaatggaaccaagttggaaaacactctgcaggatattatccaggagaactcccccaacctaggaaggcaagccaacattcaagttcagaaaatacagagaatgccacaaagatactccttgagaagcgtaactccaagacacataattgacagatacaccaaagttgaaatgaaggaaaaaatattaagggaagccagagagaaaggtcaagttacccacaaagggaagcccatcaaactaacagcaaatctctcagcagaaactctacaagccagaagagagtgggggccaatattcaacattcttaaatgaaagaattttcaacccagaatttcatatccagccaaactaagcttcataattgaaggagaaataaaatactttacagacaagtaaatgctgagagattttgtcaccaccaggcctgccctacaagagctcctgaaggaagcactaagcatggaaaggaacaaccagtaccagccactgcaaaaacatgccaaattgtaaagatcactgatgctaggaagaaactgcgtcaactaacgagcaaaataaccagctaacatcacaatgacaggatcacattcacacataacaatattaaccttaaatgtaaatgggctaaattctccaattaaaagacacagactggcaaattggataaagagtcaagacccatcagtgtgctgtattcaggagacccatctcatgtgcagagacacacataggctccaaataaagggatggaggaagatctaccaagcaaatggaaaacaaaaaaaagcaggggttgcaatcctagtctctgatgaaacagactttaaaccaacaaagatcaaaagagacaaagaaggccattatgtaatagtaaaggggtcaattcaacaacaagagctaactatcctaaatatacatgcacccaatacaggagcacccagattcataaagtaagtccttacagacctacaaagagacttagactcccacacaataataatgggagactttaacaccccactgtcaacattagacagatcaacaagacagaaagttaacaaggatatccaggaattgaactcagctctacaccaagcagacctaatagacatctacagaactctccaccccaaatcaacagaatgtacattcttctcagcaccacatcgcacttattccaaaattgaccacatagttggaagtaaagcactcctcagcgaatgtaaaagaatagaaattataacaaactgtctctcagaccacagtgcaatcaaactagaactcaggattaagaaactcactcaaaaccactcaactacatggaaactgaaaaatctgctcctgaatgactactgggtacataatgaaatgaaggcagaaataaagatgttctttgaaaccaatgagaacaaagacacaacataccagaatctctgggacatatttaaagcagtgtgtagagagaaatttatagcactaaatgcccacaagagaaagcaggaaagatctaaaattgacaccctaacatcacaattaaaagaactagggaagcaagagccaacattttcaaaagctagcagaaggcaggaaataactaagattggagcagaactgaaggagatagagacacaaaaaacccttcaaaaaatcaatgaatccaggaactggttttttgaaaagataaacaaaattgatagaccactagcaagactaataaagaagaaaagagagaagaatccaatagatgcaataaaaaatgataaaggggatatcaccaccaatcccacagaaatacaaactaccatcagagaatactataaacatctctatgcaaataaactagaaaatctagaagaaatggataaattcctggacacatacaccctcccaagactaaaccaggaagaaggtgaatctctgaatagaccaataacaggctctgaaattgaggcaataattaatagcctaccaaccaaagaaagtccaggaccagagggattcacagctgaattctgccagaggtacaaagaggagctggtaccatgccttccgaaactattccagtcagtagaaaaatagggaatcctctctaactcattttataaggccagcatcatcctgataccaaagcctggcagagacacaacaaaaaagagaattttagaccaatatccctgatgaacatcgatgcaaaaatcttcaataaaatactggcaaaccgaatccagcaacacatcaaaagctaatccaccacgatcaagttggcttcatccctgggatgcaaggctggttcaacatacacaaatcaataaacataatccatcatataaacagaaccaaagacaaaaaccacatgattatctcaacagatgcagaaaaggcctcgacaaaattcaacagcgcttcatgctaaaaactctcactaaactaggtgttgatgggacgtatctcaaaataataagagctgtttatgacaaacccacagccaatgtcatactgaatgggcaaaaactggaagcattccctttgaaaactggcacaagacaggaatgccctctctcaccgctcctattcaacttagtgttggaagttctggccagggcaatcaggcaggagaaagaaataaagggtattcaattaggaaaagaggaagtcaaattgtccctgtttgcagatgacatgattgtatatttagaaaaccccatcgtctcagcccaaaatctccttaagctgataagcaacttcagcaaagtctcagaatacaaaatcaatgtgcaaaaatcacaagcattcctatacaccaataacagacaaacagagagtgaaatcatgagtgaactcccattcacaattgcttcaaagaataaaatacctaggaatccaacttacaagggatgtgaaggacctcttcaaggagaactacaaaccactgctcaacgaaataaaagaggacacaaacaaatggaagaacattccatgctcatggataggaagaatcagtatcgtgaaaatggccatactgcccaaggtaatttatagattcaatgccatccccatcaagctaccaatgactttcttcacagaattggaaaaaactactttaaagttcatatggaaccgaaaaagagcctgcattgccaagtcaatcctaagccaaaaggacaaagctggaggcatcacactacctgacttcaaactatactacgaggctacagtaaccaaaacagcatggtactggtaccaaaacagagatatagaccagtggaacagaacagacccctcagaaataataccacatgtctacaaccatctgatctttgacaaacctgacaaaaataagaaatggggaaaggattccctatttaataaatggtgctgagaaaactggctagccatatgtaaaaagctgaaactggatcccttccttacaccttatacaaaaattaattcaagatggattaaagacctaaatgttagacctaaaaccataaaaaccctagaagaaaacctaggcaataccattcaggacataggcatgggcaaggacttcatgactaaaacaccaaaagcaatggcaacaaaagccaaaataaacaaatgggatctaattaaactaaagagtttctacacagcaaaagaaactaccatcagagtgaacaggcaacctacagaatgggagaaaatttttacaatctactcatctgacaaagggctgatatccagaatctagaaagaagttaaacaaatttacaagaaaaaaatcaaccccatcaacaagtgggcaaaggatatgaacagacacttctcaaaagaagacatttatgcagccaaagacacatgaaaaaatgctcatcatcactggccatcagagaaatgcgaatcaaagccacaatgagatcccatctcacaccagttagaatggcaatcattaaaaagtcaggaaacaacaggtgctggacaggatgtggagaaataggaatacttttacactgttggtgggatggtaaactagttccaccattgtagaagacagtgtggcaattcctcaaggatctagaactagaaataccatttgtcccagccatcccattactgggtacatacccaaaggattatatatcatgctactataaagacacatgcacatgtatgttcattgtggcactattcacagtagcaaagacttggaaccaactcaaatgtccatcaacgatagactggattaagaaaatgtggcacatatacaccatggaatactttgcagccataaaaatggatgagttcaagtcttttgtagggacatggatgaagctggaaaccatcattctcagcaaactatcgcaaggacaaaaaaccaaacactgcatgttctcactcataggtgggaattgaacggtgagaacacttggacacagggtggggaacatcacacacgagtggctgccgtggggtggggggaggggggagggatagcattaggagatatacctaatgtaaatgacgagttaacgggtgcagcacaccaacatggcacatgtatacatatgtaacaaacctgcacgttttgcacatgtaccctagaacttaaagtatgaaatatatatatatatatatatatatagtcatgagggagagaaaatactcttagttacttggactaacccacgaagtaggacagtataatttgaaaaaggacttggattagttgtaaacgtataatgtaatatccagcacagccactaaaaatgattttgaaaaaagcagtataatcaatatactaacagaagaaaaagcagaatcaggccagacatggtgactcatgtctgtaatcccagcactttgggatgctgaggcaggaagatcacttgagccccggagttcaagtccagcctggcaacgaataagagcccatctctaccctccaccccccccaaaaaaaaaaagaaaaagaaaaagaggccgggcacggtggcttactcctgtaatcccagcactttgggaggccgaggtgggtggatcgcgaggtcaggagatcaagaccatcctgcctaacacggtgaaaccccgtctctactaaaaatacaaaaaaaaaaaaaaaatagctgggcatggtggcgggcgcctgtagtcccagctactcaggaggctgaggcaggagaatggtgtgaacctgggaggcagagcttgcagtgagccgagattgcgccactgcactccagcctgggagacagccgcaagattctgtctcaaaaaaacaacaacaacaacaaaaaaaaacaaaaacaaaaacaaagaaaacgaaaagaaaaagcagaatctttttttttttttttttttttttttttttgagatggagttttggtcttgttgcccgggctggagtgcaatggcacgatttcagctcaccacaacctccacctcccaggttcaagcaattctccgggctcagcctcccgaatagctgggattacaggtgtgcaccaccatgcctggctaattttttgtatgaaaaagcagaatcttatacaatgctcaattaaaatcagggagaggagaaaaagagtagaataccaaaaaagtaacaaattacaaggttgatataaatagaaaacaatcacaaatactgagtatactaatctaagtatatcaataatcactttaaacatcgcttaaaagacagagattgtcagtggattaagaacaagacccaaatatatgttgtctatgagaaatgcactttaaatagctgggcatggtggtgtgcacctgcagtccttaggaggccaaggcggagtgtcacctgagcccaggattttgggactacagtgagctatgatcatgccactgcactctagcctggttgacagaataagacctcatctctatagaaaaaagtaagtaaatctactttataaaggcacaaatatattcacagtaaaggaatagagaaagatatcccatgctaacattaatcaaaataaagtgaaatagccatattaatttcagacacaaccgactttagaacaaggaatattatcagagatcaaaagggacattccttaatgataaagggatcagttttctaagaagacataacaatccttaatgtgtacgcactgaacagcagatcatcaaagtacatgaagctaaatctgatagaactgcatagagaaatagataaattcactcttagagttggaggcattggcatccctctatcagaaatggacaggtttagcaagcagaaaatcagtaagggcataacatgatcaatcatgatcaaaaacttgattcagtcaactatatgtaactgacatctatggaccactttacccaacaacagcagatgacacattttctcacacacacatgaaacattcagcagaatagaccacattctgggctagaaaatgcacctcaacaaatttaaaagaatagaaatcatacaaagtatgttctcagactacaatggaatgaaagtaaacaaaaatcactaaaaaagatagctgaaaaacatgaaaatacttggaggttaaacaacagactgaaataactgaaggtcacagaagtctcaagataaatttttaaaatatttcaaactaaatggaattgaaagcacaacttatcaaaaatttaggaacgcaacaaaggcagtgcctactgggaaatttataccactgaatgtatgttaaaaagaacaaagatctaaataaataatccttcccattggaaagctagggggaaaattcaaattaaattcaaagtaagcaagtaaaagaaataataaaatatgaatacaattctgagtggcctgatatctgatttctggaagctgagttttatgtggctttagaagtttcatgttatgagtgtgaaatggcaagtgaccatggcgattgcttctgatatggccacctcaattacatagagaagggatgatcagtggcatcatcccagttctgcatgataccacaccagtgattctccaaagtcaagaaacctgtatatgttgtccttgtgtttggtgaatctgtggtctatagactacataatgggctatttctggggtactgaccattttgctccattaaggaaaaccatgcatgagccatataactatgggaaacaatgttttcctttttgacacctggcctactctcttcttaggtgagagcaaaggaagagcaccacttggcctgctgcacccagggcaatttataccatccagatatccagcactgaatatgtagcaactccaatccaccatagaacattaatctatctctgataagcatgctaatatctatgattctgcctttgtggggagatgactccatagattaaccccctggcttggggcaatatggagatgttatattgtcttcgacagggaagatgacataaaaattatgttcaataggattatgtggagacttaacataagtgacaaacctaagacaagaagttagaaatccttgtttcttttaggtgaataattttggagcttgagaaaaagacaccattgtggcgaacttgctttgccaaaccctgtgtatgcatttttgggtaaacaacacattttcatcctttaagcattgtttccattatttataattcctaatagtatgagacatttaggactcattccttggttcttcttctctcattgtatctttcattgtatctttcagtgctgcaagagatgcaatcatcccattaatgaaagcagagtgactgccttcgtcacacatacattcaaaatagatcactaggctagtgatgattctctcttaaggctattatgtttactcatttaaaaaatctggatctcagtatagattttcttctcagtgagtgactgacctatctgatatgatgctatgacaaaatctttactttttacctgaatttggtgggattgaaagttgagaacatattaatttattttctgtttcacttgattaataatgcccaatctaacatgcagtgttcacttgggtacatatatacaactacatcaaattttttcttgttttaccttaaaagtgttaagatattgtaatggtatggccagtttactcactggtaaacttttcataacagaaatatcatgccagtggacacaaatatgtaacatcagtaatttgctttcctcatgaaacagagaactgaataagttgatgggtaaactagtatctgaattataaaccccaaatatcatgtgacttcatcattttcagtataatgaaaatacaggctgtgaatgcttccagttggtcctgaaagggcctttgaggtgagtaggttcaccaaagcggcaacatatgtgtcccagtgggcattctactcctcagtaagtgacttgacattctttatggcttcctcatgattaaaacaagtctttttattgaaattttactgaaataatgatgaaacaatgtaatattcttttcatctacatataagagtagacatagattaacctctaccttttttttttttttttttgagacggagtctcgctctgttgcccaggctagagtacagtggtgcgatctcagctcattgcaacctctgcctcccaggttcaagcgattctcctgcctcagcctcctgagtagctgggattacaggcacgtgctaccattcctggctaatttttttgtaattttagtagagacatggtttcaccatgttggtcaggctgttcttgaactcctgaccttgtgatctgcccacctctgcctcccaaagtgctgggattacaggcttgagcccccgtgcctggccttcacctctacctattataatattttcatgttattccattttgtcatgtttgtgggtcatttgatgagggttcacaatatgaaaactgggcattttggccaagatgcatgtaaatgaatacaactccatgtgccctgataactgatttctagatcctgagatgcaagtggcttccagagtgtctgtattttatgaaagttcatatacagtaaaccatgctaattgttactgatacagcttccttgaatatataaagcgatgattaatgggatgttttgtttctgcagaaaaccactgaattgcttctccaaagccaagtgacctgtatgatttgtccttattatattttgtgaaccagtggactaaaacctttataatgggtcatttttttagtattgtcaatattgctcaattaacaaacatgactcatatacacaggtgagatgtagttctccctttgacatttgctctacatctgtcccttagatgatgatatggaagaaaagcactctttggcctgttgtgactgggacagttgacagcacccaggtgtcctttaatgaaaatgctcttgacaccaatgcatcctagcatcacagcttcaggaagccttctcaagtgtgcatggggagtactatgtctttcatcaataatgaaatcttctgatttggtgagaaataatgccttaaaattacactcaataggattatgctgaggctcagcctacctagatgaaaatgctgaaacagataatagtgacttcttatttcccttcaaggggaattttattttgaacttgaaataacaaaatctttatgggtaacttgtttgcccaactgtatcagtgcacctataaatgaacaaaaaattctcagcctataagctttgcttcagtgacctttaatttctaatagtaaggtatattcaggtctcattctttggctttttctcttattgtgtatttcagtaagacatgctgccaagagatgtgccattctattataaaagatcagtagcttcctttaccgacgtgtatattctatctagaacattgagctatggaagactcccacctaagggaattagttttacaccttcaggtaatctgaacttcaatatgagttttgctttatgatataatccttatgacaaaatctttactttttatctgaacttcatacaatcaatattgaagattttttaaattcactgttacctagtccaatatttaatatacatttggctgtagatacatgactagacaaaaattttttatattattattgtgggggctctaacagtgtttcactgttttgagttactgatgaactttctgtaactgtgagaccatggtaatggaagagaccgtggtaatggggaggagaatgtgaggatcagtatgtactttgcctataaaacttaaatatttagtaatttgatcaccaaattgatactcaaatttcagttcctatcatgtgtaaaccaaaaagtatctgagatttagaagtttatttagaagtggattttgccaaggttaagcacatgctcagaagaaataaacccaaaatcacagaaaccgtctggggtctatgtctttctccaaagatgattttgagggcttcagtgtttaaaggggaaaagtgggctggagggggaaaagggagggtatgataatccgtatgttccaagacaaaaggagcaggtaggggtatagtcaataatgtattcatctcatgctcagtaaatcagcactttacataagataaggtgaacatagagaagctacctgtggagatctttaacctttaatctgtagctatctgcttaagatcaaaaggaaattcttgcatgactcagctttcagcttattttttttttctcttggcgtagtaaattggggtcccaagtttattttcctttcacacatgtgaccccactattttcagaataatgaaagcacatgttagaaatgatgacacttattcctaatatggactttgaaatgactgggttcacaaatttagaatcatggatctcattataggtttttattttcaatgagtgactggcctacttgatggaattctttcaaaaaatgttcactttttactgagattatattaaaataatgttggaatgtgttcagtcatgtttaccatctctatagtatgatatatgataatatcgcagattactcagtgtcaaaaacctggcataccttgtccttatgatgttgatgagtcaatggtctagagccttagtaatatgtctttttgtggtagtacggaccgtatctgtccactaagaaatagcctgtgtaagccatatacacatgaacaatttatgtctgattttgaactatggtcccattcctatgcctgtagataaagactgctgagaagagcaccctctggtgttgtcacagaggcaagtgctaccgcacaggcatgctgcagtgaatttaactgatcctctgtccctgcaaccgttgtttaaggatgctattctggtaagggtttacaagacaacgtaaatatatgtataaagagtatcttcaggagacgtaataatgtaaaaatcatgctcaatagaattaagctgaggctcaaaatagtgccaatccttgcaagaaggtgtgagaagtcattagatttggggggtatgggttattccattttgaacttggtaggaagaaacccttgggggaatcttacatcatttgcctctacctacttctaaaggaacttttaaaattcttttatcttgtctttattcttaatactcatacattattagagagaatatcttggtttattttttcctcatggtgtgcttcagaatgttcatccagcaagaggtgtgtcattacacggattatatatatgagttctgtctttcgtaattaaaaaatttcaagtggaccatttgaatattaaacattggccttcaaaatgattacatttacctgttcatacaaaattagtgagcaatgatctattctttccaatgagtgactgatctaatgaggtcctcattaaaactccttttttttttttttttttttttgcctgaacgtactttgatttaaagatgtgacatttagtaattcattgcaatcaactctttagtgattgcacaaatagacaatccttttctattattttattttttggttgctgtgtatggtgttatgatgtttgtggatcattgaggcactactcacaactgaaagactttggcaattttagggaatggcttgagattcagctataggttacccttgattgaaattgaatacaatacaggtagtctgaaatctcatttccttatcctgagtctcactcaggtgtcattagattcattataaagaaatgcatacactatgtatgatgccagttgttactgatatgaagacgataagaagcttttatttctgcagggaaataatcccttaccaggtcatcaaaagacatgatacctatgtgcttggcccttactgtacacggggaatcagtggtctaccacagcttaagtaacgggtcatatttggagtatcacacatctcagtcttgtagaaattaggaacagcaattaggagtcatgcacatataagagatgtaatcccaccctttgactatagcctactcttgtcttttacagaaaagactgtggaggaagaaaaccctttaccctgttgttcagggagaaactgacaccactcaactgcctggcactgaaaatgtggcatccagtccactttaccatcagtgtttaaggaaaccatctctggtaagcatatttgatccaagtgtgcatatgcacatgagtgccatgggctgggtcaatgatgagatgttaccttgaagagaaatgatgacgtaaaaattaagttcagttggattacgctgaggcccagcctaggtaacaattgtgagacaagaagtttggatttcttagtttccttccattggggactttattttgggattctggcaatggaatcttattgcgaaacttgttttgcacgcttctatctgtgtgcttctaagtaaactataaattctgattctttaagtgctatttaagtttcctacaattcctaattttcttggatatttggcactaagacccttgctctttttctctcattggatgatttagtaagtcctactggcactattctattgagtggaggtgagaggctgcctttgctgactgaaaaatttcaaatagataattgaactagtgaagactgagctctataataattagatttattcattcagacaacatgaatatcacgatagggttttcttctcaatgattgactgacacatgtgatgcaatcctcatgagaaaatccttacttttgccctacgattgattgttttcagggttgagaaatatgatacattggaattttgctcaatgcgctacagttatcgtggtctaaatatacagacaaaattttctgtaatgttagtataatattttaacagtgctaggatatgttttgatcattaatgaatctttatgacttaagggtccttgcaattgggataaaaatgtgagtttcaataatatgtgtttgcccatgaaacttgaaattagataaattgatgagcaatctggtgcctgacttttctttctcaagtacctttggcttcgttttcattatgatgaaagtgtgtgctgtgaataatgccaatggtaaataagacctttatggacacttatatgaatgacagtcagggccgttccttcaggccacatgattatcgttatgcattcttcttctcaatgagtgactagcatacttgccaggatctacaagagggaaactttattttttactaaaattgcatcgatataatgttgacaagttttgtgattattggtatcatctctaagatgtgatgctcatttggtctaaatatagaagttaacatattaacttctaatttatatatgtcaggttgctatgtttttacaatgtttgtggtttattgatgatgactcacaacataaagactatggcattatggctacatgttctaattctgatatatacatatcccatcattcattaaattaaatacaattatgagtagtatgatgtctgttttctaaaatctgagtttcacctggctccagtatgatcattatatgatggagtgcaagcaacatgttaatgccaattgttattgatatggcttccttgaatatgtaaacaagactgatcaattgaaggtcttatttctgcattaaactacctgagatattctccaaattcaagagacctgtatagttagtctttattctgtttgatgaataaatggcctatagcctatctaatggatcagtttttccagtactaatcatatctcttcattaagaaatagcatgcataagccatacatacaggaggtaatatttgtcatcttgatctactgtcttatcctcctccccttagataaggatgactgaggaagagtactctttggcttgttgacaccagcacagctgacacacccagatatctgtttggtctcctgtgaactttcaaccaggatttaaggatgccactctggtaggtattttcagacaaagtgaatatgtgattgtagagttccatggcttgtttcaacaataagaccttatgttgtcttgaggacatgagatgacatgaaaactagactggctggtccttatcttttctggggtattctagtttgagcttaagataaagaaatatatttgggatatagtttctctcacctgtttctattagcttctagaagaccacttatcaattctttcctcctgatttagtggaaaacattttggcagttcctcaaaaagttaaagataaaattaccatgtaacccaacaattctgctcctaagtacacactcaaaagaattgaatacaaatgttcaaatgaatacatacacatgaatgttcatagcagcactattcactggctggagttccagaccagcctggccaacgtggcaagaccctgtctctactaaaaatagaaaaattagctgggcatggttgctcacgcttgtagtctcagctactcaggaggctgaggcacaagaatcacttgaacccaggaggcagaggctgcagtgagctgagatcacaccattgcactccagcatgggtgacaagtgagattctgtctcaaaaaaaaaaaagtgaaggtatgatgacaatgtcacacaaaatagtgaataccaataaaaagatagaaattattaaaaagaaccaaatgaaaattctggagttgaaaagtacaataactaaaatttaaaaatttattagaaaggctcaatagtagatttgaactgggagaagaaacaagaagtaaacttgaagatagaacaatagagattatgttcaaaagaacagaaagcataaagaataaagaaacaaagagagtctcagagaatgtggaacatcattaagcataccagcatacacatatgggagtaccagacaggcaggggagatacaaaggatcagaaaaaaatatttgaaggaataatggctgaaacctcccatatttgtggaaaacaataactgacatatccaggaagctcaatgaattccaatgaataaatgcaaagattgacaaatggaaacatcacagtaagatatctgaaagtcaaaaacaagaagaaagtcttgaaagcagtgtgagaaaaatgatttgttacttacaagggaaccccaggaagattaacagctgacttcagcagaagcaatggaggccagaagcaaaggcataacatattaaaaatgctcaaagaaaaaagaacctgtcacctaagaattctgtacctggcaaagctgtctttcaaaaatgaaggcaaaataaagacttcctcaattaaaaaaaaaaaagttggagaatctactgctctcaaaacccccttaaaagagttctctaaatacttaaagaagttattcaagctgaaagcaagtgagcctaggtagttattcaaatcaacaactacaaagcaaatgcttgtaaaggtaattatataaatataaaagacagtagaaatgtaatttttctctgaagtgattttaaaataaattctataaaataatatgtatataatgtattttggggtctataacatataaaagtgtaatatatttgccaaagaagataggtggatgcaaagcaatacaagactaaggaaatgactacagatggtagattaatatttattataatgtctttcttggcttatagcatcaataaatgtaatatgtataataataccacaaaagatggcaaaaagggaatagagctatataggtgtaacatttctgtataagactgaaattaagctagtgtaaattagaaacttatttgggtgagttaagatatatgcagtaaaccctagagcaaccactgaaaaaattcaaaacatatagtgaaaaaaattattaaggaagtttaaatgctacattataaaataattacttaatgaaaaagaagtaaagaggaatagaggaacaaaaacacatgagacacagaggagaagaagaatgacataataaactcaactaaataataaaattacatgtgaatacagtaaatatgtaaattaaaaggcagagattcccaggctggataaaatctccaggtttaatatccctttgccccaaataaactccagctttttttcctatgatgtatttgatcattgtgctggtttacaaaagatttctaacctttctaaaatctttaaaatcagcggcgaagtgttctatctcatttcacccatatatatcagagactcaaatcctgaaaaataccaagttgacctgcccattcttgagttctgctgaatggtgtgttcccagatcactatggatattgctgtttacttgaccaattacttttagtcaacaagatttgaacaatgcttttgattcacacagcgtgagacctagacttccctcatattgaaataggagcattagcatcctggattcctgcaccggcttttgaaccttatgtttcctgcaccccaagaagccatgttatctggacattgtcctctctgtgatgggaaagaagagttttttcaacaaatgttgctaggacaactggatatctagatacaaaagatactgcatttatgttaccagttttctgtgtcagtccattttgctctgatgtaacagaatactgcagactgggtatttgtaatgagtggaaacttattggctcacatttctggaggctggaaagatcaaggggctggcatatgataagggccttctcactctgtcatcctatggtagaagggcaaagagagggtatggatgggacaaatatcttcttttataggaacccacccctgaaataacagcattaatccattgatgagggcagagctctcacagcctaatcaccttttttttttttttttgagacggagtctcgctctttcgcccaggcgagagtgcagtggtgctatctcggctcactgcaggctccgcctcccgggttcacgccattctcctgcctcagcctcccgagtagctgggactataggcgcccgccacggcggccggctaattttttgtatttttagtagagacggggtttcaccgtgttagccaggatggtctcattctcctgacctcgcgatccgcccgccttggcctcccaaagccctgggatcacaggcgtgagccaccgcgcccggccgcctaatcaccttttaaatgttgctttattaaacactgttgcattgagggttacgtttccaagacaggcttttgaagtgaaatgaaaaatttgaccattcccaattatagtttgaaatttcaatgctcctttcttagtatgtgattgaacatggataagataatcagtaacggtggatgtaagaacactattaaccaacttgactccactgtcatatgtagaacacaacacccaacaatagcagaatgcacattatattcaagtgctcataaagcattattttgtatatatgtattttctcccttttttgataaagttagctagtagagtgcctatgtagttaatattttttaaaaaccacaggcttctcaattattaattacatctatggtttttaaaatattatcttcattaatttctgctttgatccttattcctttctttcttgtactttcttttatttttgttcttttttagtgttttaagatgaaaattgaattgtttcattcatctttttcattttttaaaataaaaacatttagtgcaatgaattttcctctagaactgcctttaaatgcatattacagattctcatatgttgtatattttaaaataatatgtaaatatatatttgcatagaaaaacatatttacatacaaaatatgtatttacatatttaaacatatgtattttctgtttatatttttccttttactcaggagttaataggatatttttaaaatttcttggtgaaagcgcctttatcttattgttagtaaagtctatgtttttgcattgtgatcagatagtgcagtttttaatatttcttgagttactaatttttctttccaacctaatatataatcagttttttgtgactatgccatgggcacttaagaacaacacagatcttctattatctgtcaagtttaatatgtagccataaaatctaccttatttttatgttgctatttttgcccacttgatctgtctttttctgataatggtgtattatagttttctattatgggatcatctatgtcttgtctccttacatctcatacatctcatgcagttttttattcataaaggtggttattatgttatttggtatataagtctccataagggtcaaatcttcatgtgtattatatcttttagcataaaaaaagtgtccttctttgccttgattaacatggtgggacttgaatacattgtgtgatataagaattactacgcttgcatgcgattggcatgaaaaaaaaaaagattactcctatctctttttgttttcatgtgcctgatatactttcgcccatccctttattttcagtcttttagaatccatttgttttagattcatctctcatagaaaacatattatgttttattttgtgagcccactgaaaatatttttcttctagtaggtgtgtggagtccactcacgtgtgtgtgtgtgtgtgtgtgtgtgtgtgtgtagctatgactgatatttattgtgtttgtattttctttatatttgctacgctcttttgtcacggtgtagtctttgcttgcctatttattcatacttaggagagtttttgtttttgttggagtgtttacttttgtacctctcttaattctgttagttctgtgttttcctagttaatcttttacttctgatttatcagtttgggggatgttcttcagcactcccctattctcatgcaaagtgctttcggttttcctctttttttttttttcctcctcctgtgtttagttgtcttatttctactttgtcacaatattagtgacatttgtatgctagtcttctaccctggatagggaatatacacctgtcagatggaaggaatatcatgttgtatgctgctgtcaaatagatcctaacatactttaataatcttttaaatgatataatccaagttcatagttaactcctgactttttatttctatcatattcagtagatatatcagcattgacagccatcccactgcaatatcacttcacattttgcttagaccaaagggttctgagaagcttctggagctgttgtgaaagccagtttcattaaagtcaagtcagacatccacctgtgctgttttctgctataagctgaatgcaggggatacaatgttaggagcatcagtgtggtatgaggaatgtttacttattggtagtagacttgtctggatcaaggataagtacaagtatctgagatgctgaggtgtggctgaatgaatggccatctgttctattgcaacaggataaataacacattcggagcaggcctaactggtgaactcctcaattatctcacaatagcactatcacgtgtctttcatttttcacagcacagtgtattttcataaaatctttattggtagaccacaactttagcatttcccattcaagatacaactactgtgtcacttggatagcttggtagagaggaaattggctattttcagagtaaagaattcaaggaggaaacagattataaatgaaatgacaaaggtgatgagatcaagcaatgctgacgtttgtagcaaggagtagagggctgagatgcctgtatgataagaaattataatggaaccaatcttgtgctttattttttattaatttggagcattctctgatctgatttattttctatgtgatattttgctgcaggttaaaagctgaaacaacttcaaggaaacttcagggaaaagaggtgagcagccactttggtacttttgaaattctttgttctgtgggcaatgatgtcagaatgtcaaagactgtgagttcattatttcagaggcttaaaggagattattcttttggtagatatatttccccatgggtgtccctaccttgttcaaggattccttattattgtttcttctctttgtttaaatctctttttgagatgacctaaacaactgtggagaatcattgatatatttccttttttcactgttcatgttgggtgaaaataatcttgtagtgaaattcacatgttctaaatattgtttttttacatctttatctggcacattcataacatagatgtttctatacatattagtactgtaatcataccatatattattctgttaccccacttactccttaaacttttagttaattaaagagtttttataaagtcccccaatagattttttttttttgagacatagtctcactctgttgcccaggctggagtgcagtggcgtgattttggctcactgcaacctccccatcctgggttcaagcaattctcctgcctcagcctgccaagtagctgggattacaggtgcctgccaccacgcccgactaatttttgtattttcagtagtgacagggtttcaccatcttggccaggctggtcttgaactcctgacctcgtgatccacccgccttggcctctcagagtgctaggattacaggcttgagccactgcacccggccagattttaatctaattttattagaacaattcagtcatatgttttttcatgctatgtatatgagagttccattattcagatactaaacaaatgtctactgtacatttactgttctcactgatgatgcattagataaccatgcacaaaataagcctggctgtggaaacgcttatttgttgggagggtgcttgtttggatcgatgatgagaataattgtctgaggatgctgagggactcattccagatgtcaatctgaggtccagatgtgcggccctccaataggacaaataagactctcagagcctggctctatttggggatccctcagtgacaacatagtacccctgtgagcgtgccttttctatctcttcgaagagggcagtggcatcctgtcttatgagtcagtgtgcactttagtgtgcctagtgacccaagacttgctttaattgtagatagatacttacatataggaaatatttcttaagtaacaaatgaaaaactttagaagattgaattaagggtcaagcaactgtgatatgtctgaaaatctcattagtgttgtgctgaaagaaggaaatatggcatgcctctattaaataatgacagtggaaccaagtttattgctttgttatttttactgtggagtattttctaagattatttttgctttttttttctttcatgttttgctgagatagaaggcctggaatctgatcctccacttcagagaacaggggtgagtagctaagccattatcttttgaaattcatatgtcatgtgctctttgctaggtctttaggtcgttttgtacatcttttcagaagcttattggaggacattttcatgatatgtccttttcctcattgagaccctcaccatgtcacctacactattgaatccttatcatttctcttttaattttaactctcttttgcttttatggaaaaatgtagaatttaagagaatttttggcaatttcatattggatcaaaatgtattgtagtgaaatccaggtgtgccaaaatattaacagattttccccatctgtttaattattggggtttcagaatagagactccatggttcataatatctttgtggtcatactacattatatttctgcttctaatttaattattaaatattgacttgaattagtcttttcctcattgttgcaacaaggtaagttatataggaaattttcttctcttgatggcatgtctgagataatcatagatataagacacctggctggtttctagaatgcatgtaatttttatttcttgatctgtgtgttgagtacttgctgtgattgcatcatgcaaatacattgagctttacaattttagtgtatgcacttttctacatgtatattattcttcgatagaaagtaaaaaaaacttatcgaactagtcaaaatattggttaatacataaaaaaagtctcaagtagattgtgtattacatggtgcttgttgattgatgccctcataatagatcaagtgggttctctctttagcacagggctttttagcaaatcatgtcatgagtagttactcaagtatttttattttaacacatttatattttttctatgtatattcttaaattctcttatacttttttctctgttataaaaacatgctgaacaatctcaagtcttaaggattgcagtattgtccccacatattcatgtattttggtactcaattctttatactttctttgacagatcacttgaactggcacatgtctcttgttttgcagagagggaattaatgtgataccttcatgcttttctattctatgtgctacataattgaatatacaagcaaatatagttgttaagatttagtgtgattatttctacaccacatgcaaagaagtttctcatagatcttaatagaggcccacatgcattgtacagtttagaatttggggaaatattgatgaagttgggtaaagtataaagccaaaagtcagaacagtgaactccttgcttaaggatttccttggagattacttagtcaatacacaactgataaatttaagtgcttttcaccttttgagttctcgacatactaaagctaaaatgtgtttcaacttttaatcctgcttccctgattttcccttttttagtctgagatcaaagagtttcagccataaattactgccaagagtaatcacttcattttaagaaagcttaacaatatagaagaatataaaattatttatgacagatgtatttttaaccttttccccatgctttccagaggaaatatgtttaatcatctgccctatattagggaaaaactttctatgctaatacaagtatctatcaatccatttatctttctatataagatgtattgatcataaccaattaactttactgtaaatgagctttagatttgacattttggtagtaatatatgttgtacaatctcctgaggtcctataggtcttgaggtctctatgtcaaaaactatagatgtgccagtgtcctcagtgaatgtgaaggacaccacattttccttagccatttcttgttttcagaataatggttatcaacattttgctactgcaagataccatacatttataatcggaatatgccagtttttatgcactcatgcctctgtttctgtagagcattcccagaatgagtaatgcttgaaaattaggtccatgtgatttctttaatgagttatagtcaaatcatgaaatattcaggttaccattatttcagtaatgtattagaatgtcaaggtaaagttatctacattgtatatatacacacaacatagatataatttatacaacatctatatttatacaacagatatatatttatgtatatatttatacaacataaaatatattttattatttaaacataaaatatattttattatttaatatagattcttaagtgataaatatgtttaatattattaaaataggttaaaataggttatagttagtacagtgaaaattggcagcccttttacaaaacatatgccataactatagcatttatcactgacagtcataccaggatagtcttttatttccaatcacttaaatattcctaattgcaaaagaaatttgaagactaaaattcagaagttttgaaagagccattgcctgggtaaactatacaggtttcagttttatttataataattatgaggccaggcgcagtggctcacacctgtaatcccaacactttgggaggccgaggcgggtggatcacgaggtcaggagatcgagaccatcctggctaacacggtgaaaccccatctctactaaaaatacaaaaaattagccgggcgtggtggcgggcgcctgtagtcccagctactcgggaggctgaggcaggagaatggcgtgaacctggtaggcggagcttgcagtgagccgagatcgcgccactgccctccagcctgggagacagtgcgagactccgtctcaaaaaaaaaaattatgtatatatttataaattaatacttaataaattaataacttgtgataggcaatgcaaagatgacagtaaaaggacaaaattgattagattgataaagtcctgttaacatgaagaaattgaccaggataccatccacactataaagttagagaaatttatcaggacaattccctaaaatactcttctcaattttaacattgtaacaggaatttttaaaattttggtattatgtgtgtttccttccagataatttgaacagattcatatttggtatttttaaaagccatatctttgtccttagtgctggcaatgtattcttgagaatgaacaaataagagatacgtaaaagcataagagaaggtatcaggttgaagtagtcaatcagttatacagaacacaaagaattttatcttgtataatgtttatatagctttatagaagtgtgctgaaagggctataaaacatggacattattatctcattgaaaggtccaatacgtactgaaatacatgcttttattttgaaccaaccaccctataaacgttgtatggcttatttagatgagagcccaggttgtgtgtgtctgtgtgtgtgtgtgtgtgtgtgtgtgtgtgtgtgtgtgtgtgtgtacctgacagggaagcaagaacatcgagttgccaatgcactctgtctatggttagaatcatgctgaaaacatggctcccccagttctggaatgagcccacagatcaagcattccccaaagacatagcaggctcaaatccctgtgtacacaatattttatgattatcttatgtcagtactttcaaagtatacagtttgtgtgaagacaaatccaatgtcatttttcttggctagcctatatgtgtggtaaatccattatttacttacttgcttcctgaaaattacaattagattaacaaactgcagcaaagtgggcatgatgagatagagattgaagtgtaagcttatgttaatgatgcccttggtttggataaacacatctaagagaaaaatggaaaaacacacatggcagggaagccttgatagagccaaaatataggattgtatgtagtaatgcaatccatagatgagcatttggcagtaatattatttttcagatatggataaaaattgcttaggagagtaaagagagacaaagttgaaagcaggtttatagtaggtgttgttttagtgttgatccctttttgctccaataatcaaagtgataaatattgaaaattgattcatgcagcattacttactccattctaatttttatatatgtcaaaagtgccatctcccaaactgtgctatccccttcaggagaagagactctgctgaagtttataaggttgacatattgccagcttcaataatgtaaagatgaagtgtatactgaattcttaatgcaaataacaactctattggaaagtaacccagttatagaagtgctaatttgtcaggagctgccttaccaagatcatgatgagtacagttatctcaggattctgaaagattgttttccgatttcaactagtctagctgaatgttccttgatagaaagagaggacttttagaattggttcaatatgatgacctcctgaattatctcacatagcccgtttgtacatgcctttcttttctctcagaaaatggcactatcataatagctttcttacacagacttcaccttagggttttacattaagggaggggtctggtgtttcatttattttgaagtatttgttgttgattgtgtacagtgcttgagtaaaaaattgaatatagaaacatctagaatatttttttaaaggatcagtgtttataaagtgaattattagtgtcaataatgttgggaaagttttaagagaatataggaaacttgaacattacacaactacaatgggaccaaattgtggggtctcattatagttaatatttatgtatttttttccaattgatttgtgtgctttttttctgcatgtttttggcagatagaatggctataacaagtaacagcatgtcaggtaataaaaataagcagagccctattcctttaaaaatcttcactgatgggagggccataaaataagtcttaatacatttaaagaattaaattcatgtaaaccatgttaatttaattccacaatgatattgaattagaaataagaggaatatctcttgaacatctcctaaatgtttggaaatttaaattagcatttctgacctatttattggttaaaaaagatacaaagaaaggaaaattgaaaagtcttttgaactgaataaaaataaaaatatagaatctaaaactttatgggatactgacaaaacaggatatagggaataatttatagcactgaaatgcctatattagaaaagaaaaaaggttttaaatcagtaaatttgtattttaccttaagaaacttagaaaagaacaaattaacccagacttaagtaaaataaaggcactaataaagataagagcagaaatcaatgaaatataaaacaacaaaacacagagaaaaattgagaaaatttaaaaatagcctagtgagaagatattgataaacttgtaaccagaccaatttaagaaaaaaagtcaaaacacaaataccaatatttgaaaatgtaggagggcaaatcattacagattctatgaatactaaaatgataataaggaaaaattatttaaaaggggcatgtcagccaggcatggtggcttacccctgtaatcccagcactttggcaggccgaggtgggaggattgctagagctcaggcattcgagaccagcctgggcaacatgttgaaaccttgtctacacaaaaagtacaaaaattagctgggtgtggtgttgcacacttgtagtcccagtcacttgggaggctgaggcgagaggatcacttgagcccaggaggttgaggctgcagtgagccatgtttgtaccactgccctccagcctgggtgacaaagtaagaccctatgtaaaaaaaaaaaaatgtatgccaacatttttcaataacttaaatgaaatggaaaaattccttgaaagacacgaactacaaaaactcagtgaacaagtaaataacctgaatagccctgtatcaagtaaattgaatttgtagttaaaagccttccaacagagaaaacttcaggtacctatagcttcatatgaaatgaaaaaaaaaataccaatcctctacaagattccagaacatttaaaagaagggaatatttcccaacttattccatttggacagcaatacccaggtaagaaaaagagacacagaaatttaaaaagaagaatatacattattccttaggaacataaatgcaaagaaatctaatcaaaattttggcaaatgaaatgtagaaatactttatgaccaagtgagagttacccaaagaatttaaggttggttttatatgtaaagatcaaccaatataggaaaatcacttctggaaagtcagagtaagaaactccaaaaatctactcctccataaaaccaataacagccttgatagaaatagttgaaattaattttccaaaactttggaaattaaccaaaggcttacaaaattccagagaacattaattcaagaaaaatggctgaatcagtaagaacagccagctttgtggcattttaatatgaccccttcccatgcttttctccctagtgctgagatagtcttaaaaattagcaggatagcaaccactggagaagaaaggtttggaaatttcccaaaaagttccatccccatagaattatcactatttgacctctaaagcccaatctataggatttatattcatttggactgactcagagctcactcagtaaggaaatctcaatttcaaggtattggtcaaaaagaatccatggcaattgttgactatcacaactgcctgaagtcttggtaacagttgggataaacaagaagctgatcaaaaactgaaaactaaaatcttgggaatgagatatctacaggatgcttcaaaaagctttgatacattcctgtttatctagaaagctacatgcaggctgggtgcagtggctcacacctgtaatcccagcactttgggaggccgaggcgtgcggatcatgaggtcaggagtttgaggccagcctgaccaacatggtctctactaaaaacacaaaaattagccaggcgtggtggcgtgcatctgtaatcctagctactcaggaggctgagacaggagaatcgcttgaacccgggaggcggaggttgcagtgagccaagattgtgccactgcactccagcctgggcgacagagcaaggctctgtctcaaaaaaaaaaaaaaaaaaagccacatgcatgtaattgtttacctctggctttccttttatgctctgggcaagctaaggaagagttgtgaactacctaagtgctgaatgggaaccataacacacacacacacacacacacacacacacacagcaccttagtaaagggtgagaggcatgttagttagaagcattaaaggaaatctctttctagtcattatctgtgcactaacctaactgagcagagacttcagtatccacatactacagggcatataaactttacagaattagtccaggaaaatcatatctaaaaaaaaaaaaaagcagtaacaaaaataaactctgggaaaggggagaatatgatttaaagagttgccacattatacataatatgtctagtgttcaacaaaaaattacgagacatgcaaagaaatagaaaaatatggcacaaagaggataagatgaagtcagtgaaactatcctcgaggaagaccagatgttggtcttactagacacagacattgaaccagctattaaaaatacgtacacagaactaagaaaaacatgtcaaaagggttaaagaaaggtataaaaatagtgtcttaccaaatatagactaccaataaagagatagaaattataagaaaagacaacatgaaaaaatataaagcaaaaaaattagacaattgaaacaagagggcctctattcgcagatttgagcaggcagaagaaagaatcagtgaacttgaagatatgtcaactgagattatccagtctgagcaacaaaggtgggaaaaaatgaagaaaactgagcaacaaagaactgtagaacagcatctctcataccaatggatacataaactggagccctagaaggatgaaaaaaggagaaggaaagaaaacttcccaaattttaagaaaaacattaatttatatacccgagatgaccaataaaatccaattaagataatctcaaagagaccaacacctatacacatcatagtcagcgtgtcaaaagacaaacataaggagagaattcttgaagatagtaagaaaaaaattattcataacatacacaccatcctcaataagtctgacaattgacttctcactgtaaaccatgcaggctaaaaaggcaatgtacataaccaaagtgatgaaataaaaaccttcaaccaatcattctagatccaacaaaactattgttcaaaaagaagaaatgaagacattcctaaacaaaatctcagagaaatgttctctataagacttgtcctaatagaaatgctaaaggaactccttcggtctgaaatagaaaggcactggagagtaaatcaaatccacgagaagaaataaagagaaccagtataagtaactacatgtgtaagtttaaaacaaagtataaatttattttgtttgtaacatttgtcttttcctatttgatttaaaatataatctcaattataaacttgtgttgatggtattatataaagatgtaattttgggttatagcaccaaaatggcagaataggaattttctgtaggtgtttcccacataagtatcaattttgacaaccatccatgggcaagagtaccttgtgggagttcaggagttgacagtaaaacttcagcacaccagaggagtaaagaaatctaagaatagattcattggaaagggtataaacagtttcactttacctgcatcaccaacccccaaaagtggcacagctcagtaacaagagcccattatttcttccacagaggaaaaggagagtataataagtaagtgtccagtttctcaagacatacaggcccctgcccaagagatccactttattttcatctcacccagaatattgaggtgatcagcaaggtggagtggttgggagagggtaaaagcaggaaagagagatggggactcaaacagcagcccatacttggaactgccatagatcctaccagttacttcatggactccatcaggaacccacctataagccacaggggatgcatccctcccatcttgccaacaaaaccccgaatgctccaaatgcctcacccactctttggctggctcccaagtgcgctcctgtgaaaagcgagtgagtatctctgcagatggcttgcaagcacatgttgacagctggctccactctgtagaactggaaaaaagctcacatacatgagaatttcaggacactaccctaaaaaaaaaaatgagacttcagcacctggcctggctttatgcaacctagagaaggtgatatgatttggctctgtgtccccacgtaaatctcatgtcaaattgtaatccccacgtgttggacaagggacttggtgggaggtgattgaatcatgcgggtggacttccctcttgctgttcttgtgatagagttgttatgagatccagttatttgaaagtatgtagcatgtcccccttcactctcttgcactcctgctccaccttggtaagacttgcttgctacccctttgccttctgccatgattgtaagtttcctgaggcctcccagctatgcttcctgtatggcctgcagaactgaactgtgagccaattaaacctcttttcttcataaattatccagtcttaggtagttctttatagcagtgtgagaatggactaatgcagaaggcatacaacctttagaatttgcccccttgagggaacaagatgtgtgaagcaggttcatccatagaaaatgtctgagagaacctcaaaatccctaacctgactaactgatgaaagtgtttctctcctaaggccagtcagtaaagaccagagggggtgactgtttctttaaatgcaaaggcagcagcacaataattcaagaaacatgaaaaatcaagaaaacatgacaccaccagaagaacacaatcattttccaataaccaactccccaaaaatggagatttacaaattggtttataatgaattcagaacaattatgttaaggaagctcagcaaactaaaaggaacaccaatagactactctgtgaagtcaggcaaacaattcatgaacaaaactagaaattcaaaaaagagaaaaattatcttaaaagaaaacccagaagttatggagctaaagaatacaatgcatgaaatgaaggagcgtatcaacagcaaagttgatcaagcataagaaaaaaaaaatctgtgaaactgaagactggctatttgaaattattcatcagaggattaaaaaaaaaagaatgaaaagaaataaagaaagcctacaggatgtataaaacaccatcaagagaactaatataaggattattggagtcataaaggagaagagagaaaagggtagaaaacttatttaagaaataatggctgaaaactctccaaatctaggaaaagatatgagcatccaggtatatgaagctcaaagatccccgtacaggatacattccaaaaagacttcaccaaaacacatgataatcaaactgtcaaaagcaaaatcaagacgatgaataaaccaccaatcactaagagggagacaggattcttatgttgtcattattatttacatataatttcagtaaatgttattggaaaatttataatgttttaaaaaaagaaatttgaaagcaccgaaagaaaagagactcatcacatacagggaacccttttaaggcattcaagagatttctcagtagaaaccttacaaaataggagagagtgggatgaactatacaagtgctgcaaggaaaaaaatgccaaccaacgctttacctggcaaatctgttcctcagaaatgaaggagagagaagaactttcctagacaaacaaaagctgaggcagttcatcaccactagacctgccttacaagacatactaaggggagttcttcaagctgaaatgatatggcaatagttagtaatatgaaatgataaacctcactggtaaaggaaagtacatagtcaaatttagaacactttgatactataatgatggtgtataaataattttactgtgctatgaaggttaaaagacaaaagtattaaaaaaaacccatagctgcaatagcttgtcaatgcatactacagtataaaaagatgtaaattagaacattaaaaacatagcatgcaagggtagggaagtaaaagtgtagttttcatatgtaatcaaatttaatttgttatcagcttaaaataaattgttatacctatgttttatgtaagtgtcatggtaactataaaggaaaaacctctagtagatacacaaaagaaaaagagaaaggaatcaaaacataacactacagaaaattatcaaattacaaaggaagacagcaagggaggaacaaagtaaaaagagcaagaaaaaatttaacataatgaaaacagtaagtccttacgtgtcaataattactttaaatgtaaatggattaaattatccaaacaaaaaaacagactggacaaatggattttagaaacaacaacaacaacaaacaccgcacacacacacacacacacacaaaccacccagccccaactatgtgctgcctacaagagatttacttccactttaaggacacatacaggctgaaattaaaagaacagaaaaagatattgcatgcagatagaaaccagaagagaggagaggcatctatacttacagcatacagaaaagattttaagttaaaaactatatcaaaaggctaagaaggtcaaaatggtgaagcagttaattgttcaagaagacataaaaattgtaaatatttatacacccaatattgaagcacctaaatatataaggcaaatattaatacatataaaaggagaaatatacagcaatacagtaatagtagtgaacttcagtgcctccctttcaaaaatggataatccagacataaaatcaataaggaaacatttaacttaaacttcactttagaccaaatggatctaacagacattatactgaacatttcatccaacagtggtagaattcacattcttctcaagcacacatggaacattctccaggatagattatatgttagctcacaaaataatattacaaaatttaataaagctgaaatatcaattattttgcaccacaatagtataacactagaaatcaataacaagatggaaactggaaatttacaaatatatagcattaacatattcctgaacaaccaatgggtcaaagaaaaaaatcaaaataattttgtgacagcaaagtagaaacacaacataccaaaacatacaggacacagcaaaagcagttctatgaggtaagcttatattgataaacacatttaaaaaaagattttaaataaacaacattacacctcaaggaactacaaggaagaaaaaaaaacaagccccatgttatcaaagggaaggaactaacaaagatcagacagaaataaatgaaacatagactagaaaaacaatagagactattaataaaacttagagttagttttttaaaaaataaaatcaacaaacctttagctagactaaaaaaagagaagactcaaataaaataaaaaatgaaagaggagacattacaactgataccacagacatacaaattaagagaaaactatatgccaacatattagttaacttgcaatgggtaaatccctagaaacatacaacctacaaaaactgaatcatgaagaaatggaagatctgaacagatcaataatgaataagggaattgaatcaatattcaaaaatctcacaaaaagaaaagctcaggatcagatggcttcactggtgaagactgccaaccatttaaaaaaattaataccactctttattaagctcttccaaaaaaattgaagaggagaaaacactttcaaattcattataagaggccagttttaccttgatatcaaagatttaaaaagaacactttgagaaaggaaaattacaggccaaaacccttgataaatatagatgcaaaaatgctcagcaaaatactagcaaacctaattcagcaacacattataatggcatacatcatgaccaagtgagattcatgcctcggatgcaggatagttcaatataatcaaatcaacaaatgttacactactttaacagaatgaaggataaaaatcatatgatcatctcgatggttgaactagtttacagtcccaccaacagtgtaaaaatgttcctatttctccacatcctctgcagcacctgttgtttcctaactttttacagatcaccattctaactggtgtgagatggtatcttattgtggttttgatttgcatttctctgatggccagtgatggtgagcatttttcaagtgtctgttggctgcataaatgtcttcttttgagacgtgtctgttcatatccttcacctactttttgatggggttgtttgtttttttcttgtaaatttgtttgagttctttgtagattctggatattagccctttgtcagatgagtagattgcaaaaattttctcccattctgtaggttgtctgttcactctgatggtagtttcttttgctgtgcagaagctctttagtttaattagaccccatttgtcaattttgtcttttgttgccattgcttttggtgttttagacatgaagacagtgtggtgattcctcaaggatctagaactagaaataccatttgacccagccatcctgttactgggtatatacccagaggattataaatcacgctgctataagccataaaaaatgatgagttcatgtcctttgtagggacatggatgaagctggaaaccatcattctcagcaaactatcacaaggacaaaaaaccaaacaccgcatgttctcactcataggtgggaattgaacaatgagaacacatggacccaggaaggggaacatcacacactggggatggttgtggggtggggggaggggagagggatagcattaggagatatacctaatgctaaatgacgagttaatgggtgcagcacaccaacacggcacatgtgcacatatgtaacaaacctgcacgttgtgcacatgtaccctaaaacttaaagtataattaaaaaaaataatgctgctataaagacacgtgcacacgtatgttcattgcggcactattcacaatagcaaagacttggaaccaacccaaatgtccatcaatgatagactggattaagaaaatgtggcacatatacaccatggaatactatgcagccataaaaaagatgagttcatgtcctttgtagggacatggatgaagctggaaaccatcattctcagcaaactatcacaaggacaaaaaaccaaacactgcatgttctcactcataggtgggaattgaacaatgagaacacttggacacaggaaggggaacatcacacactggggcctgtcgtggggtcagggtagggggagggatagcattaggagatatacctaatgtaaatgacgagttaatgggtgcagcacaccaacacagcacatgtgtgcacatgtaccctagaacttaaagtataataaaaaataaatcatatcatcatctcagtagatttagaaaagcatttaacaatattcaacatcctttcagaactaaaaactctcaataaatcaggtatagaaagaatgtgcctcaacactataaaagccacatatgacaaacctggaggtaatatactcaatggtgaaaagtaaaaagctttgactctaagatcagaaccaaaacaaggatgtccattctcaccacttatatttaacatagtagttgaaattctagctagagcaattaggcaagaaaaaaggcacccaagttggaaagaatgaagttaaattgtctctgtagatgacatgatcttatatatagaaaacactaaagactccaccaaaatgctgttttaattagagcttaaaaaaataattcactaaagttgcaggatacaaaatcagtatacaaaaatcagttgcatttctaaacaccaaaaacaagttatccaaaaaattaagaaaacaatcctatttgtgatatcatcaaaaaataaaatactaaagaataccaaagaaactgaaaataaatggaaataaatggaaagatagcccatgttcatggattagatgaattaatactgttaaaatgttcatactacccaaagcaacctacagattaagtgcaattcctactaaaattccaatgacatttttcacagaaatagaaaacacactcctaaagtttgcatggaaccgcaaaagactcaaatagatgaagcaattttgagcaagaacagtaaagctggagacatcacactacctaacttcaaaattttattaatcaaaacagcatgacataaaaacagacagaaaagaccaatggaacagaatagagagcccagaaataaactcacgtttatagagtcaactaatattcaacgaaggtgccaagagtacacaatggggaaagtatagtctctacaataaacagcactgggaagacaatatccaaatgcaaaagaatgaaattacacccttatcttataccatacacacaaatcaaatcaaaattgataaagacttaaatataagacctgaaaccatacaatctttaggcaaaaactcattgacattggtcttggcaatgatttttttgatatgacaccagaagcacaggcaacaaaagcaaacctaaacaagtgggaccctaacaaactaaaaagtttctgcacagcaaaggaaacaatcaatcatcagaattaaaaggcaatttatgaaatgggagaaaatgtttgcaaaccacatatctgataaagggttaatatccaaaaatatataaggaatgcataaaattcaatagaaataaacaaacaaataatccaattttaaaatgggtgaagaacctgaatagacattttttcaaagaagacttacagataggcaacaggcatatgaaaaaatgcttgacatcactaataatcagggaaatgcaaatcaaagctccagtgaaataccacctccaactattaggatggctattatcaaaaactcaaaagaaaacaagctgggggaatgtagagaaaagggaaaagaagatccttatacactgttggtgtgaatttaaactggaatagcccttatggaaaacagcatggaggttcctcaaaaaattaaaaatagaactactatatgatccagcaatttcactattgagtatatatccaaatgaattaaaatcactgtcttgaagaggtatttgcacactcatatttatttcagcattattcacaatagccaagacatggaatcaacctaagtgttcatcagtagatgattagataaagagaacgtggtatatagacacagtggaatctatttagtgttcaaaaagaaggaaatccaacttttaaaatcctttaaaaagttaaactcataaaaacagagaggagaatggcggtttccaggaactggagggtgggagaatggggagatgttggtcaaaaggtacaaactttcagttataaaatgaataagttctagagatctagtgtacaacagcattactatagttaataataatattttttatacttgaaatttgctaagagtaaatatcaatattctcaatacacacaaaacagaactatctgaaggcactgatatgttaattatcttcattatagtaatcatttcacaatgtataatgaatatcaaaacaatagtgtacatcttaaatatatacagttttgatttgttaatcatacatcaatgaagctagaaaaaatgttgtaatttttaaaacaatagtaatataaattaggggtgaaggaattgacctatgttggagaaaagtttttgtaaactatttaaattaattggtatccattcaagctagattatttttaattgttaatttaattgtaatactaaggcaaccactaaaaaagcctttaaaaaaatatagcacttgaggctgggcatggtggccctcaattatatatataatatatataaaatatatattatatatatagtagatgaacaacaatgggatttaaatggtacactagaaaatatctgtttaacaaaaagaaagcaatagtggagaaatataagaacaaaaccatgtaagatttatagaaaatgaatagcaaattggttgacctaaaccctatcttataattatattaaagataaatgaaataaatactacatcaaaaggcagagattatcagaatagagaagaaaaatccaaaccataattcaaccttatgttatctgtatttagaatatttagagtcaagacacaaatagatagagttccatttgggcgtgaaaatatttaccatgcaaaatgtaattaaaatagagctagagcagcaatactaatatctgacaaaatatactttaacaaaaattgttgctaaagacaaaaaagaacattttataataagacacaacaattataaacatatacaccaaacaatagagcccaaaatatacaaagcaaaaactgctagaattgaagaaagatagaaaaatcaatgattacagttggaggtgtcaataccaaactttcagtaatacacagaacaacaagtcaaaagcaaaaaggaaataaaaaactacacattatcatacaacaccttaatacgatatccaacaatagcagaatacacattattctgaagtgcacatggaatattcttcaggatgacacatattaggctgtaaaacatatcttaataatttaaaagaattgaaataatacagcacatattctctgactgcaaaatattaaaccaattacagaagaaaatgtgggaaattcacaatgatatggagatttaaaaatacttcaaagtaaccaatgaatcaaagaacaaatcacaagagaaattagaaaatattttagatgaataaaactgaagaaacaacataccaaaattttgtggttgtagctaaagcagtgcttcaagggaaatgtataacagtatatccctaaattttaaaaaaatctcaatccaataacctaatttttcaccttaagaaatgagagtgaaagagcagacttaacccaaagtaaacagaaggaagaaataataaagattagcatggagataagtagtgaaaataaaaacaatagagaaaattaataaacttgaaagttggttcttctgatatatcagtaaaattgacgtattattagtttgaccgagaaagaacaaaagagagaagattcaagttactagacataaatgaaagtatagatatcaccttacagaaattaaaagaattctaacagaatattgtgaaaaagtgaatgtcaaaaaattaaattatatgagatacacaaatccctctaaaggcacaaactaccacagctggtgtaaaaacatgaatacaccatttacagttaaaaagactgaatagataaaaattttaagaagaaattgagtaagtaatttaattttcaaactataatcccaagaccagatgttttcattggtgaattctaccaaactttaaaaggattaatatctatttttcatacactctttccagaaaatagaaaaggagggaacactctataactcactgtatgaggtccgtattacccttatatcaagaccaaacatcataagaaaagaagactaaagacttatggtttctgctctgatatgtttggaagtcatcactactattgtcacaaggaaaaatctgaacaaactaaagtcaacgatttcttaaactaaccatagaattgaggtaacgggcgaaaactggagatgtaggcaaatacaaaaaaaatcacagtttatcaggagcagaaactgctgaaaccagcaactcgtatgaacatgttaagtggtaattgacaaatttctggagattgaatgtggactggattgagagttaggaactcctaagtgcccagtttttgatgaccccacacacttttgtaaactagacttccaagagccccagcaagtttcttacagtgaagactgcagaaaaatcccctgatgcttcagataggaggaagggaaaagcaactattttgaaataagcccaggggacaagtagttatttctaaacactctcagagcattttctttcacacggcagggggctccctgcaagggaagctactttgcctgagccttgtctgatgtaggagaaaaggaattggatggctcaagctccatctagcctttctgatttatataagggaagcaaaaaataggttaagaaactcttctgaaagtcacaactcagatttattttatatttatttatttatttatattttttgagacggagtctcgctctgttgcccaggctggagtgcagtggcgcgatctcggctcactgcaagctccacctcccgggttcacgccattcttctgcctcagcctcctgagtagctgggactacaggcgcccagctaattttttgtatttttagtagagacggggtttcaccacgttagccaggatggtctcgatctcctgacctcgtgatccacctgcctctgcctcccaaagtgctgggattacaggcgtgagccaccgcacctggcctcacaactcagatttaaccataagattatagaacacttctcctcccaaaacagagatatagatcaatggaacagaacagagccctcagaaataacgccgcatatctacaactatctgatctttgacaaacccgagaaaaacaagcaatggggaaaggattccctatttaataaatggtgctgggaaaactggctagccatatgtaaaaagctgaaactggatcccttccttacaccttacacaaaaattaattcaagatggattaaagacttaaacgttaggcctaaaaccataaaaaccctagaagaaaacctaggcattaccattcaggacataggcatgggcaaggacttcatgtctaaaacaccaaaagcaatggcaacaaaagacaaaattgacaaacgggatctcattaaactaaagagcttctgcacagcaaaagaaactaccatcagagtgaacaggcaacctacaaaattttcacaacctactcatctgacaaagggctaatatccagaatctacaatgaactcagacaaatttacaagaaaaaaacaaacaacctcatcaaaaagtgggcaaaggatataagcagacacttctcaaaagaagacatttatgcagccaacagacacatgaaaaaatgctcatcatcactggccgtcagagaaatgcaaatcaaaaccacaatgagataccatctcacaccagttagaatggcgatcattaaaaagtcaggaaacaacaggtgctggagaggatgtggagaaataggaacacttttacactgttggtgggactgtaaactagttcaaccattgtggaagtcagtgtggcgattcctcagggatctagaactagaaataccatttgacccagccatcccattgctatatatatatatatatacccaaaggactataaatcatgctgctataaagacatatgcacaggtatgtttattgcagcactattcacaatagcaaagacttggaaccaacccaaatgtccaacaatgatagactggattaagaaaatgtggcacatatacaccatggaatactatgcagccataaaaaagatgagttcatgtcttttgtagggacatggatgaaattggaaatcatcattctcagtaaactatcgcaaggacaaaaaaccaaacactgcatgttctcactcatagatgggaattgaacaatgagaacacatggacacaggaaggggaacatcacactctggggactgttgtggggtcgggggaggggggagggatagcattaggagatatacctaatggtaaatgacgagttaatgggtgtagcacaccagcatggcacatgtatacatatgtaacaaacctgcacattgtgcacatgtaccctaaaacttaaagtataataataataaaaaaaggctacctaaaaaaaaaaaaaagaacacttctcctcccaacaccatatcaccacatcaaccaggactccagtgtaatagcagtgaattctaactgaaagaggtgaaagacactgattgtatttaagaaagatcttctaaggaaatccaaaaatagtaggggagatcaaaacaaagatactagaggaaattgaatatgtgacacctatagctacaaaaaaattaaacataacatagccctaaccatataaacataaaacctcacacaaagacctattatctgagattctgttgcctgatacattgcgttttatttcaataaaaaaattagagggtatgttaaaaagcaggaaaagttagtctaaagagacaaattgagcctcagaagtaggctcagatatggcagagatttggcaattatacctagagtttaatataaatgattaatataataagtgttctaacagaaaaaggcaacatgcaagaacggatgggtaatgtgatcagcaagaaggaaactctaagaaagaagtcaaaaggaaatgctaggaataaaaacctacaagaaataaagaatgcctgtgatgggttcctcagtagactggacaaggtcaaagaatcagtggatttgaaaatatgtcaacaaaaactgccccactgaaatacaaaagaaaaatagaattttaaaaacgtaacacaatctccaaaacagtgggacaattacaaaagatgtaatgtgcctaatgcaaatgacagtaggagtataaagggagaaaggaatagaaaatctgaagtaataatggcagagagttttccaaaattaatgctaaaccacagatacagcaagcccagagaacaacaaggaggaaatttagtaaagcgtctgcaaccaagtatgtcatattcagactgacaaaaccaaaggtgaagagaaaatattgaaagaagacaaagaggaaaataaatatcaagaaaatacatacgaaatacatcatacatacataagaaatacatcagaccatacaagcaagaagagaatggagtgaaatgtttaaaatgttgaaaaaaaaactatcaatttgcaattctgtatccagtgagattatctttcaaaagtgaagagggaaatggcagagaagtcatctccaagacctatggtttcccttcacagaaacactgaaaaatatgaacaaaagtggtcagaattaactttctaagaattctataaaatggtaaaatgtttacaccagtaaagcaaatgctgaattgagaaggcaacttaaaaaggtgaagaaaacttcgtattatttttatgtgtccttgccccacgtccttccctaccttagtcttgaagatggcagcccacatttctactgtggggctctggtttctgtttcctggttcaagagggagaataacagaccttacttttagtcattattatttccttctttctgatttccttgggtttattttgctcttctttctactttattgaaatgagaactaagattatgatttgagacatttttctaatgtaagcatttagtgctataaatttccatctcaacactgctttagtcacatcccacaaatttttatatgttgtaatttcactttcatttagttctatttttaaattttttctttttatacttcctctgactcacagattacttagaattgtgttgttcagttttcaaggatattgtagattttcctgtttctctgttgtctaatagttctgttccattttgtacagatagctcacgctgtatgatttcaattttttaaaaaattgtgctttgttttatggcccagatatggtctgtgctgtgaatattccatgttattataaagtatgcctgttatattattatatatatataatatatataattataaagcatgcccgttttgtattgttagcagagtattctagaaatgtcaatgagatcttgttggttgatggtgcttttcagttctatatctttgctaattttttttttttttgcttagtagctatatgagattctgagagaggaaattgaagtctccaaccataattgtggatttgtctatttctcctatcagttctatcagtttgtgcatcacatatttgaggctctgttgtttggtgcatacacaagtggaatcattgtgccctcttggtggcttattttatgattatatagtgcctatctttgtggtatttttatttgctcttaaatctactttgtgttatattcatatacccattcttttttaaaaaaaattgtttgcgtgatacatcttttccattcttttaatctcagcctatctgtgccattgaatttgaagtgagttttcatatagagaacatattattgaatcatcattttaaaaattccttttgccaatcttttttatactgaggtaaaattgacataaaatttatcattttaaagtgtacaatacagtggcatttggtaatacacatgttatgcaacgttaactctacctggctcctaaatgttttcatcatccccaaaaggaaacttcatactcattaagcagttaattcccattccttctctcggccactggcatccgcaaacctacttttctgtctctatgaatttacctattatggatattttgtataaattgaattatacaataagtgacctttatgtttggcttcgttcgcttcgcatactatttttcgatattcaaccatgttgtagtatgtatcagttttatttgaataactcaattctttttgttgtatagctaaaagttgattcctaggtcataatgataattctatgtttagtttattgaatagctgccaaagtttttccacagtggctctgtcattttaaaatcccactagcaatggatgagagttccaatatctccacatccttaccaatattgttattttatatttttataattataattttcctagtgaatacgcaatggtatctcattgtgtttttggtttgcctttccctaatgactaatgatgttgagcatcttacaatgtacttgttaactatttgtgttctttagagaaatgtctattcaagtgccttgtccattttaaaaatcgagttgtcttgttgacttatgagttctttaatacagtaaacgcttatcagatatgatttataagtattttaacccattctgaaggtcaccttttcacttttgtggtagaccattatgcacaaaggttttaattttgataaatccaatttatccgcttttgttgttgtttttgttgttcgtgcttttgcaaaacctagtgtcatgaggttttctcattatctttggagaattttatagtttgggtctatacatgtagattattgatctaatttccattaatttgtgtgtatgctacgaggtaggggtccaaattcaatttttgcattgaattgaaaattcatattttcagtttcaaatttcaactgcatattcagttgttgcagcacaatttgttgaagagatcattctttaccacagggaatgatctgggacccttgtcaaaaatcaattgatcatagatgtatgggattatttcagactttagatcttgttccatgaatatgcctatttttatgccagcactgcagtattttcattactgtagctttatcataaattttgaaatcaggaagtatgtatcctccaagtgtgattttcatttgctagagtgttttgactatttggggtctttgcaattccatatgaatttcagaattggcttttcatttaaaaaaatggtagttgagattttcataggaattatattgaatctacagatcactttgggtagtattgccatcttaacaatattgtattccaatccataaacacggatgtattgccattcatatctttttttcttttctttcggcaacatttagtatatgacacttgtaactccttggttaaatttatacctaagcattttatcctttctgatgctgtttaaatggaattattttattaatttctcttttagatggcttgttgcaggtgtatagaaatagaactgattattgtgcttttattgaattatctgaaactttgctgcatttattaactctagtaggttttttttttctttaaagttgtctatatatcttgctctgtgaatagataattttacttcttgatctccaatatggatgcctttctttctttttcttacctaattgctgtagctagaattttcagtataatgtatgatagaagttgttcacaactatccttgtcttctttctgatcctaggggtatagctttcagtctttcaccattaagcacaatgttagctgtggggttttcttagatgccatttaatatattaaggaagtgctctgctatttctaattggttgagtatttttattataaaatggtgttagattttatgactttatgtactgcataattgagattatcatgtggtcttttcattcgattaatgtggtatattttatgattttcatatgttgatccacctttatattcttggggcaaatcccactgtgtacacgggttttttagggtctcctaattttcttcattctttttcttttctctccctgagactgaataacgttaactgacctatcttcaagtttactattttttcttctgctgttcaaatctgcttgaacctatagagtgaatttttcattttacttattgaacttttcagctccaaaatttctctttggctactttgtataatatctatctctctatagatattctctatttggaaagacatttttctcctggttttctttacttatttgtattttttaaagtctttaagcatatttgagacagttgatttaagtatttgtgtactaagtccattgcctaagcttttgcatagagattttatattaatttcttttttttctgtgaacaggtcttttttttttttttttttttttttttttttttagaaaactggacattttgagtagtataaacgtggctattttagaaataattttcctccctccttaggttttgtttccacttgttgcatgttgctgttgtttgctcattagtgacttttctaaagtattttgaaaagtctgtgttcttgatcatgtgggtccattgaattctgtattctgttaatttcatagtcagctagtgttctgaaagttcccttaagtgcatagagccaataaaagaaaaagaaaagaaacacagaaaaagaaaagaggaaaaaaggagggaaagagatttaaaaaaataatgtcggttgggcatggtggctcatgcctgtaatcccagcacttttgggaggccgaggcaggcaaatcacttaaggttgaccatcctggccaacacggagaaaccttgtctctactgaaaatataaaattagccgggcatggtggcacatgcctgtaatcccagctactcgggaggctgagaggtaggagaatcacttgaactcgggaggtggaggttgcagtgaactgagatcacaccactgcactccagcctgggcaacaagaatgaaactccatctcaaaaaaaaataataataataatgcctttgccgatttgctctgtgtttgggccctcattcaatgcctagtcaggccatttacaactctctcttaactttcactacctgcttgtgtactgactgaaggccacctataggtgaaagcttaacatcatctcagatctttttggaccatgaatcctaccctgggtatgcacatgatcttcttaatttcccagtagatgcaagagttttagtgttttaaaagtccttattccctcatctatcttcttttctgacctttttcagtctgcttattgttcatctgaactgacatcctttgccccaagcggctgtggcaaaaacttttacctttaaatgctttcaccacaagccacttgggaagctgccccagacctgggactgctctgaccctgatgaaacaaagacaagaccttgtacagccaggcagccataagacaagtccatacccaaaccacagttctttcagaataaggtctatattggattctctggccctagtaaccagcatgagtctgggcttgccatcttcatggccacttgtcttagtttgctagggctgccataacaaaatatgagagactgagtggcttaaacaagagaaatttattttttcacaattctgaagaccagaagtccattactctgaaatctctctccttggcttgcagatactgccttcttgccgtgtcctcacacagccttttctctgtgtacacatccctggtgttttttaagcctgtccaaattttctgttcttctgaggacaccaatcagattggattagcgaccacccatatgatcattttaccttaagtacctcttcaaaggtatcagagtagtatatttgctacagttgatgaacctgcatacaacatcatcacttgaggtctgcagtttacattagagttcatcgttagtgttatatattctagggtttgttttgttttgagacagaacagagtcttgctgtgttacccaggctggagcgcagtggtacaatctcattgctacctctgcttcccagattcaagcaattctcatacctcagcctcctaagtagctggaactacaggcgcacaccaccatgcccagctaattttcgtatttttagtggagatggggtttcaccatgttggccaggcaggtcttgaactccttgcctcaagtgatctgcccgcctcagcctcccccagtgttgggataacaggcatgagtcaccatgcctggccttattctatgggttttgaaatgtataatgacatgtatccatcgttgtagtattagatagaatagcttcattaccctaaaagtcttctttgcactgggttgagttttaaaagctctttgattattttatgacagttccttattagatatatcttttgcaagtatttttatcagtctgtggttatcttgtcttttacagagcagtaatttttaattttaataaaatccaatttgtcaattacttatctcatatgactctggtgttacatctaaaatgttaccaccatactcaaggtcacctaggttttctctaggaattttatggttttgcattttacatttggtgtatgacccatttgaagttaatttttgtgaggttgtaaggtctgtgcctagattcattttttttttttttggcatgttacttcagtattcataagaaacattgttctgtaatcttctttcttatagtatcttagtcttgctttagtttttgggcaatgctggcctcactgaataaattcaaagtgttccctcctcttcaattatttggaaaagtttgagaaagactattgttaactgttttctaaatttttggtggaatttaccagtgaaccaactggtcctaggcttttctccagtaggtggttttgattatgctttcaatctctttacaagttacacatctatacagacttttataattcagtcttggtaggttgtgcgtatttaggaatctgaccacttcatctaagttatccaattagttggcatgcaattattcgtagttctctgaataatcatttttatttccacaaaattggtaatatcccagtttccattttttatttcattgaatcttcttttttcttagctaatctagctaaatgtttgccaattttgttgatcttttggaagaaccaacttttgatttattaattttctctactctttttctgttctttatattatttatttccacactaatctttactattttcttccttctgttggcctttaattttttttttttaatttttaaggtgtaaatttaggttgagaaattttttaaatgaaagcatttagagctataaattttccttctggtgttcctttcactacctgccataaattttgatatgttgagtttttgtttgtcttggagtattttctaatttgtcttctaatttcttccttgacctattggttatttaaatgtatttaatttttgcatattgtggatttcccagttttccttctgttattgatttctagttttattccattgtgatcacagaagatattttgtataatcgcagtctattaacatttattaagtcttgtggcctaacagaggatctatgttggagaatgttccaagtgcaattgagaatactattctggtgctattaggtgaagtattctctatatgtctgttaagtccaattcatctatagtgttgacgtttcctgttccttactgattttctgacttattattctatccattattaaaagtggagtggtaaagtctctattattgtagaactctctgtttttcaagtctatcaatatctgtttcatatattttggagctctgtttgctgcatatgtgtttacaattgttatatcttcttggcaaattgaccagtttcatcaacataaaatataattcttattgtcttctaacagtttatttttctttttacataaagcctattttatctgatcttagattccctcacactccaccccagcacgcttttggttacatttacataatatatcttttccatcctttcattttcaacctgtttgtgtctttagatctaaagtgaatgtcttacagacagcataagctatgtcattaaaaaaatccattctgcttatctctgccttttgactggggagtttaatccatttgcatttaaagtaatcactgatcattaaatactttcagtattttgttgttttatgtatgtcttataactcttttgctcttcatttccttcaatattgcctttgtgtttagcttatctttttgtgtcacactttgatccccttctcatttcttttttatattttctttgtggttaccaggaggacaatgtatcaacttttaaagttattacaattttatttttttaaatctctcccattcggggattttaggaaggttaaataataatgtaaatgagatacctagaacaatataagcattcaggaattattaactcaattccaatccttcctccacctccacctctttctctgtgagattatagaaaagatgacaaaaaggatgttttctgagccctttaattgttgagaatgatctttgagaaaaagaaaaaaaatgaaagcactaggaatgtacaacagcctggaagtataattaagtgtaaattaaatagataaaagttataagcagaggaaagtatagtagaactcagtatttaaaagagaatcaatgtgaaaattatataaatttatgtaaaataaaactaccagacaaatctgatatccttaggatttttctttctttcatgtgatttctaattgctacatatgacactaaaccattgatctgagctgtaagagaaactggaaattgttctgttatcttttgtaagatttctagaacattttgccctcagacttaaatgccaacgtatttctcacttattgtttactgcttttggatttacatatgatttgattctttcttatctcttatccttacaatgtaattcaaactgatgccaatttaagttcaattgcgtacaaaaactctactcctatgcagctccgccccatctaatttacattattgatgtcgcaaattccatctttgtacatagtttacatattaacatggatttatacatttttatgtatttggtttttaaatcctgtagaaaataaaaagtcaacacaccaatattaaaataatactggtttttatatttgtccatgtgcttacctttatcagtgttctttacatctttatacgggtttgagttactgtcttgtgtcctttagttccaacctaaagaactccctttagcatttttatagggcaggtctagtggtaatgaactctctgagtttttatttagggatgtcttaatttctagctcctgtttgaagtaaatttttctggatatacaattctctgttgattgatttttgttcattttcccttcagctcttttaaatacattatcccactttcttctgccttccaaggtttctattaacaaaattcagcttataatcttattaaagatctcatgtacatgagtggcttctctcttgctgttttcaagattctgtgactttggtttctgatagtttaaatataatgtgtcttattgtgggtctctttggatttatcctagagtttcttggtcttcttacgttggtatatccatgtatttcaagacatttgagtagttttcagccattatttcttcaaacaatctctcctctttggggacttccattttacctatattggttcttttgatggtgtggcaccagtcccctagactttgttcacttttttccagtcttttatttctgcttctcagactcaacagcttcaagtgttctgtattcaagtctgctgactctttcttcttccagctcaaatctgctgttggatccccccttgtaaaatttttaattccattttagtgtttttcaagttaagtatttttattaggttcctttttataatttctttttgttgatattctcattttattacacataatttgtctgatttccattagtttttttctttgttttcctttagctctttgaaaatatttaagacattttaaaagtctttatccaagttcaatttctatggttctgtagagatattttctgccagtttatgttcttcttttccatgggccatgttttcctgtttctttgtatactttctaatttttggttgaaaactgagcatttgaaaatagagccaactttcccagtttctgcagagagtctttatgccacagtattcgttcactgattaactgggtatatctaagcttagggagcagctgagtcaaaagtttaaggtcttctcaggtcttttctgagtatacatgtttcctatgcctgtgtgaaatgttctcaatttccctatataaacagctacttcttcttttttttttttttttgagatggagtctcgctctgtcacccaggctggagtgcagtcatctcagctcactgcatcctccacctcccaggttcaaacaattctcctatacaggtgtgtgccaccacgtctggccaatttttgtatttttagtagagacagggtttcgccgtgttggccaggctggtctcaatctcctgacctcaggaggattacaggcttgagccacagtgtccagcctaaacagctacttttgaatgctttaatttcctgaatagtctcaacccagtttttccttgaggtcttaggtggtccattgtatgtctccacccatagttgcttgccccaggcatctgtgggtctgtggtaccactgcagctttcaccacctgtagctgccacctttccctatctgagatccaggttaggtgagagagatcattccttcacgcagtcccatgacaggttggaacatttcaaataaggtctgttctgctcctctggttgaagggagaaaattgggaaccggtttcccaccttctacaaaccaagatctcatgttgccacgggagtggcagggcaagtgcaagtgaaaatgccatacaattttctaccattttgaacgcgggtttttcttcaatggtcatttgcttggttgctgtaggcctttcactgttttccagagctcccataagattactttagccagttttttgttctttcctgatgcttccctggcagagtaagggttggaacttccaccattttgctgattcataactctgtagtcagttttaaatatattgatacttgagtttgttttatggcccagaatatggtcttggtaaatgtttcacatatactcagaaagaatgtgtattctgatgttgttacatgggctgttctataaatgttacttaaggtggttaataatgttgctcaagtcttctatattcttgctgattttcttttatttatttattttattttttttattatacttttaagttctagggtacatgtgcacaacatgcaggtttgttatatatgtatacatgtgccatgttggtgtgctgcatccattaactcatcatttacattaggtatatctcctaatgctgtccctccctgctccccccaccccatgacaggccccagtgtgtgatgttcccctttcctgtgtccaagcgttctcattgttcaattcccacctatgagtgagaacttgcggtgtttgtttttttgtccttgtgatagtttgctgagaatgatggtttccagcttcatccatgtccctacaaaggacgtgaactcatccttttttatgactgcatagtattccatggtgtatatgtgctacattttcttaatccagtctatcattgatggacatttgggttggttccaagtctttgctattgtgaacagtgctgcaatgaacatacgtgtgcatgtgtctttatagcagcatgatttataatcctttgagtatatactcagtaatgggatgggtgggtcaaatggtatttctagttctagatcttgaggaatcaccacactgtcttccacaatggttgaactagtttacagtcccaccaacagtgtaaaagtgttcctatttcttcacatcctctccagcacctgttgtttcctgactttttaatgatcgccattctaactggtgtgagatgggatctcattgtggttttgatctgcatttttctgatggccagtgatgatgagcattttttcatgtgtctttggctgcataaatgtcttcttttgagaagtgtctgttcatatcctttgcccactttttgatggggttgttttgttcttgtatatttgtttgagttctttgtagattctggatattagccctttgtcagatgaggagattgcaaaaattttctcccattctgtaggttggctgttcactctgatggtagtttcttttgctgtgcagaagctctttagtttaatgagaccccatttgtcaattttggcttttgttgccattgcttttggtgttttagacatgaagtcctcgcccatgcctatgtcctgaatggtattgcctaggttttcttctagggttttttatggttttaggtctaacatttaagtctttaatccatcttgaattaatttttgtataaggtgtaaggaagggatccagtttcagctttttacatatggctagccagttttcccagcaccatttattaaatagggaatcctttccccatttcttgtttttgtcaggtttgtcaaagatcagatggttgtagatgtgtggtattatttctgagggctctgttctgttccattggtttatatctgttttggtaccagtaccatgctgttttggttactgtagcctcgtagtatagtttgaagtcaggtagtatgatgcctccagatttgtccttttggcttaggattgtcttggcaatacaggctcttttttggttccatatgaattttaaagtagttttttccaattctgtgaaggaagtcattggtaacttaatggggatggcattgaatctataaattaccttgggcagtatggccattttcacgatactgattcttcctatccatgagcacggaatgttcttccatttgtttgtgtcctcttctatttcgttgagcagtggtttgtatttctgcttgaagaggtccttcacgtcccttgtaagttggattcctaggtattttgttctctttgacgcaactgtgaatgggagttcactcatgatttggctctctgttagtctgttactggtgtataagaatgcttgtgatttttgcacattgattttgtatcctgagactttgctgaagttgcttatcagcttaaggagattttgggctgagacgatggggttttctaaatatacaatcatgtcatctgcaaacagggacaatttgacttcctcttttcctaattgaataccctttatttctttctcctgcctgattgccctggccagaacttccaacactatgttgaataggagcggtgagagagggcattcctgtcttgtgccagttttcaaagggaatgcttccagtttttgcccattcagtatgacattggctgtgggtttgtcataaatagctcttattattttgagatatgtcccatcaatacctaatttattgagagtttttagcatgaagggctgctgaattttgtcgaaggccttttctgcatctattgagataaacatatggtttttgtctttggttctgtttatatgatggattatgtttattgatttgtgtatgttgaaccagccttgcaacccagggatgaagcccacttgatcatggtggataagctttttgatgtgctgctggattcagtttgccagtattttactgaggatttttgcatcaatgttcatcagggaaattggtctaaaattctctttttttgttgtgtctctgccaggctttggtatcaggatgatgctggcctcataaaatgagttagggaggattctctctttttcctatttactgtacatttattccaccagtgactaaaacaggtgtatcaataaaatctgttccctcaggttttgcttcaggtattttgagggtctgttatcaggtgcataaacaagattgttatgtcctattcttaaattaatctccttataattatgaagttaattttttttttcttgagatgcagttttgctctgtcgcccaggctggagtgcagtggcacaatctcggctcagtgcaacctctgcctcctgggttcaagcatttctttgcctcagcctcccgagtagctggggttacaggtacctgccaccacgcccggctaatttttttgtatttttagtagagatggggtttcaccatcttggccaagctggtcttgaactcctgaactcttgatccacccaccttggcctcccaaggtgctgggattacaggtgtgagccactgcgcctggacctggcccgaagtaaacttctttacccttgctaatgatctttgctctgaagcatgctttgctggtattaatatagtcattccttctttctttgattcatgtttgcagggtatatctgtttccattcttttacttttaacctattgtctttatatttaaagtgcatttcttgtaagtataattggtttcttaaaatccaattatctgccttttaaatgtcatttttatatgatttgcataaatatgattattattacagctaaattgaaatctgtcatcttgctatttggtttctatttatcccatttttttcccctctttttttgctttccttgagattgaacattgtattagttttctagggttgctgtaagaaagtgacataaagtggatggcttaaaacaacagaaatttattgtttcagtttggaggctagtcatctgaaaccaaggtgtcatcagggccgtattctctctgaaacctgtagggaagaattctttcctgcctgttctagcttctagcattttccagcaattcttggcattcctttgcttgtagatgtatccctccaatctctgcctctatcataacatagccatcttctccctttatctgtctattcttctcatcttataagaacattaattactgaattggggcccagcatagattaggcctaatctcatcttgaataggttacatctgccaaagattcttcttccaaataagatcacttttacagcttttacaggtactgagagttagaacctcaatatatcctttggtggggaccgacctcttacccataaaaagtattttatatgattccattttatctcctttttaggttattaactacaatttttttttcttttttttgagatggagttttgctcttgtagcccaggctggagcgcgattttggctcactgaaacctctgcctcccgggttcaagtgattgtcctgcctcagcctcctgagtagctgggattacaggcatgtgccaccgtgcctggccaatttttgtatttttagtagaaacagggtttcaccatgttggctagggtgggtctcaaattcctgaccttaggtgatccacccacctcggcctcccaaagtgctgggattacaggcgagagccaccacgcctggctttataatttttttttaattcagtggatgttttagggtttatagtatacatctttatcacagtctagctccaagtgatatatccctttatgtatagtacatgacccttacagtagtgcatttccatttttcctctctggcatttaggctattgcacacacatacactcaattcatccctttgtgtagatccgtatttccagctgctatcttttgcttctgtctgaaatatatgtatgatttcttttatgactattttgagaaatttggttatgtgcatttgtctatttttcttatgtacttttagctcatcaatcttaagtctgtgagtttatagtttttaaaaacaaatttgaaattatttggctattatttcctcaaatatttttttctgccgcccctgctttccctttccttagggatctctgatttccacctatattactctgattgaagttgttccacgtctcttttgaaaatctctgaaaaatcttttatcatttggataatctgtatttgtacatcttcaagtacattaatattttcttttgcaatgtttaatctgctgttaatcccatgtagtggattcttcatctcaggtattgctgttttaatctctagaaattccattgaagtcttacttgatgaaaaaggcagataaaaacaaatgttggcaaagatatggagaaatcagaatctgcacacactgatgatgggaatgtaaaatggtcaaggcaatttggaaagcagtctggcagtttctcaaaaggctaaacgtagttcccatatgacagcaatcattcatctaggtatatactccagagaaataaaaacatatccacaccagaacttgaacattaattttcatagcaacattattcctaggggtttaaaattttttacattatttttatttaaaatagagacagggtctcactacgttgcataggctggtctggaactcctggaattaagcattcctcctgcctttgtcctgttttctccactggaaaagaataaaactttgtacacttggactaacaactcccgattccctcctttaccaacatgccccacagcctctagtaacttactctctactttcatgaattcaacttttttaagattccacatataagtgagatcatacaatatttgtctttctgtgcctggcttatttctcttagcataatgtcctccagattcatacatgttgtcttaaatgacaggatttaccttcctttaaaggctgactagtacttcattgtgtatatgtatcacattttctttatccacttatctgttgatgggcacttaaattgtttcaatgtcttggctactgtaagtaatgcttcaataaacatgggaatgaagatatcccttcaacatattgatttctgttcttttggataatactcagaagtgagattactggatcatatggttgttctatttttttcagaaacctccatactgtttttcatagcggctgtactaatttacattcccactaacaatgcatgagttcacttttctggacatcctccccaacacttgttatctttcatctttttcataaaagccattatataataggtgtgaagtgacatctcactgtggttttgatttgcattactctaataattagtgtgagcattttttttttttcatgtaccgaatgtcttttgagaaaggtctcttcattcctttgcccattttaaaatcaggtggttttcttgctcttgagttgtttgagttccttatgtattttagatatttacccatttccagatatatcatttatattttttcctattctttgagttccctcttcactgtgttgtttccattgctgtgcaggtcttttattttgatgccaccccatttgtctatttttgccatgcttttgcagtcatatccaaaaaaatcattcccaagaccaatgctgtggagatttccccctatgttttcttcagtaggtgtacagttttaggtcttatatgttaagttttaaatctatttttttatatggtgtaaataagggtctaatttaattcttttgcatgtggatatccagttttcccaacaccatttattgaagaccctgtccttttatacttttcagtatgcagatcttttacctccttaaatttacacctcagtatttaatatttgttgctattatgagattttcataatttccttttcagatagctcattaatagtagatggaaacactactgatttctgtaagatgattttgtattacggaactttactgagtttgtgtatcagttctaccaggttttagttttgttctggtggagacattacagttttttgtatatggttatgtcatcagtaattacagatgatttaacctattcctttcctattaggatgccttttttttctttctcttgtccaactgctctggttaggacttctagtactatgtcaaaaagtgatgagggtcgtacatggcctccatacctaatctgttgagagtttttaccatgaaaccaggttgaattttgtcaaatgctttttctgcatccattgagatgatcatatgatttgatttacaccctccattttgttatgtggtatatcacactttttgatgtgcatatgttgaaccacccttgcatcctaaggataaatcccacttcatcatggtgaatcattctttgtattcgtgaatccagtttgctaatatattgttgaggatttttgcatccatgttcatcagggatattactttgtaagtttctgtccttaaagtgtctttctctggctttaataacagtgtaacactacccttgtaaaatgaatttagaagtattccctctgcttcattgttttggaaaagtttgagaatttttattagttctttaaatgtctggtaaaattcagtagtgaagctgcctaatcctgggctttcctttggtgggatactttttattactggctcaatctcttttcttgttattggcttattcagatttgtttcttcatgattcactctttgtaggttgtatatgtctaggaatttattcatttctttaggtcatccaatttgatggtgcataacttcatagtagtttcttataatcctttgtattttggtgatatcagtagtaaatgtctcctctttcatttctgatcttatttgagtactctttttttctcctagtctaggtaagaatttgttgattttatctttcaaaaaaaaaaaaaaccaactcttagcaactcttagttttgttcatttttttccagtctttatttcaactgtgatctttgttacttacttctttatgctaactttcgggcttagtctgttcttttcctagttcctttaggtgaaaagtgagattgtgatccttcttctttattggcgtaggtttgtatcgctataaatttccattaggactgattttgctgcatcacataagttttgtttccattttcatttgtctcaaggtaattttttatttactttttgacttcttctgtgaactattagttgtttgggagcatattgtttaatttccacatattgctgtattttccaccagaattgattcttgttcttgatttctagtttcacgccattgtaatcagaaaagggatttgatatgatttctgtccacttaaacttaagattagttttgtggactaacatatatcctggagaatgttccatgggcatttgagaacaaaatgtattttgctgcttctggatggaatgtttcatatatgcctgttaagtccgtttggtctaaagtgtaattgaaatccattgtttctttattgattttctgtctaggtgatcaatctgcccatggtgaaaagtagagtattgaggtcccgtattatagtattgcagcctatctccctcttcacatcatttaaaaattgctttatgtatttaggtgggtcaatgttgggtgcatatacttttacaattgttatgtcttcttggtgaattaatccctttatcattatataacaaacttctttctttttatagtattgacttaaagtctattttgtctgatagaagtatagctacccctgctctcaatttccatttatatagaatatctttttccatcccttcactttcagtctatgtgtatgtttagtagaaaagtgaatctcttgccgggcgcagtggctcactcctgtaatcccagcactttgggaggccaaggcggcgggatcaccagaggttgggagttagagaccagcctgaccaacatggagaaaacctgtctctattaaaaatacaaaattagccaggcgtggttgtgggcccttgtaatcccagctactcgagaggctgaggcaggagaattgcttaaacccgggaggtggaggttgcggtgagctgagatcatgccattgcactccagccttgacaatagcaaaactccgtctcaaaaaaagaaaaagaaaaagaaaaaaaagtgagtctcttataggcagtatgtggttgtgacttaaaaaaaaaaaaaaatccattctgtcattctatgtctttttgttggagaatctaatccgtttacattcaaggtaactattggtaagaaactgctagtgtcattttgtaatttgttttctgattgttttgtaggtcccttgtttcttttttccctattgctaccttcctttgtggtttggtggttttctgtggtggtgtgctttgaatcctttcttttatagtatatgcgattaccattgtatttgctgtaaggctaacttaaaacattttatccttaggctactttaagcgataaaaacttgcctttagttgcatacaaaaactctacgctttcacaacccccccgcctttcgtgattttgatgtcaaagtttacacttttttaaatttgtatctcttattgtagctacagttacaattacttcttgtagctacaacttattgtagctacagttgtttttaatagtttcatcttttaaacctcctaataggaataacattgctttacctgccacctttacaatactagagaattctgactatgaattacttataccatttagttttttacttttatgtttctcattaactagcagtcttttatttaagcctaaagaactcccttttagtaattccagtagagcaggcctagtagtgacaaactcccttaggcattgtttatctggaaaagtgtttatttctccctttgccaagtaaagtattcttaattaacagctttgtttccttcagcactttgaatataccatcccactctctactggcctgtaaggcttttgctgataaagccactgaatctgtattggggctaccttgaatgtgatgtttcttatctttgctgctttcagtattctttgtctttgatttttgataacttggttgtgatgtgtcttggtgaactctttaggttgaatctgatcggtgacctcagcttcctgttcctgaattttgtcatcttttctcagatttgggaatttttcagctattacttccttaaatatgctttctaggcctttttctttcttttctccttaaggacctcctattatgcaaaagttagctagcttgatgtgtcctgtaattcttataggcattcttttttgtttttgtttctcattggataatttcaaatgtcttacctttgagctcattgattcttctgcttgatcaagtctgctgttgaagcgttctacttagattttcagttcagttactgtattctttatctttagaatttctattgtttttgtttatatttgttaaacttctcattctgttcagatgttgttttccaaatttcatttttctatccatattttcttgtactttgttgaacttaagaggattagtctaaattatttgtcatttcacaggtctccatttcttctgagtctgttactggagctttcatatccaatgtacaccagaaactttgctaattccacagtaaatgttagaaatgggtttttattgataaaatcagtggcttgctaattagtatgttagaagctggcttgcattggtgaagttgagggtattcgatatacgtatcccggctaaaatacttctaaagaacctctccagctttgcaagaatagagtataggaatctgaggaggcctttaacatggccctcagaaaggacacacagggcttgacctctaaacatataaacatatacagaaacgaggtcagaacatgttttgactgatgccagtagtaacacagcagagcctattgctggtcactgttaccaataccttgtgtaataaacctttcatttaaattgagaggttgtaagccccgaaaaagcaaagggcttacagtacctcttgcctgaacactcctgtgtgtgctttctaagaaatgcttttaaaataatgcctgtggcacaaattgatttgacactggctctctttataagctgctatcaaggttgtggggaatagctaactcttacccactttccctgacaaataggaacccgtagttacctaccaaaagtatgtaaaagctatatccgacccaaaggccagttaggtcaaaacaccttgaaaggagctcagtttaaggaaatcagtggtgtcacagtgccccactagcgtgtaaaagttttcatagtttgactatcggatgtgcttagtttcacagctgagtcttaccttgtgatacttttagagcaaaagtcaaatcaaagatgatttaaaaaaacatttcaaagattcataaagaataaatgcctcctcaggaagtcttctggagttctgcccacttcccttaggtggctctttactgtgcccatctcatagcctgtctccttccacttggtgtattgcagagtaaagctcactgtttacaggggtggtagaaagtgtggtcctttcccagactcctttttcccttcctcttctcatttttcagaagatgtgtttgataataaacgaaacaaaatgactaacacattgagctgagctacataagcagatgtcagtttgacgtgaagagtttaaaagatctatgcattatctggggactcctcccccagacctgaaggatcaggtgctgccttctatgccacctgtgcagacagcaaaagaggaaaaccatacccacgttcagtatgaacaaaggggacatttgaactctgtgtggacccctcattggaagggtgtttcttctcctgctgcatccacaaagagcactccttagccttgccttttgtcagttctctctccaataaggcttgagcagagacaacccagtgcagttcagagagactgaagtctggtgttccaggtctgagtcctagctctagctctctgtgtaactttgggatgtcccaaagtaacttttcacaacttgataggtgttaacttgaattttggatacaggtgactcttagcccatcccctctctgtgcttcagatatgtcatcacttgggccatatgacctctggacacctttcctactttccacaatttcagagcagcagagcagactggagctcctgctgcctctgagcttcagtgaattatcactcgttggagggaagcttcaagcattttgttatctttcaagagcaaacacagtgtctgtcagcaagaatatgtagcagatgctagtgaacagcagtgattagggttgaatgctggatttaaatatggagcttaggctgtgaaggaagcctgaagaacctagagccccatgaagctgccctctgtgagatctgacaccatttcccactgatgagccatgggtctaatgggtagcactgattccacatacagtatgtgagtgcaatacagtgaaagcaaagagaataaaatgatggctaacatgatgttccaaactttaaacaggagaaaaacacacaattccattatgtataagaacccacacagagatcaggagaataacctcattggagaatgaatgacctgtgtggggaatttagggtagagttgagattgaaaaaatgggccgaagtcaggtggccaagggccttaataccttgtatacaagatgtgtagtcaaggaagaccatgccttacttatgcatcaattcccttgggcctacaaagagctgcctagcctgggactgttgtagagaaaagctacagtgttccaatgacacagggactcctccatgtatgtatgagtgcccagctggctctgtaataaatcttatttttatttattaacttttcttgcgcattggcttgatgcatcagttggaagtcagaggccaaacgaagtgaacactgagccaaaggaagttctcagcctttagggaggcagaattcactttaaacacaataaacaaatgaactcacattatacaggagagagtcagaagatcccagtggctggtgtcatcgggccatatttgcccgaagtgcctattccttataggaacccactcccagggttgatgggctacatccttaggaggctttatgcctatgttctcctgaccactggctcctccagggctggccttttttagtctctctgtagaggttcctgtagctggttggatataggctttcacagaagggtcagtgccttgggtctggttacaggactgttaatcttgctttgttaagagtaatgttatttccccatttccaaattctccagggagatggaatgtcaaagatagtatgactgtagcacctaaatcctgggttccagaagcagagaagagaatacactgaagctgtagaaaggcctattagtccatgtcagagattaactggatgcgaggaccatttctgggatggtgtatacagaactggagaactggatagggagtcagaaacaaagagctgaagatgatgcctttgaagtttccaacgtggataactaggtcaacagaatattactcaagaaagtattaacataggattgagatgcagtcagtagtaatggaattgaaatttcaaagtatatacctcatggatctcagggggtgttgagctgatcacctgggctaacactcctatgaccctggggaaaatcaaatgacctggtactgtagccatggtaggggtgtcatcaccttaatccaactgggacagtgctgtttgatattcatctggaacttggtgcagacccacattttgctgggtttcaccacaaccaaggcttttttgattcttttctcttttaacatcagtacatcactgcaaagttaatcctcatataataggagatgaaactaattgcttataaaaacaagatttttacaacactaaaattgttcaagcatatgggcatatttatagttgcaggcagtgtttcagatgcagactgttcttggctgcagtggttgtttacaggcagcatctgttctgattaaatatttgatgattatccccgaatgttttaaagcatagtactgggctctgctgactgtacaacaaactggcatttttgacctatagggcactgggctaggagatacagttctgagggaagtgaaagatagttaacaactgcacaactgaccctttattagttgcaataaagcaatccaaccacccaacccactgtgatggctttcctactatttaaggttggtggtgtcaaagagacaccctcctgtacagtgtgcagtgaatcaacatcatttccacaaaacctccttcctgcacaaaggaattatcatactttgttacgaagtaaaattttcctgtatcagtcacaggagttcaccagttaagatactgttagttgaagacttctggggtgacttaatgaaatagctcagccatctggtttaaaaactggattcttctatccctccacacagctgtccatgcacctgcatcatctcaaggctggtctccctggtggtagaaaggctgacagtaaaaactggagccacatgattccttgcttaggcagtgtttcttcatactctcacatgagagcaggcatgttctttccctaggctcacagtaaacactctgtcaaatctcacaggcccaaagtgcttttggttatccccattccaagccaatctgtggcatggaagatagcattaccctgactgccttagactaatatacctactccacttctggggctgggaataattttgaggtcaaccatccaaactgcatgacagccattccatggaagaggtatggcctaaatctttggggcaacctgaattcatgaaaactctcttagatttatgtaactatttttagaattcacttctgtatcatttaattttactaataaaaataccacctttaccctaaatgtcagccaagcgtaaggctccgttgggacagaaggaactatcaaagctttgtgtttttatacattagcagcatttgacaaagaaataactctgaaggaaggagaataaccaggcagagtctagatgcatggaaaagaagtctttgagaaggcttcgcaggctgaaggaaagggcaggactacttcaggaatacaacgtttaagtaaaagaggttggggtctgttgatcttgaggagagatgaggatggactggaaaataggagtgagatatagtaggagaggaaaggatatggatgatgtatatactgtatgggtaaccatcagtcgaccctaagaagataatagttgttaaatggttagctatttaatgaaagaaacctgaacaagtaataatcttgagttgcaaagtggctggagtcacacaacagactaaatttctggtagaacaaatccagcagcttatgtgaaggttaccatgtctgaagctggatagaaaaggtctaacttccaaccaaagtcacagttcttgagctcggtacacagagacagactgctaacagctgatgtgtcctcagcgagagtgtcctcatttatatcctcgttctcttctgcctcctttttttgttttaaacttttgggaagtctcatcattcaatacagttctaatatatcacaataacagaggcggcccaatttctacaaattgactaattctatccctgaaaagttcatacaataaaactatacaaagcatcattttcaaccatcctatagaaaaatttccctattaaattttaactctaaatcctctatctctgttaataaccttactaaaaacttccccatcactgcctgccagggagatcaaaagaaaccaaatttaagaaacctccaacacctgtacctgactgaaaagcaaacatacagacctttcagtcctgcccctactattcagctcctatcacagagacatggtggatgtccccttgggaagcggatagctcttaggtggaagctaggcctgcaataagcaggccaggaaacatgtctcccaggccccatactcttggcagaagcacttggccaccagacagcatgtcctgtcaacctacagagttcttaaaaacaaacactgggacccagaatagtaccctgtggtcatagtgcccacagttcactaagcaccctcacaggtctttgacagaacactgactgccaggtcacctggtgggcagagaaatggaagattcccaggcccaactagcatctcagggaagaaccacaagcagagcaactttcagagctggtcggccagcgttggcacccagggaagcaagtgctattccatatttggagagaacataaaactcaaggaaacagagaagtcctactcaataccgttctcaactgaaaacaagagaacttgcaaaaaagaaacccagttttctggagtccatggagaaatatgaagccaatgctcggctaacagagcagaaagccttttataaataatgccagtcaaagctccaaaggtcagagctgatgcatgccggattgttctgacaatttcttaggtttctaggcaacaaggagctggtcaaacagctcacctccaaggacatactttataataccaccctggtagacgagagcgaggcagcagtgaaggcaatagtcaagaacaggagagggaggtaaagaacaagatgctcttcagacagtctggacaaagacagtccctacccagctctcaggagttgcctccttaagaaggtggaggcccaggcagctcccagggtgaccctaaagacagactccaaggaaaagggtgtgagggcaatggtgaatataaggaggtcccctttcagtaggcagagcaagtcagttcaggtcttatttttagagtctctgaacagtgaagagaagctttctgtggacagcattccaccaccatgggaggggaaaggtgccatgagagacttctccagtggggcatacaagcattgtgcagtgatccccaagatccagccactggcaggaaatcgaaaggcaagcttcttaaatacatagtatatggagacagaagtgtggagcactcccaaaatgaaaggccaagacccaggaacaacctccacaacctggagtatatacaaatgaacccagccctgctgactcagatccacaccatcctaaagcaggggtttctcatgaatgaaagggctaagtatttggtggagagaatgagaagtctcccactgcccacacattttttcttcagagatttcttttccaagagccccttgaataaaggaagggagggagcactgaatgccccagaaatcagaatgcatggtgcgggaagacgacaggaaatagttctcaaagagatcagaaaataaattggaagcaatttcattaccacaaagaacagacattttttctaaggcacccctcccctttccacccaattgtcattcagcaactactgaatacttaccaatgaaaaacgttacccctgacctcaaggctgctcctgagctctggtagaaaatgctttccttgtctataaaacatggcaagcaaggcaggatttaacagtaagggcacagtagcactgcaagccttcaaatggaaacctggagacaagcagtgagaacaggaagcaaaagcagggcaggtgaagctaggaccagggcatctggaactttccacacaggttggatctccatgccagacaacagttttcaaggaaaaatatctaagaggaacatgactttgggaaactttttggcagtactgcttactgtatactagagagtaaaagaatttggggaacattcaccaatttgcttcttcaggggcttgggtagggaacgtgaacaggaacctggctctaatttctgaacttttttatcagtaaaaacaatccaacaaacgaaagctagtcagtgagagaactgggagggtctgccctccttccctgagtcaagccttctggggggacctcctgacatttaattaagcaaagacaacgcccactgaaggaagctgacctgaaagtgacacgctactgtgaaatgagcatgaagtgggagcttgttacatatatgaaatggccagcgatcctgagcaaagcgcttcagagcttgagacctaagtcttctcatctatatactgagggctggacaagatgatctgtcaagccatttttatccctaatccaccaaaatccaatgctttagtttattgtcacaaaagcaggtatcgaatggctatcctgcagtgcctccaatcaacattcagactttttccctgaggcaatataagataacagttaacatgtttttatcaattaggtggtcatgagataaatatatatgggaagtggtagtttttcacttaaatgcatataataatggtacagctctctttgaatagtatttgtttatttcttaaatatttaagttcctaaagacggtaagaataacccaaggaagtgaaatcaatgtcacaaagcacatggctaaataactgcaggtttgcagtgccatgtgtgagatcagatgacagaagggagaactacctttaggcagaggcttctcatgtcccctggagtggccatgtgctgttctacatgactacttccacttcggttatgtagaagctatttaaagcacacagatgtttgtgatgagaaaaaagccacccttaattgaataatggaaattataagcatgatttgagggtgggggtggaggtgggagtagagatgggtagaaaggagtgcaatggaaacaaaggagccttcataaaattcaagtcacttcttaggataacgtgattgatttactcaccaccttcttaggaacataaagcaaacaagtgggttttccttttactgcttttctgaaatgagctacactcaagaaagcagcacgggggttgtgctgtccctgcacagtggcaggagagtatgaggagcaggtgaatgccacaacagctccatccaagatcatttttcacatgcaggaaccattcttatactaccctttactggtaatttctgtagaaatctggaagtctggttgacaccctcctgtacagtgtgcagtgaatcaacatcatttcccttggactttgcaatcacggtggcattcatacattcattcaacaagtatgtatgtacaggacagtggagtaaagaaaacagatagttcttactctcacgaggcttaaaatttcaggagggaactaggcagtcatgaagtaaacataaaaacacagattgtaataggcactagagaataatgaagactttggggaacacaatttaaattggaaaaatatctcagttccgttaacacatgttgaaggggaatagcattgttttgctggatttggggcctggatgcaagcatgttgggtatgcattgtagggtaatgcatttccttccatttgggcccaagtgtatatttaccacccagttgtgatgagctgggatcctcctgctcaatctcagcttgaagcacttggaggttatctgcctgctgtgggtgattattttggagcaaggtacttcatttgcctcaagaaacagatttgataccactactgtgcccttttggaacagagaagtaggcaagaccccagtgtgaggcagagtgatgggatctttagggacataattgatgatgtaactgatgatgattttggagtttatacatttccaaagtttcaaaatattttcacttggttgatttatctttatggtgatgacactacgtagatatatgcccttcttaaaagttacagtaagaggctgggagcggtggctcacgcctataatcccagcactttggaaggccgaggtgggcagatcatgaggtcaggagattgagaccattctggctaacacggtgaaactccgtctctactaaaaatacaaaaaaattagccgggcgtggtggcgggcgcctgtagtcccagctactcaggaagctgaggcaggagaatggcgtgaacccgggaggcggagcttgcagtgagctgagattccgccactgcactccagccagggcaatgagcgagactccgtctcaaaaaaaaaaaaaaaaaaaaaaaaaaagttacagtgagagttgacattgagaaaagggaggcccagccagggttatgcaaagacacagtagggaggaggatgggaagtttctgagacaccccagtaactgcatgggtccacaaagcacatgtacagtctgctctatgcactgcaggtacagccacgaataagacaaagtctctgccctcatggagcttggtgtctgtctactggagcagacaaaaacaaacctgctttttctcatttgcctctactgtgggttccgtgtataactctcaaatgctagcatttccatgcattccatccttgtccttctctcctctctgccttttccaggagaattttcctagccacaggttcagctatggtctatgtgctggagtcatacatttttatcttctgtgtacgtttttctctagacccatatttttaattgccttaggacagctctccctggatatccctcagacacaactaaaacatcattcaattgtactattaataattttcccttcaaaatccactcctcttctctatagacctaacagcaacactgtccgtccagctctcaaaacctgaaatgtgggagttgtctttgactcttatctttcccatgcatgagcactgaatcaatcagagtccctagcatgtcttggactgtggcctcccttctatcttcagattatctgcctttttagaattatggcaataacttaactgcaaagaccacatgtgcacttgtgctctttcagtttgtaataaatataaaatgaaaagtgattatgtctttgcttaacgtctgcaaaataaaagtccaaagtccttggtatggtctataaggccctcattatctgacctgcctgccttcccaatctcatcttaatcccttacagcctgacactcagacatactagactttccacctaactcactcacatacacctatcctgtatgtcaagattcggcttgaccttcatcacctacctatctgcagtatttttggatctgaattctctgcccacattgtactttcacatacttcttttacccttagtggtttgtacttatgcctggtctaactagattgtctccctgtaacagacttcttgattcaacaaagcagctctgaatcagcctgaaacctatggcacactgcaaaatggcaaacattcaataggtatttgcccagtaaatgttaatgaaaggaaaaaaattcaaacttcagttggaataggattagagacaagttaaaaaaaagtttcccatagaaatcttcctcatcgtaaatatcatcatcctaaatgtcccgagtctttccatgggtctaatttaccaaatcatgaagactctctttctcactgtgtatgtgtagtgggagaggcagagacagaacggtttttttttttttttgcaagtctgctctctggattcgtttttctggggatgaaatctcaggctatgtagcttttctggtccctttttggtaatcaacaaatcatcagtttctctaggtattaaaaagcctacacttttgaaacaccaagaggccaaactctctcttaattgaaaacataattctgcctcttactgaggtctttgggtgggaagcttaaagacagcagtgttggggcaattggtttttcttttcctccctccaccttctttcccattcaagagctgttgctgccctttctggaggggagggaattagaaaaaaagatcctgccttacccagtcactgttaattattactttgagccagggtggggaatgactttctttcctggaatacaccctgctggaaaccacagctgagattctctaagctggcagcttccaacctctcctccctcaacagcttcaacattatatggcactcagctgcagggtgcctggctccaggccggcagtccatttgtgcagggtagttttcaagatggctcatagcccatctctttcagtgaccagcgtggcctatgggaaacatacatcttgactccattattggtaggagtactctttagttaactgccacaggccagttcagacacgtcttaccctgagagccttttcagagtcaggtaccatccctgtgtcccccagcatctgaagatcacaggtgaaggtctccaagtagttcacttaaaaaatacctcagtaggtttaagaacagggaaagctcccaattcattctgtcaggagtatgactctcatccccaaactggacagatatataatatgaaaactacagaccaatattccttatgaatatagatgcaaacattctaaacaaaatactagcaaaccaaatccagcagcatagaacaaggtttatgtagcatggacaactgagattatcccaggaatgcaaagttaattcaatatacaaaagtccattaatacaacatattaataaaggacaaaacaacatgaaaatcttgatacagaagaagcatttaacaaaacccacagcccctcctttttttttttttgattaaaaaacactcagtaaactaggtttaataaaagaatttcctcaacttgaagcaaacccacagctagctaacatcatactcaatggtgaaagactgaatgctttccccttaaaatcaggaacaagaaaaagatgtctgctcttgtcacttctatccaatattgtactggaggtgctagccagcacactaaggcaagaaaatgaaataataggaatctagactggaaaggaagaagtaaaagtatttctgttcacagatgcatgatctcatatgcaaaaaatactaagtgacaaaaaaagaattttagaaaagctacaatatacaaaatcaatatacaaaaattaattttatttctaacaccagtgatgaatacaaaaataaaaattagaaaataatcatataattaaagtggcatcagtaaaatacttagaaaaaaattaaagacgtcaagacttgcacactgaaatctctaaaacatcactgaaataaagacctaagcaaatgcaaagacatcccacagtcatggaacagaaaacctaacaccattaaaatagcagttatttctcaaatttatctaccaattcaactaaatccctatcaagatcccagctgttttgcaggaattgacacaatgatcatataaaaattcatatgcaatgcaagggacccaaaacagacaaaatgattttggggaaaaaaaaaaaaaaaatggaggacttgcacatcccaaatctaaacttactaccaagctacagccatcaagacagtgcggtgctggtataacgacagacatatagggcaatggagtaagactgagaatccagaaagtcttatatttatggtcaactgttctttgacaagggtaccaggaccattcatggggaaataatagtcttttcaacaactggtgcttgggcagatggatatacagataccaatgcacttatgcaaaaaatggatgaaataggaaacttcactacattctactgcatgctcggtcattttcaatcatttaggtggcaacactgacaagataacagaaagatggaggtaataacatgtgaaaggcaaaatggtttgtttttttttttaaaaatgacagtctctatcatgaatttacttacactccaggcaaaggttattagaagaaaaaaagatgtaagaaaattccttaactgaaatgtggaaagagtatcaagaggagaccctaagacactctgtaagaatcccagtgactcctcactgttcaactaagaaatgtaccccattatgctgtgctaccacggaagcattggaggcactttgggggttgatgaagtcttcatggatgaggtactttaaatatctggtcatgaagagtatttgagaaatatgacaagtgaagatgctgggtaggaatgcagcgaggaaagtgtgtaacacaaggccaaattggaaaggtcagtgagggggcaatctgtggaggcactgaatgcagaggatattaaaattagcaagatagtgttctagcacaatgaaaaggattggaagagggagatgagagtcagggagtgaaattaggcagctgctaagaatgtccgggtgagtcagaggatcaggacctgtaagggcagtataaagaaggaaggaatgatgggagaggtttagggggaaagaagtgacaacctgtgacaattgaggaatgagagattttgatgattggggtgaaggttacatttcttaaaaagaaacaaagaatggtcggtcgatagagatgcaagatgaagaattttgtttttaggactactgactatgaggtaacaaagaaatcccagagacagaggtctgagcaaaagatatgggattggggaagaatctttgggagtgactgaggttgactagagggaactgggcaagaacaggtaaggactttaagcagaattggaggagtatccatctaaaatctgggtaaactgggatggaaaaacaagtagccagagaagcaacagcccaagctagggtgttgtcaaggttatagatgttactgattttggcaatgaggagattataaggatccttgaagactgtactttcggtgaaactaccatgcattagtagcctttcacagtgatatctaccccacacctgcatcaaaatcttgcagtgcctattaataaatgccaacccactaacggggaggggagaaaagacttgggactctgtacttgtaaaaccctctaccctccccaggcaattctttacacactaacactgttgaggtaaaaggagacaagtgagggagcaaatggaaggtgtgtttttggattatacagtggctcatggaagggtgggaggggtacagatggcccttagacactggcggaaagtcagagaaaaaaaattacagtaagcaggtaaagggatcaagactacacagggactagtcttgggacgacatttcttcctctgacagtttgtatggaattcttgagaaaaattcctcgaaggggcctgaaatctcagaatggtcatgtttttaatgggaatagggagtgatgctgccccattacaaccatctgttctaacagaatgtctgtaccgaggagggatgagtaacatcggcaagttctgttcgaagcctttttcaagtttctttttgatatgtatctatctatctatcatctccctatacaagcaagcatccccaaaagtagttgtctcaggaaaccagggttaggatgaccagctcatttgctggagctgccaaggtccagaaaagtttggctgcaggctgttttcatgttttatgtatgtttgaaatgttctataataataaaaggttaaaaaagtttacatttatttggaaaaccagttactttagtttatggttcctttttttccctccagagcttcctggagattgaggtctaattcaaagaaaaccaaaatatataatagagtacctgggcaaaaaaagtacttttataacataacatttggggtagaggaagtatccactgtagtcaaaatgtctatgttttgctcttccttattgttcagggacattccattaaatagtaatgaaaaggcagcaaaagtaagaggagtgacaacatgcccggcataattaagcaagctagagcagctattctgtgcaaccgacgattttttttctctaaaattttaagggtaggttcattctgactctgttaaaagtctacttgatgtgaacaactctatatctgataacctatttcaattaccactttaaaacttgtcatatggatacgttattacaattgtagaactttaataaataccataataataaaacttgagaactgaagagcacacatttcttcacgaatttattatataaaacgccctcagagtatttaatttctcctcactttaattacacattaagaagcacagtggatgagaagcctttaagatgactacagttgcacgaaggtccctttcatcaaggtagcgtatgtaccctaacagtgttctaaaggctggcccagaaaaaccccatgttaccttatcacaatatggaaagcattgtcttctttttccactaaattaaattatggtgaaaagtgccacagttttatttagcattatggtacataacaaacagttctgtctcaattatgaaaaaaattaattaaaataatcctgaaagacatcctttttctccccccaatgatttgaaagctgcatttttcctgccaatttcaaacaaacaaatcatcaggttgatctacagtaatcagttaaaacaatcagtcaatcaatcaatcaatcaccaaggcacaagctcagcacattagctatagcttgtagcaaaaggatatatcaatgtctcaccttagttaaaaatacataatccttttattttataatgcaataaaagaaattaacaacatcacatacacagaagactaggaaaggggaaactacttacttctggaaatcagtaatgtaaacctacttgtacttttccatagtacatgaaagtaacgtttaacatgttttgaattaattaattaaatttaatctgtggggctatacaatgtaattcttaggagtaatagtttcattcatttccaggtcagcttactgtatgattaagtaacacaaggcacagtagccatctttttcattatgttgcaacactgatcacgtgcctcgataaaatggctgattcaacaagatgatggcaacacgaaggggagactttggattgtctatttaaaatctaggtaataagtaagtaattaataaaaactctatcttaagtgcactttcacatgctttttgtttataataaacaaacaacaaacttcctaactttgttgcaataggcttgactaccatttcatttggccaaatgcactttccccagtaaacttaaaacaacaacgagaacaacaagaacaaaaatccctgtcctttcatatactaagaaagaggattggctactgaaacagttcattgcaagacacatgaagacgacatactgtggcatgagttgtttttgtttttaatttgttgtgctgttactaaagttctgagggctgcagttaaaacattccaatttctcccttccttccatctttctttattgattgattctcaagattttgcacagaaaactctttgggggctagaacagcagtaattgcatcacactgttttcaagacttcaagtttcaaaagcaaatcattaaaaaaaatacagttcctgatttgagttagatacagggacaaaaaagtagcacatacttgaaggttacgtggtctacaaatggtggcaatattttccttgggagagtagttctgttggtatatattttttaaatactcaaaaggctcaacctcaagcagtaataaacacaagcaaaagtgatttaacccttaaaataaatattcagaaaaacctctctgtacatacaagtgaaagaatatgtaacactttcacgcaaaaaaataattataataataataaaggatttgttcatatatgtagctgaaatctgctgttccagcccacatgtccccaataaagaagggaggcacagacataggtgactactgtggttgactatcttacagcctttttgtactgggacactatcaccaccaaaaatttatccctcgttatatttttaaaattttttaaattttttctttttttttccttccttttttttgttttattttgttttgttttgttttacagcatgccaaatcctttggcatacgtgatggccttcaacaatctctctttaagtttttctttgcttgagtattccggaagtaaaagcacattaaagcaagtatgagatgtaggtaacctaaatagagaaaaggggaaaaaaacaggaaaactgtaagtcatgggaaatacacttagaattaaatgctcctatttttagattgtatatagttgagacggtctgcaatgcaaactatacattaatgcaaatcataaactttttgttgtgtaactaccaagttgcctttatcctataaattactcaaagctagtgacgatgataagatactgtatccattgagtttttactacataacagataccattttaggtactgaattcttacagttcatttaactaaatctttccacaacaaaaccacagagaggacatcagtaaatgcactttagaggttaggtcactgagaagtcaagtaacttcctctaaggtggagaaaatactcaaacctgttttacaagactgcaaagtgtgtgctcttaaatgcttattagaaacactgctggcaatatgactaagaaaatgatttgataacaggattctagcacaatcaaatgataatcttccgagcctcaatgtaaccattctaaatagatgatcatgttatatggctttcaattaacaagctgggaatcaaaaaagtaaatgaatcacactaatttgattccaaaccaatgtgagccccataataatttttaactagggcaatttcttaaaagtttcctcacacaatgacagcaaagtattttctcaattgtctaatatgatttggggatttgtatataaaatcacgaatgtgctcagaaactataaagacagttcatatgtatgtgacgaggaatgcaaggttttcggtaggtatacagtcacaagttaataattacctacctttctgtgtctgggccatttttggctataatcatctttaattttcctagtcctcccacaggtgctctgtctgtgcccgttgtaaactgcaagaagagtcttttctgttcatctgtaaatgaatgaacgatttcccagaactccctaatgagaaaaaatacaatactggtttcagtttggcattcattatgactggtactaacataagcttatgatttgcattaaaactatattaagagacaacttggaagttaattatcaggatagtatcacttctggtgatttaaaaatttccaagcaaatttatcctgaacagctctgaatacgtaaaaatttagattagattacaatatagtaaaatattagtactacaatagtaaaaaattgagaaaacccaagtgtgtagtaacaggaagtgactatttaaactatggtataatcacattatgcagtcagtaatgagcaaaagacaaaatcctatgaattgaaaaagactgaaatgaatatttggaaaaattaactccaggtgcctttgggtatatattttatttatcctttctcctttattctcctggtctactcatcctttaactcaactttgggaggaaaaagtgatacagattaaggacaaaagaaaaaaagaccccctgccccaaccaactggccccaaatgcaaacaactacatacctaatagcagtaatacaaaagttcaatttttatatgaactagaatactttaaacaagtaatatgtgctgtgtatggaggaggagaattattctgacatttctgccacctgcagttattttaagagaatgatttatcctgtggcattcctaaaatctatgtaataaaagctatgttttaatgacacttatgttagtttgagttctaaaaaacgaaatacaagctcataaagtgcaatcttgaagtttatttgaataatcaggcatctataaaacatatatacactagttcatagctaaataaatttttttttttttgagacagagtcttgctctgtcgctcaggctggagtgcagtggcgcgatctcggctcattgcaagctccgcctcctgggttcgcgccattgtcctgcctcagcctcccaagtggctgggactataggtgcctgccaccacgcctggctaattttctgtacgtttaagtagaggcaggatttcaccatgttagccaggatgggtctcgatctcctgacctcgtgatccgcccaccttggcctcccaaagtgctgggattgcaggcatgagccaccgcgcctggcctatagctaaataatgttaagattaaaaaattaaaaaaaaaattaaaagtatttttagttgcttatataatataaaatgcattttaatagttatttagaaagttctttccagagccaggtgtggtggctcatgcctgtaatcccagcactttgggaggctgaggccagtggatcacctgaggtcaggggttcaagatcagcctgaccaacgtggtgaaaccctgtctctactaaaatacaaaaattagccgggcgtggtggcagatgcctgtaatctcagctacttgggaggccaaggcagaagaattgcttgaacatgggaggcggaggctgcaatgagctgagatcacaccattgcactctagcctgggaaacattttgagccatctcaaaaaaaaaaaaaaatttcatctcaaaaaaaaaaaaaaaaaaaattccagaatgttagcagagaacatcacacatcccaaaccagtaattacaattttctaccttttgatattctaatatcccaacatactatttttattaccaaaatgctggcatttttggtgctgcaacaccatttatctgaaataacttaaaagttttattagaattcttggctttctccaatctcttgccacttcccttccctgcccctttacaaatccaccagtcagcaagagaaaacaaaaaagaaacacacaacaacagaaaactggacatgaaacttgcaggagcatctctcaggtaaggaggagaggaatcggaccccagttcatgatactccttttggggaggctgacaagagaaaacaagtctgctgtagcacagaaccctccaacatagcagaaaagctgccctgcagtgggtggtaataaagcctcctcacactgcaggagggctctgaagcttaactgaaccagctacacctaaggaggtagaccaaagagcaccaccgaagaacagagacagaccctgcaggaagtggcagatcagcagtggtcacaatgaccagtctggctatattattacggagctgtttctttggacttttaaacgaaacctttaaaaattttatacaatgaaaacagggaacaaaatgcatctctattcctataagtgttatgtgtgttacattaacattttgaattaaacaagaatgcatatatttagaaagctgaagaaaacacgaagaagcttccaggtttccacataaaagtggtggctgtatcgatcacatcctactcacatctctaaaaatctacccggatcaaaaaggggaaaataaaaaaaaaacctatgacttaggtctagagtaaaactaggagacagaacaataaactccaaataccaaagaagtggggaaatgagcagggtccagcaggagctacatcgaagagtggcttgtgcggaatcatactgattagggatcacccaaggccagaccccaccccctccaccacctgcccctcaacagagcactactgagtgtaggttagagcactggcaacagggtggttaaaggaaggactacagaaaagtacttgggtccagcaatggcaggctcaggaaggcaccatgcatgaaaggaaggggggtaccttcaaaagcagaagtgtcccttaagcggctgtaaaggggtggaagcagctaatgaaaaagagtcttcattaagctacatggagctgaaaaatcagaaagtggtgattctgcccttactaaagcaacagaagagggatcccttcaaccaagacccctaaagccacacaattcctccctgctccaccatgaggtctagtaataacaggtccagaaaaaagtaacatctgttatagaaacataaacaagaaaaacagaattcggaagtctaaataaagttattatgggaagagtctggcgaatgagaagcaaaactttccggtagacaaaagtagaccagaaaaattcagtcataaacaatgggaaactagtaacaccacattccaacacaaaaggagaatgcagcagcagacaagacagaccaccagtgatgagaaatacaaattcagaaagaaatgagcacatcttaaataaaaataagaatactaaaaaatactgaagaaatatgcaaggtaactttggaaataaaggctaattttattataaggtgaccaaagaagaagcagtatgactaaaatttctactgaggacagactctagaaaattaaaaaacaaagaaaatgaataaaataaacataactaaagaaatgcatatcaaagcataataacgaaaaagattaatagctaactacataaacataaaacctttcatttggcaaaaaaatcctataagcaaggttaaaagacaaatgacaaactgggaaaaaatatttgcgaatttaccagcgttaaaggactaatctccttaacatataaagtttctaaaagtgaagaaaacgaccagctgagcagcaaaatgagcaaaagactatataaaactataaacagctctacaagaaaaaatgtccattatcattcataattgaggtaagctcaaaaattgtaactatagtaaaataccatttctcaattggcaaataagtaaacatccacatttaacaacacattctgtttggaaagttttaagaaaagagatactgttgtaaactgctggtgggaatgcaaaatgttatttttctgtgaaggaggatttggcagtatctagcaaaattacacatgcatctaccatttgatgcaacaatcccacttctaacaatttatcttaatgatactttacatatgtacggaataatgcatgaacattaagaggattcactgtgacattagtactaacagcaaaaggttaaaaataacctcgatgcccataaatattgataagctatgctgcatccacacaaaggagcagtattcagtcatacaaaacaaaatggaaaacacctctgcaataatgtgggatgattctcaggatacactaggaagattattttcctagttctgtcctctgataaggcctacaagcagtaacgttcaaaagcaaaggccatactttgcatctaaaatctgacttctaaatgccattctccaacaatttattggaaaaataacttattccaggcctgagaatgaatgttcgagattagttagaaatctcaaaatctaatagggtcattttaaaagcacacgatagctaagcaatttgaatatcatttagagtaatgactgtgaaacgtattaaatacaaaaacattcattagttcgtaatattcaaaaaggcagcaaaaaccaaccaaaaaacaaaattaaattgtcactattaaaattattacattaactccttactctaaaaaccttaaatctattttatcatgccttttctgtagaactgtttttcaaggtaatcaaatggcacccaatgatgagaaaaaagaatgccaggtatatatgtaggacaagcagatggaaattttttttccccaaacagccattttgcaatccccaatgagataacagattaaggtaatgatactgataaatacgaaaatcaggtgaagggcaggtagcaggttctggaaagatgatgatggcaacgacatagttattattattattattttttgttttattccctcccaacctcccctacaaaaacagcaaactgaatgagaaaaccaaagacccagagacattatctacaacaaaaccatgaaccattgcatataattggacagaaacaaagctctgacaactacaagactggttagtaaggaagcagatgcaaggtaactgactgggtttctgacagccctgagaacactgccaacccactggaaagcacaggccaatctgaaaacagggcttaaagttttaaaaagttctacaggatctaatttgcagatgattacaaagggatcatgatgtagtaagctctgggcccttaaaacacccgaataccaaacccccaccagaaacaaaccttgtaccgaggaaaaacttctgggaataacttccgaatggaccaggtcagtaataaaaaccaaaaaaaagttcaaatatatgtgtgggatagaggagtaaagaaggcagtttcagaaagcacaagggcatatttttgaccattttacaaaaacacagacttctcctcgtccctaaaaagcgaaaaaagttatcctggcccatctctccctcgtccaagtatgagaaactcatttcactcacacacacacacacacacacacaaataaataaataacagaacagagtgaaacagtgtaattattagagaaaaagtatgtgcatatacatgagaatggtgtccctacagaaaatcaaagtacatgaaacaatatgcaaataaaacatgaaaactgtaaacaaatttcaaactgagctaaaaagaatttaaaaaataacaaatcattagaaatgggaaatttctgaatgagggtaactgaaaaaaaggaagacatgacacaactaaggagtaattagaaatgcaaggaaaaaaatcccatcaaatacaaagaaactaaaactaaactagaagaaacataaaggtgaataaaacagaacaataataccagaacctgaaggcagaagaaaaatcttaaaatcaaaaagaaacaaacccatgcttgagactctccttgctggtccagagccacagtgctgctgtgtactggcaggaggaattctgctataattggtcctggcagtgttcacctttcctgcaagtgttccacagcccagggacacaatgtggtcaggagcactgccaggaacaccagcaagggggagcctgccacaacaggcacaaggctcaggaagcactctccagcccacgaaaatctagtgggggtcctcttccctcacccaaacacactctgcgcagctcagcctggagaaggcccctcaagcagcactactaggaaccagtgcgagccccagtggactgagataaaagcaacaaaccaaaacagcaccataaagcctctgaaaaatggtcactggaaccacagctcacaaatatatgctagtacctacatgctataccttaacaggttactactgaagttaaaatttttaaaaagtacagagtctcctgatataataactaaaatgtccgagacacaatccaaaaattatctgtcataccaagaaccaggaaaattacatgaaggaaagaaaacgccaacactgggatgagtaagatgctgaaattatctggcaaggatcttaatgctgccatcagagaaatgatttgacaagcaattacaagttctactgtttcaaaaacgaaacaatagaaaatctcagcaaggaaacaagatacaaggaaaaaaaagcaaatggaaattatagacctaaaaaatacaataggagaaaaataatcattagatgggctcaacagtagagtgaagatgacaaaggagagaaatctgaacaaaagagagaaaatagactgaaaaatgaaccatgcctcaggtccatgtggaacagtaacaaatgactcaacatttgtatcattagaggcctagaatggagaaaagagtgacgctgaaagaacacctgaagaaataatggttgaaaattttccatgtttggcaaaagacacaaacttacagcttcaagaagctgagcgaaccccaaatagcacaaataaaactattctttgggaataaagggaaaataaagtcatcttcagaaagagaaaaacaaaaagaatttctcactagcagaactgcctttgaagactggctaatggaagtaataaaagatggaatcttggaaaaaataatggaaatagcagaaacatgggtacatacaacagagcatcactcccttgataagttctataagtcatattggataactgatacaaaaactgtaatagcattaatcctcaaaacaatactatttaaaagtggggaaagagacccaactgaaattaaggtttccatatctcattccatgtaatggtattgatggcagtgaatggtggtaagtcacattatctataatgtgatacccacaatgaccgtgaaaacaactataaaaaacacatagaaggccaggcatggtggctcatgcctgtaattccagcactttgggaggctgaggtggacagatcacaaggtcaagagttcgagaccagcctggccaatatggtgaaacctcatctctaataaaaatacaaaaattagccaggtgtggtggcatgtgcctgtagtcccagctacccaggaggctgaggcgggaggattgcttgaacctgggaagccgatgttgcagtgagctgagattgtgccactgcactccagcctgggcaacagagcgagactgtgtctcgaaacaaaaacaaacaaacaaacaaaacaaaacccaaacactaaataaatcaagggtcttaaaaatcttaaaaaatgttcaagtaatcatggaaggcaataaataaataaccataaacagaagacagaaacagaaaacaaataataaaatggcagacctctccctaacatatcaataattaccttaaatataaatggtctaaataaaaaaattaaaaggcagagactaacagtttttattaaaatgacaactatatgctgtttacaagagattcgtttcaaattcagcaacacaggatgaaagtaaaatgatagtaaaagacagatcatgcaaacattaatttaaaaaaaaacaaatggttacactcatatcagattcagagcaaagaaaatcgcaaaacagaaaaaacttatataatgataaaggaccaatcaccaagacatagtaattctaaatgggtatgaaccaaatgatagagcctcaaaataaatgaaacaaaacctgataaacagataaatctcagaagcagacctatataaatattctcaagtgatttttaacgtatgtgaaaaaaacaattcaatgaaggaagaacatacctagaaaatacataaggaacccttaaaactcaacagtaaaaaaccaaatggactcttggtttttaatcccagagaaatacaaactttttgtttacaagtaacatcacagttaatggtaaatattatagtctctctcaataaaatgaggaataaagtaagaataccttctaccaaaggttctagccagtgcaatagaggaacagtaataaataacataaacattggaaagaaagaaacctgtcttgatttgtagatgacatagctgtttactagaaaaccctatgaaatctactaaataactactagaataagtcaatttagaaaggttataggatataagatcaatatataaaaatcgattttatttcaagatagtaataaacaagtgaaaagcagtatttaaaaaataccactaatagcattagaaacatattttaagtttattcctaaccaaagagtacatgatttcaacattaaaaactataaaacagtgctgagataaactaacaaacatctaaataaatggagagacgtacggtgttcaaggattggaagaatatattgttaaaatgtgaattctctccaaattgacctgccccagtcaaggcaacccaaatcaaaatctctgcaggctttgcccttttgtttgtaaaaattaactgattctaatatttatatgcaaataaaagtcaaagcaacctaatgaaaaagttgtgggactcacagcatctgatttgaagctgcagtaaccataacagtgtcattttggcaaaaggacaaaacaaattaatagaacagaatggagaatccagaaacacggctcacacacagattgattttcaacaaaggtgcaaaggcaattcaatggggaaagaaaagtctctttaacaaatggtactggaacaaataaataaaactatttagaaaatgaatgacatccactgtctaacagcatcacaaaattttattggtggtggatcacagatttacacataaaagttaaacctatattacacaattagaagaaaacataagatatttgtggctttgggctaggcaaagatataaaaggacataaaaaaccataaaagaaaaaataaattagacctcaaaaaatgaataatttctgctcaccagaagacacttaagaaaatgaaaacttggagaaaataatcataaactacttatcagaaatgggccttttatatagaatatacagtattccccacttacccatggggaatacgttccaagacctccagtgatgtctgaaattgcaaatagtactgaaccctgtatatactatgcatgatttatttttccttcttcacaatttcatagatacaatactcatttttaccatagattttagcaacctcaacatatgatttttaaattctttccttaaaggaagcactttccagcttctctttggcatatatattcgaatttccaacatcactgctcttgtgctttagggccattattaagtaaaataagggttacttgaacacaagcatgtgatactgcaacagtcgatctgataaccagtagactaaaagtggtgggtagtctagacaacaacgatatactggaaaaagggataattcatgccctgggtggaaaggtgggagatttcaccatgttactcagaatagcatgtaatttaaaacttaagagttgttggctgggtgcagtggctcacgcctgtaatcccagcactttggaaggctgaagtggaagaattgctagagtccaggggtttgaaaccagcctgggcaacatagtgagaccctgtttctacaaaaaaataaccaactaaaaattagctgcacacctgtagtaccagctactcagagggctgacgtaagaagattgcatgagcccagatactcagaggactgaggtaagaagattgcatgagcccaggagtttcagtttataacaatctgtagtcatgctactgcactccagcctggatgacagagactttgtctctttaaaaaaaaaaaaaccaacgaaccaaccaaccaactctccctgccctgcacccgccaacacacacatacatcaaaaaccctgaattattcatggaattttctacttaataaatatttttggaccactgctgaccaaagataactgaaaccaaaaaaaagcaaaactaaggataagacatactgctatattttaagaaaatatctatagtcaatagaaatacaaaaatccaatattaaaaatgaggaaaagacacttttagttaaatatgcacctgctatatgctttggaaactccactcctacatgtttgcccaggagaaataaaacatttccacaataagactacacagctttattcacaatagtcccaaactggaaacaatccaactgtccaccaacaggtaaaaaaaaaacactttgcgtattcatataatgcaacactactctataattttttaaaaggcactataaatcaatgcaataacatggatgaatctaaagagtcttcatgcagtacaagtacataagattccattcataagaaattctagagcagacaaaagtaagctacagtgacagtaattaggacagttattgtctgttctaatgggggatggagattcactggaagggaaaacatgggaactctgtgctgatggacatagtctacaccttgactgaaatatggttacataaatgtaatttttaaaaactaacccaattaagccctgggtatttcactgtattcaaattttaccccacacaacatcgacaccaccattattaccaccacattgataacattcagagagcagttagggaatcacattattttgaaaattagtaagtaatgggaaagaattaagcattatcgtatatgatatgtacatatttatatacatgtatacagatcctatatgtggatctgtaatttagggtagtcatagagttgatgagaaagagtttttcttaagaagtattacaggtaataaaggaaggaggaataaagaattcgagtatcacaattttgtaaccctcaatgaattagcagatctaggcaatcagaatccacgataaaaattactagaaaagacagaaagcgagtgagacttttaagttattcctacaaaccaacatctatgaagtatttgggaaggaaataaactctgaatctgtttttcgtttttttgagatggaatctcactctgttgcccaggctggagtgcagtggcacgatctaggctcactgcaacctccgcctcccaggttcaagcgattctcctgcctcagcctcccgaggagctgggattacagctgcctgccaccaaacccagctaatttttgtatttttagtagagacggggtttcccccatgtttgccaggctggtctcaaactcctggcttccggtgatctgcccgcctcgggcgtttttgcatgtattttttcaggtgctgaaaaagctctccctgatttcatttcttgttgactgcttagagacatctttccaaatgtccttccttgtcactttttcaaagttaggagcagggattgcacgtttttttgattggtaatttttgtttcaaaggtttgattcagattcagagttgattttgctaggtatggtggctcacgcctgtaatcccagcactttgggaggccgaggcgggcggatcaccagaggtcaggagtttgagaccagcctggccaacatggcaaaacccttatctctactaaaaatacaaacattagccaggtgtagtggtgtgcacctgtaaccccagctactcaggaggctgaggcaggagaatcacttgaacccaggaagcggaggttgcagtgaactgagactgcgccactgcactccagcctcagtgacagagcaagactgtttaaacaaacaaacaaaaaattaacaaaatcttatttctagtggtttacatattaatgatgctggcaacttttagttgaaatgtattaaacagcctcgcagtttttatttttatgaattctgcatacaataaataaataccaaccaaaatatctatacaggcataccccagagatactgccggttcagtttcagaccatggcaaataaagtgattatggcagtaaagtgagtcacacaaatttttttgtttcccagtgcttataaaagttacgtttacattatactgtagtcaagtgtgtaacagcattgtctaaaaataagtacattatcttaatttaaaatcattgctaaaaatgctaatgaagtgagcacattttgttggaaaaatggtgctggtagacctgcttgatgcagggttgccaccaaaaaaactcagtatctgcaaagtgcaataaagtgagatacgcctgtaatgtcttttttctcttctgttattacaagcactactttaagtcttcaactaccgaatacttgtagactatttaatgaattaatattttcatcatatttatattgagaaaattaagaagctgaatttagttagaaaaggtttagaatatcatcaactcttgaggatgagttggaagctactttatctgtcatttttcacataacactagtttgcccttcaaatcatacatttaaaaatgatcttaagatacataccaagtagggattatgttgttataaaaagctagaagtaaaattaagactttaatttcaaagataatttctctataaagaatagcacaagatatgttcaactattctcagagatgcatcaagatatgactttttttcctactagaaattatatctatgatcaatcatattacagagatattgctgttatactccttgtgactgatgaggggggtttttcctatcaccatgttatcccaaccctttaatgaatcacctttgaaactcagaacaggtagcagcacagaggttgctaagagtaaatacattcaccactgctgccagaaatgaccaacggtgcaccagaaagaagaaatactggtgaattcccacataccacgacgaacaaccttataaaataacagaacaaatgaatataaagtaacatacagccatcccttggtatatgtgacagggattggttccaggaccacgtgtgtataccaaaatccatgcacgctcaagttctgcagttggccctgtgaaactggcatgtatgaaagtcagccctctgtatatgcaggttctgagtcccaccaatactgaatctgctcttagttgagaaaaaaaatctgcatgtcagagggcccatgaagttcacagctgtgttgttcaagggtcaactgtaatataaaaataacatttattgctagatagagttgatattcattctagtgtttatatacttgagtcttagagcaatagcctttggagacaacttccaggaaggtacgtgtttgcatgccttctcactgcaatccatcagtagctgccacttgaaccagtcttagcaggggatggggaagcctatgtctttcagaattggatgatgtagtacacagaagtagacagtagagtagtaagggcatttgcttaaaagcagatagaactgggaacctctacatctttctgtgagaattcagggcttagttttttagggtgtaaaatggaaatactagtatgtatctggacatattatcttaagaattaaataaaagactaccatttcactcaaaaagtgcttgatcctgggaagccatgtaacagttcacaaatgcagagttcaaaagaaaggaaaaattgcagacatggtagccttattttaattatcttctaaccagcagtaagcatactctaaccagtgaggaatactagataatccatacgccaaatgcaggagattacatgagacttatatataacaacacttcattcatgaaataaatcacaagattagctctgaaaaatggtgattatattacaaatacaaatctaagtatatagatgacaatttgtgagtttgcttatttgggaattagtacctagagataaaggtctgaagcaaaatcacacacccctttggtgaatcaaatcttcctctgaagaactaagtacctcacctaatcagaacagagtccctggtatagccaccgtcatattctgtagtttcttctagtgcttggaaatctagattctgcaaattcaagaaaatatgtcttagttatctgctatactactgtatcattacaaacaataaatcgatacatgactttttgcagacacctgctttcttacccggcttccacatataagcaattcaatttcttctggtctgaataagtactttaagggagattcattggtcaccatatgaaaacctctccgaaaagccttgaactgtttttctactgatttattgagaatgtagtcagaataaagattgacaaattcctgtagaaaacattaatcacaagaacttcttataatatgctatgcaaacaaaacacaagttattgggctgcatagctttttaatttttccaagaaaaaaacattcaagaatattcttaaaaattcaattttacacctacttcttaacaatttcacaattctctgttatagccaatattaagctatgaaaaggccatatacataaaactgtcaagaatattcttaaaaattcaattttacacctacaaagaaaactacttcttacaatttcacaattctctgttacagccaatattaagctatgaaaaggccatatacacaaaactgtcatacttataaatgtcaatttcgataatgtattaaacagaactgaatataaatgctggagacgcagaaaattctttaggttctctcaactaggtatgtaaacagacacatttaaaccatgtatccatctatttataaatgccaaccgttttaagagagtacaatatatttgatttaagcaaaccaggaagtcccaagttttctaccatagaatatttggtaagctgcctactgtatccagttcagcaaaaatgtggaagtactgactgacacataaactactgtatcaaatcataaaaggaaaatgtgctttgtacccttagtgtgtataatatttaatcaaaaaattatatcaatataaacatgtttcttaaaggtatactatatatttgtcataattttttgcttgttatgttctgggttattcccattcccgatgaacacattttagtcaatagaaacccaaatctgacgtaaagtatacttttcagaaatgtatttttatcacaaacaggatatacatgtgtaaattaaatgtaatttttatttgttctgtgataaagaccttaatcatgaggttcctgcttacagcttaatacaagaaacaccctgcttcttgctttatactacaaccacacttagctattaactatctcctgcttcatgtcctctttctctaaaaggggctttagtgcccaactgtgtgctttcataccaacttatatccaagatttagaaaagtggactctagcatttacataaacttagttacttgttttttttttgtacagactatattagatacttctttaaaaattataagcatacatgctttgaaagtgttaatgaagagacaaaatgtgacataaaaacatttattaccttcctgttttcatttgtaattggaattttatcaccattttcctttagatcatacatcattgggttaccaaaaagatctgtctgtgatatctggaaagtgatcatcatgtcatcttccacattcccttcatactccaataaatcttttaaactctgatatagaacctagcaaccagaaatggtaaattgaggccaccatagaactacaaaatacaacaaataatttatatcactcttcttagaagacaacaaaaatcttatcaataaaaattgtaaaaagtgtagacagtatccctccagtcccccaaatagtttccaacctataaaagaaagattgtcagtcactgtgatgtcccattctctgctgagaaaccccataccaccaatttagcaatagaattcacactgtgctctatgagaaattctgtggtgtctcaaggtgggggtgggggtggtaggagcaggcacactcgttgtaactaccaagacccttagccagggctactctgatttttacctatctcttaagatttcactaaaacacaaacaaaatgtttagaaacacttctctatgaaatcaatcttacaaaagcttcgtgctgacagcaatatataaaaatgtccccctttgagtttttaagtgtttctggtacttcggtcagattaaaacatttttatcttattgataagagtatcaacaaagattctaaacaaaaactttaaaattttgacataaattaaatttttgcatttaaataaaatctaagagactgaattaaaaaaatgacaaagaacttactgggtgagagtctcccaagtcacgaaaagttccttttttccccattagcttcctgtagacaaccatgggaaaatgtacatccagtatacagttattgtaaatagccagacccagtactatgccaatcagagtaaactgaccctcagtttcaaaagaagatggattaaaccaaaacaattttgtagattcatcgtatgtgaacatacctataagaaatgatttttaaaaatacattacttttgtattttattaaggactgatgaataatacaaatataaacttaaaataattatgcatataaaacatttaaaatatatgtaattaggcatgcaacattgatttctattatattagcacttgagaaaacaatgtccacatatatctgctataaattggggtgaatggtgatatgtaattttatgaagccaaaggaataaagtagtaagtaatttggtggcatcgggtagaaaaatacgttaattaaattcaagctttctaattttctactaacacataagaaaagttatattcatgctttatccacccatagctgaaaaataaacataaaaaaacaaaaaatggctacatttccaaagtgtttcatttataaaaatataattacttatatctgtaccacacgtactatttttgaaaacaatttttcatttttttccttgagatggagtctcgctctgttacccagggtgggctggagtggcacgatctcagctcactgcaacctctgcctcctaggttcaaacaattctcctgcctcagcctcctgagtagctaggactacaggtgtgcaccaccacgccagctaatttttgtatttttagtagagaaggggtttcaccatgtttgccaggatggtctcaacctcttgacctcgtgatctgccagcctcagcctcccaaagtgctgggattacaggcgtgagccaccacacctggcctaaaaaacaatttttaatcacagtaaagaaaggttcgttttttcaaaattagacaatggtgccatgaaatttttctagcattttcctaataaaatcagatgatctgaaatacataaacctggataaatctgatgaacttagataaacaaagctattcaatacacatgttaattatgggccaatacgtaaaagaaaagtagtttcgtagtctttcaatttcacatggtcttcactatgcaagccccaatcatggaggcttttttttttttttttttttttgagacggtctcgctctgtcgcccaagctggagtgcagcagcactcagcttagtgcaagctccgcctcccgggttcatgccattctctggcctcagcctccggagtagttgggactacaggcgcctgcgtggaggccttttttatatcactcattggaaaattggggcccggtgtggtagttcacacctgtaatcccagcactttggggaggctgaggcaggcagatcacttgagctcaggagttcaagaccagcctgggcaagatggagaaaccccatctctacaaaaacacaaaaaataagctgggtgtggtagcatgtgcctatagtctcagctacttgagagggtgatgcatggggatggtttgagtcttcagcctgggaggtggaggttgcagtgagccgagacagaaccactacactccagcctgggcctcagagccagatcctgcctccctccaccaaaaaataaaagattaaaaaaaaggaaaattggaatctttggaatgagtactactaaaaattgatttcttcccttttaaatgactaaggaaaaaaattttaattgaatttaaatcattttactacatgtttagttgctactgtgaaacaatgaaaacatcttaagaattaagtctgaaaaaaatctgtaatttccaatagaaaagtagagcttagaaatcagaaatcaaattatacagtatataagtattttaacctgtttataagaattttaaaatctttgaaaatgtcattgtcactttaagtttaaaaataaggagctttaacatgtttccttgatcactaggagtatgaattaagcttaggacattttctgaatgcaaaatggtttgaaaattaaacaattcatatttgagtttcatggtttctatctaaacattttttttacaggccaagttacaacatccatggaaatgcttttagttataagtatggtattaacaggatcaagaacagctgacaaataattacaattaataaatttgttcaagctgacaatggtgtgtctaaaaaattaatgaatttaataaaatgtcacaaatgcccttccttggaaccaagagcaacaagctataagttaatcagaatataactctgaagttccattttaggcacattttctcatgttccagggagaaaagcaccataacctcctggtaaaatactcctttttgatacttctactgccatcacttcagttatcttactggaactgcttaatctatgttttttcttacaagtatttctgcatataatgcaagtatgctttatagctaaggtttaacatttctagatacatcaaaagctagagctaaggtttaccaaatttaagaactttatgaagtttataattttctatctcaaaaagggcgtcgtcttatgtatctctgatttacttagaacaaactacatacaaatggcatagctttttagttattaataaaacactagctagattatagataagggatgcgtgtgtgtgtgtgtgtgtgtgtgtgtgtgtgtgtgtgtgtgtgtgactaagaacagtaacagaaaggtcaactcaattagaatcaacaggctataacagctcaaatctcaaagctgaagggaaatgacatacattattctatgcacactcctcacaattctgatggtaccttcagtggaaaccttttcctgtaattgtcatgtactcaattttaaacgtaagcaagctcagttactaagtggttatatttacagtagaaactgaaccagttcagaattatgaagttaagtagactacccaaaagactgcatcttttccctgttctactttatcacaaaagggaaaaaactaaaattctgatccttcactttcaaatttccaaatcccatcagcctttcccaaactgtgttcaataacaactcttctgttagggcagaaaaagagttctggagttcaaaaagtttgggggaaacactacctatattaagccccaagaaatcttatagcaaataaacctaattaatgtgatatcagctagtgtttctgaactttgagcatgacatacttgtgagacagtctctcaatactcttcaaaccattgttctttgaagttcacaggtcaggaaaaccgtgagtttgatgatggttttagacaacaaaaagcaaagaaatccctccaactgttccaatataccattctaaagtgctttcaattcagtttaccaaagagataatttccttcattagaatattccttctaagaaataaaagaatttgaataaattagtgatacaaatcagttcctaaaacctacaaattcagtcatgatgtgtgattctgggtaatccataccaaatccttcttttgctgctcttcatagctgaaaatatttacaaagtaagataaacaaataactaactcaaaagatgatacgacaccataatcacattactaatgtatttaccaatatctggattgaagatttcctccacaaccagctgaaaaaattctttggaaacacctccctcatcaactccttgttctccttcaaattccacatacaactgcttcttcaagtctgcaggattttccatagcgatcatctctagctagtgattgaaaagataaacatgaaaagaagatgattgctagtatcaggaaaaaaacaaaataaaaacaaggagtaggattaggaaacaaatacaaatttttgactttttgtatgtaaatggaaacagaaagcaaactgataaaaagccagtgaagacaaagattcagtcttaaagataatcaaaaagacagacacaaaacagacactagcatagtaaaaagctaactttactgatttgttatgaaattaacatacaattaattaagattttattacttgtgtgttaagtctggactacacaggacatggaaaagcagctaaatcatttcagcaaaaacaatggagtagaggtctaacctcaaaattgttcattagtagtcctttattagaatagaaactcaagggttaagtcttagtatctactaagtcataagtaaaatatttcaattaagaaaaatacactgaatactaaagcagtttatggtctctcacagtaagacttagtataaattaccaccttttaatggactagaacccatcttatatccacatttccttaaaaacaggtgagacataaccttactcatgtccttactctttttttttttttttttgacatgaaatctcactctgtcgcctaggctggagtgcagtggcgcgatctcagctcactgcaacctccgcctcctgggttcaagcaattctcctgcctcagcctcctgagtagctgggattacaggcaggcgccactacgcctggctaaattttttatttttagtagagatggggtttcactacgtttgccaggatggtcttgaactcctgacctcatgatccgcccacctcagcctctcaaagtgctgggattacaggcgtgagcaactgcacccagcccttattcttaaattgtaagttaacaaactttagtgtctagcattttctcaactataaatcttttaccaaatatttttgtgtacctatagaattatgaatatacagtaacctcattgagattaatcataaaatcaacactagattccaatattaactgtttatactgcattttgtttgttttactttatgtatctaaaatttgctaacagtatgactgtatccagtacatggatggatactgtatctagtacatggatggatactgtatccagtatccatcatatctcctaacttgccttcaaacatctgttggctggttaaaaaaatttaatcttggagatgaaaatttaccaaaacaggatattaaatgttttcaggttattccaactatttcaaacagaattttaaaaatggttttgaaaaatgcaataatcactgaaacaactgtaacacagcactatagtagttaaagtaataatactcatttggacaatctagtctgtctacaaaaaataaaatctcataaattaacgcatcaggtcaggttgcccgagagcattgttttttcaaacttgtcacctgcaactcattagtgggtagtctaatccatttagtggtttgcaatcagcaatgggaaaatcagaatgcattccacatagtaatggaacctactgttttgtgaaacttttgtttcaattagatgtacagatggataagcatgtactgggatgctatgtaaaatactagggattgcagtcaaagagtttgacaaaactagctgaaattatcttctgggtatcttcaactttagggtcctattctgtgaatttagtctttagctttaaataatgtctgttgttgttcaacaccgatctctaatatttacaaaatcatttttaggccacacagtttacttttagacaatgttttgttatggaaagaccaagagtcagtcagaattcaccttactagtcccaactctcacttaccataacttttaacctttaaactttagcacgcgattcaattaagcctcagtttcctcaacatactgtaagttgtgaaggcttattaagaatatatgagaacgagtgttaccttttaaaatagttttgctctctgaacaacagatttgcaattttgtgtccccaaaggaacttgatatagactagttccaagatctagagtcaaacaaatgtagatgtgaaaataaccttggggaaaaaaatagtttcagttggaaacctgtttcaagctacggagtatacagaattctgaggagactaaaattagaattaacatcttagctcaaatgtgggaccaggccaacattccatattgccatgtaatccattctgagtttccttatgccagttcccaactggctaggtgttaaagatgtaagtcagtgtttatatttacctttacatccaaaggtatacttgcttttatcaaatataatgtattccaaagtggggaaaaaaaaggttatctggtatttagactgtgcattctacagcttttccccactaacattcatagatgagagctgactccttatcaatgtaaaaccttttaaaggatgtggtggtgaatttctacaggattgagaggccctgtgttctatctagtcttagctctacctaagacatgtcaaatgataactgaagcaaatttatctttattctccataaaatattacatgtctgtccacttccactgatctctattctatgctccccaccttggtgccaaaagaatgtaatgcaatgcaatatgttctattgtaaatgcaaacatacaactttacctctcttatttcatctgtaaaataaccataataatatagtaataaattaatgtatgaactgcttagattaattccctgcataaagttagtgcttaaaagtactagctgttgttgctgttattttattggttctaaaatattttctgaaaacctaccatagcattatagaacaaaaatattccatgaatacagcaacaataatatatagcacttttgtagcatttcacacatagcaactaatttaatcttcacaacacccttatgaggaaggaaacattaactccactttacagataaggaccccaagatactgaaaggtgaaataacttcaagtcacagtaagtcacagtaagttgtggaacagagatactaatccaggaaacaagctcttaactactatgctttactcactctcttcaatgacgaccaaaaattttttttttaggattatgagtgatttttattttccttattcttttccatatttttccattttttacaacaaatacatttttcagagtcagaatgtgttcaaatataaatatgtaaaaagaataatttgaaaagtagttggtaactgaattctgtaggcaaaaattttgttattacctattttagattaccattctggtacacataagtgatttcataaaatactgtaccacttaagaataaaggctgggcgccgtggctcacacctgtaatcccaccactttgggaggccaatgcaggcagattgcctgagcccagcagtttgagatcagcctgggcaacatgatgaaaccttgtttctacaaaaaactaataaataaataaataaataaataaataaataaataaaaaatagtggggggtggtggcatgcgcctgtcatcccagctacttgggaggctgaggtgggaggtcaaggctgcagtcagtagagatcgtgccactgtactccaggcctgggtgacagagttaagaccctgtctcaaaaattaaaataaataaaatagtaaaaacagaatacataaatagcctttaaaactattttattttaaattattaacacataaaatttagcaataaccattttgataaaggccattattgcataaacagctgtactgataattctttttcttaaaaataacctccatcaattgttcggtcaatttaaaaaagatttaacaaataaactgtaaaggtgtattctttacataatagctatattatttaaaattgtatgttgttgtttaaacccaaacctcaccataaaactgtattttttaagtcagaagttgttttaaatgcattaggatatttgaaatttggaggactatgtctaaacattctgaaaaggagaacgtgcatgcatgcctgaatttatttacaatacacacgtggatttttagggttttttttgtttgttttttttttttttttgagacggagtctcgctctgtcgcccaggctggagtgcagtggcgcaatcttggcgcactgcaagccccgcctcccaggttcatgccattctcctgcctcagcctcccgagtagctgggactacaggcgcctgccaccgcgcctggctatttttttttgtattttttagtagagatggggtttcactgtgttagccaggatggtttcggtctcctgaccttgtgatctgcccgccttggcctcccaaagtgctgggattacaggtgtgagccaccgcgccaggccaatttttaggtatatttaaaagtacagtgtatgttgtatttatttaacatggagactagcaacagacagagattactggggaaaaataaacaaaaatatcctggatataatcatatctacctcttcactgcgtaacttcctcttctttaagactcttgatttcatcaattgctggataaaatgatttttaatttctgaactttttaattggccatgatgatgaaatcctagggagttcattttttaaaaaaaaaatctgacctgatatcaaagcatttgcagaatacctagcaggatgacatcttaatatcaaaatatgatattactagacttacaggaatcaaaaggaaaaccttatcacttaaaatcttatagttttctgagctattacatcaaatcaattcataattttttaaaaaaattccttaataccatgaatatttaagtagaagcaataatcagataaaagagacctctaatacttaagaatgcctgggatttctaagaaaggctagcttcaaggccgggcgtggtggctcatgcctgtaatcccggcactctgggaggccgaggcgggcggatcacgaggtcaggagattgagaccatcctggctaacacggtgaaccccatctctactaaaaatacaaaaaaattagctgggcatggtggcaggcgcctgtagtcccagctactcgggaggctgaggcaggagaatggcatgaacctgggaggcggggcttgcagtgagccaagattgcgccactgcactccagcctgggtgacagagcaagactccgtctaaaaaaaaaaaaaaaaaaagaggaaaaagaaagaaaggctagcttcaactacttcagtcaacttgaggcttaaactattgcttgagatttccagattatccaaattaattttttcatgttcacgataaacacatgaagaaaagtctgttatatctcaaatgtagtttaaatgtttgggtaacaccaaatcacataatcacgttcgtccatgagacctggaatcctgacttctatttccaattctgccattaatttatgtaggctggaatctcttttagatttcattttcctcacatgtaatactaagtttgatgtttcattgtcttaaattattatataatgctgaggatctatgtatatataggcttcattctctcattcagtttctgagaaattactttgagggcataaaccaagcatatttcttggtttcatttttgatttcaattagaataaatcacaagaaagaacaatggaaattacatgttaaccacaatatagtgtatgtgtaagacaaaattaaacatacctagtgcagcacagaataatctcatttttaaagctctgtgagtcaatgaataaataaaagaattacgttcatgtttcactagtaagagtgttcaccaatgctggaagctgggagctgaaaatgctggaagctgggttagactaggctattagaaaccagataaaaagggccagtgacttttagaggggattttgcagaacctcctggtagtggggctttttatctgtgccaatcacctttatctgtgctaattcctatttttgaacttccctattcaattccacatctcagccattccttttggtttttagatatttatgtgaaatgctagaactccctgactaattggaaccaagtttcacatcatcatcatcctctattccaagcttgctgtccccatgatcctcttaaaaatctgagtttccaaaacacataaacatacttgtatatcaaaatggcctttctctttctctctatatatgcacacatacacacataaacacacatgcacacacacccccacctgagctgaaccaaaggccatcttcccaaatattggagtctggctttatcaaaatatttgtggagtattaccagaagttcagattcataggctctacaatacagcttctaatctaaacctctagaggttagggccctggattttatttatttatttatttattttttttaaacaattttcccattcagatgtgaaggcagtttgagggacctcatgatggcaatactatattcttccataaacttataacctctatcttctcctttaagaagtaatttaaaaaatcttaatacatactatcattggaagtgcttcatctaagaaaaatgagaaattatctacttgtaaaagaacacacaaatgggtatatttacatatttgtaaatatgtaaatatttacatatttgtaaatatgtaaatatttacatatttgtaaatatgtaaatatttgcatatttgtaaatatgtaaatatttacatatttaaattaaattaatttacatattaaattaaattacatatttatattaaaaatgtaaatttgtaaatatggttttacatatttgtaaaaacctcatcacattaggaatgtcattcaaatgaaaggtgaagtctaagctcatgtttatcactgtactgttttctaaggaacaataacgaaaaaatactgaaaataagtcctaggggaactatggcagtaagttaaacgggtagggtgggggtgttcttaagcagttctaaggtatttgtgaagagacaacttatattctattgattctaaaattcacttttttcacattatctctgaaatcagattacaccatacaaatgatagcatcttacaatgaattgctggtatttttctgtcttagcagtaataaaatgatagtgtttcctacaatcagagattagtgaaaatactatcaacatgaattcttctcttgtcatcaaagacaatttctctaaaaacctcaggaaaaaagctgctagtctggtttgaatttcacaatatataaaagcaatgaatatatttttcttttttaaaaaaatccacaattattaattcaagttaccactcctcaacagaaaacatacaagagtctcatatatgaagtcactattttctgggcttgatttctaaactaaggagtggataactctaaggtttcttttagctcttaaagcctaggatcccataattttatttatcaatattaagcttaccacaaagtttctcatttcttcttttccacccaaccctgctatacaattccaaaattagcaagtcataaaaaagtggccactagtttgttcactgtgatatataagaatgaggcttaaaaagcagagatccttgggaaataagatcttgaaaaattcatcacttttgagctttcatatgagagaataatcttaaaccactttctattatagaacttctactatgtgttactaaaatatgtggctttatcataatcatcacctgctgtgaatacttacttcaaaaaattacacaggttatcaattttacttataagacctatttcgatgctggtttttctagtcttttcacattctgttatttttttaaaaaaaagaaaaggaagaaaaagcaagggagaaagaaagttaagagtaaaatctgcttagtgtgagcattcagagcccctaaggaagcttctctgtaagcatcatctctttctattttcacagtttattaaactgcctaacacacatgatttctgaagtgaactgcttttgtgggctggcaatattcaagtacatatactatctagtgaatcctgatttatgataggccacactatattatctaattttgatataattaagcagaacttgctaaaaacaagttaccataattaaagagctcacagttaattttacactaacacctaaggctttaaaagcagttgtttccttaaaattctagaatagaatttaaaatatagaataaagtatataccaagtacttaaacttttgtttttagtcttgctttactagagaaaaaaatgggggactgaggaaaataagactgagtagacttctgagcgaaagacagataaggaaggtagacaattttttgaaccctggaatgattcttacagtgtaatttcattgccttttaaaggctagacatagcttttgatgaagacagctgaagggatctcacctcaagaagccaaacataaagtatgtagctttggcatttgcagttctgctccaacaatggatagtcatagacagacctcaacatacctttcataaaacatcactcacattcttataaaataccctatcattctgctaaactatgtaaagtaaggtgctggctgccttatgatcagtcattaagtgtattaattattcatgtgtctcaaaactatgtaagtgaaataaaaagggtaccagaaagcaagcaataataatgacttcaggcagttaaagcccccttttgtctctgctagaaaaccacctgagttgcttaaataatgcagaatctttctccaacactataaacatatctgacattaaaaaaaaaaaacaaaccagtaacaaaaaaaaaaaaaacacacaaaatctctgcaatttttaatttctgagatgtcaaataactttttccaccgggctacagctttatgaattctcgaatttagacaattctaaaactaaaatttagacattctaaaactaaaatacattttaaagtaaaaatcacatttcctagttgtctgtgtcagacaactttactagtatactatagtattattaactaccttaatttttgttgacattaaattttacttgaagatgataaaaaagtagcagcaatgacagggatagctaatactagaaatacaataaagctctgcgataatgcacctgagacaaatgtaaattttggtgaaatgtgactgacgactgctttctgtcttctggccactcttatattcttaaacagatacactaaaattatcttgtggaggaaagaaaaggaacaaatggcaaccccatctggaaaaccaggaagttaggatgagtacctgagtttccagtatttccctgctcaatctccctggacttgatgttacaggcaccactaatccccagatttttggaatagctgctgttttccagaagttccaagacccagagttgtctctatgaatttttaagtgggaagaaactaccacagccaggcagtgccgtccacacagggatattctaagtggcccagcaggactcaactcttactggcaacaggcactgatctgccatggtcacttcatcaagtccacaataatgcaactctgaattttacacgatggaattttttggacactacctataattttatggtatggttttactgtaccattactcccagttcaagactgcacatccacacttattattgggtatctccacatttctcttgttctggtctttgtccaacactctattctcttctgaatgaaagaaactttggatttagttttcaagatttagaaaacccattctttttcaaagatagcatgaccattatataatacaaccgatactttgtagaacacatctataaacttgcacaggaacaacaaaagtataatacttatataagatcagaaatgtccatgtgttcctatgctatatggtatcatttttttcagtcacttttaaaatgaattcactgaactgtatcatgatatccccattattaggtttttaatctagcagcccaacttacccggacaagtgcatcatctatgatatggtcacgtctaactttgagtctcaaatatggattcaactgctgtccttgaactaagctgtagagaacagtgattcttcgttcactgtacatgcgaattctattgtcataatataatcccaaattctttgtgacagcattcaatataaagggacatgtcataaaagagaatttgttctctgtttctactttgaaaaaagtataatctttatccatttctagaacctcattcagtggttcattaataaactcttcaaaagggataagtggttttcgacaatccagggttttaacaccaagttcagtttccagggggtccactcgaggacctttcttgtttcttctttcttctcccaaaagttcctgaagtgtcagctcgctggactcagggatgggctcttcatcatcttcttcattgtgatttgtgtccacttcccctcccactacatttgcatagtaaaccattttcaagcacttcgaagcagcaacaatggcatcatcatcattcactagatttcgactgttaaattcattgcttatgactttataagtaataagttgctgaaatgtctccatcattctccgaatctggtctgcattgtatttagaccacagtctgatcagttttccttgggctgcaaggggtagcttgctcatcgctttgcaaaataatggcaaagccatttccagatattcaggactgtggagatttctattctccattacgataatgaacaaattcagataattaggatctcgagagtatacattgtgatacgtcaagtcacattccacgttaggtgacaaatatacaagtgcattgagaaaggcagtttcaattttttcattagagagcaatctggtgtagacccttctaatggcatcaatatccacagacacatcatcagggcctaatttttgcaaattgttgtctccctgtgagctatcacctatccttgaggaagatgcttctgagtcttcttccatagcagcagcagaacatgcagctttttccttttcatcttcatctttgtcttcatcttttgcttgaagagatttcagttcttccttggtgtgttgtttaactttccggaagctctgtaccaatgcctcagcactagaaaaaactcttccaataacacggattaaaggggaataatcctctctttctctacataattcaagaatttcatataccttctcttctgttaagtaagtcacatctagaaaatcagaggaaaaaagagaacatttattttcataatatgtatgtttactctgttgcaaaaagttctaaaagtaaaacagccaaacattctaggctcaatatcatttatgatatacaactcttaaagtatctaatacttagattcagcaaacaaaatttaatgcttacctatttttttcaatgaactacctacctataccaatgacctcacccatgcttttacattctttcaacaatgtataactcttaataagatcatgagtttaaactttctttataatcaagatatctattaatgtatagctttaattataaatatgaaccaatatgtcatgtactgattaatcataatacagctcttaaaacctcactgtagaacacacagaaatactactaatctgtgagttttcttgtttcagtactctgttctccaaagactaagaaggcaaggtcttaaaaaaaggctccttcagcatctatgtatgtattaaaatcaaactggttcattttgggtcttcctagtttgttccagggtagtcattctgtgagtgattgagaagaatataccatttctcatcggctcttaagtagaaactgctttccacagccaggaatcaggttagactaaatctcatagagtgacagaaaatagtttttgagcaatgaaaacaaacagtgcaaagaagtaaacttatgagctggcaagcagtgcagagactatgtagtcatcaaaatctatttcctcttttcctgggcacagagttggaccacatttcccaactttttgagataagtgttattttcaggccaaggctttctcccttctggctaataggatgaaagatatttcatttcacaggtaaaaacaaatgatatattttgtgtactgaccaacataatactgagaatagtcttaattctcccttttatcaataaagtgacatacttgtcatcatcagattaactacttgagaggttaattttagaggcacacagacaatcctacctccattgcgccaaatatacccttatacatgtagtgtacaacatgtagaatttttaatgactcccacctctgctataatatatgtttcacaatgaaagacaatataaaatgtaagtgatcattgaatggtctccaaaaattgaagcacaaaaataccaaattttatcatactaaggatctgatctgtggcccagctacaagagtaccaacacttacagtttcttttatgggccttaactctttaagaactaattctcaggtttgttctattaagaatatataagcatcttttgctaaacatcagtaacctcttccccaaaagcataaaaccactggaaacctatttctcattattttcattgaaaatttttaaaataccttcttacaagacaatgcaaaactcctaatttcctaaaatgtaacataacagaaaatactactatcctattaggacatgaaacactttgcttcctgagcaagtcataaggttaacaaagacttgctttgcatgcagtaatatggcctgtcctagggatcaccattctagactcacatgtcctttgttgatatgtcatgctttcggaacatcttcaagtgattctgacagtctactaatcctatatagaatgtacctatactttttccaaggagtgttttttgttgttgttttttgacatggagtctcactctgttgccaggttggaatgcagtggcaccatttcggctcactgcaacttctgcctcccgggttcaaacgattctcctacctcagcctcccaagtagctgggactacagatgcacgccaccacaactggctaatttttttgtatttttagtagagagggggtttcaccacgttggccaggttggtctcgatctcttgacgtcgtgattcgcccgcctcagcctcccaaagtgctgggattacaggcgtgagccactgtgcctggcctgtagtgtttaatatgttaaactgaatttttcaggtatatagataaaaattagtcaaaaaacactgtaattagatatgaacattcaaaaagtttggtttattgatacaggtgttctactgagaaagacatttttataagatttcttgtgataaatgtgtccctgaaaatactcaatcttttaaattttgcacttaaaaacctcctacgcaaaaacagtttggtgcagactacttaatacttatgcaactttgtaattagtgttaacaaacataattaataatcaaaataagagtactagtgtacagaaagcatctctaatttccaatatacaatagtaactatagaacaatgcaaaaacaaaaacaaaaaaaccagtaacgaacagggaacagtaacagtagcatattagaaaacagggataaggaaaggtcacaactgctataatgcagacttgagcaaaaagaggagggggcataaagactggataaagccacacaataagcacctctaagatggagcacgtggccaaaagagcagatgagcacattcctcatgtaccacatcccccgcagctggctgcattccactgtgccagcactctacattcagttactggtactctctggtgcacacttactggagaactgtgtacaataaagtcaatgcagcttccacattatactgacacactatatatacagacaacatttacctattttcccatagtgtgtgaactaattcatgaaacagaattatacactctgaagcaacaaagttgtgtaaagtgacgaaaataattttattgtggaaacagagtagaggttataacacaatgccacttcactaattctttcaaacttgattcaaatgatgttagtgaaagttttagaggcaaatgcctctaaaattctctgacttgtatgtcataaaaaaaaagctttctctcttaaaatacaattgcctctgggtgtgtgtaggggtgagagtggaggggcgctaagccctggtagtcattcaaaaatttgattactttgttactaattaccttcactgaagaaaataacttggagttttagtattagcgacaaggtaatcgaattctgaattttggacgtaggaccatttagaaaacaaaagacctgagtgaagactgtcattggtaggtcatgatccttggcagcatgactgtaccaaatgtccggaaggagagtgagaagcatatatctgaaggaaacgtagaattctcacataactatcacaaaattttgtcttgccttcaaaaatggaaaaaacccactgtttcctctttctgcttctttcatcacatcatcctgaggttccagaactcatgccagatacttagtccagttattctataacttaaatagatgttgtggcctagttttggagattcactaccacttaatacatttttcctaagaattttaaaaagttcaaatcaatctattaacaaatgaacttttggcatatgatctgcttctaattagcaatgattagacctgtaaaatgtagttattattcctgtccgttaccacaataaaaaattggttctacgatatcaaaatgtctttatgtcacagaagaaaaaacaaataaaaactaatacatttaaatctcccacatggttttcaggcaacaattctcaattgaaaataaaacatcttacctttaaaatcaattctagcgcctttcttgttcatttttatctcagagcaggagttgttgggggcacctttcgagttctcaaggtaagctgagcttgctcctttcttggagggatgaggatcacagagttttgcattaatcttataaagctcgagggctttaatagctgctgcattattatccatacgaagaaaagttggacaggaagcacaaaactcattcgtgcaggcttcatttccacagccctcagttaactggtggtagtagcgttctattagatgctttgcagctgctcgcttcctgtaccaaacattcaaacaataagcacagtgattagtacagctctcaagtacaaagctcaacatatcatcaaggcaaaagttagtcaagcactgaagtgattaacctgtgtatgaagatgagaagtagaaaatggagatgcactatttaccacaactcctgactagtgaaatagttaataaatattttctaggatattatgataaagaatgtcaatgcttactgactgtattaacagagtatacattcctttggtttaaaaggggggaggggggcttgtctgatggtatatgtgcttaagttgtttagtacaacagctgaaaaatcacaaggtttacagctaagagttgtaggattctatcattttaaaaattagcattaggaaaatgagtctatttaaagcatcaatccggttttcttttacataatcagtatttcatttttaacagcttgtaaacatttgacttatagttaacacagaatatctatctggaataaaaactatttttcccaattatcaacaacatgggagacttaaaaataaatttgtaagtggaatatccaaagatagtgttacactgaaagaaagcggctgcagcctgagtgaggcagatcatgactgtaatcaatcccataactgtgggaggctgaggcaggccgactacttgagcccaggaggtcaacaccagcctgggcaacatagtgaggctactctctacaaacttttttaaaaaaaattagccaagtgtggtggcatgcacctgtagtcccagctacttgggaggctgaggatcacttgagcctgagagtcaaggctgccataagctgaaattgcaccactgcactccagcctgggcaacagagctagactttgtctcaaaaacaaacaaacaaacaaaaaccaaaaagaaaaagaaaaagaggctccaaagtgtagaatcttaaatctaaaacttgtcactaaacctcctcattagttccacgtcacaagatggaatattttaagttccatcacgtgaaatcttatattccttttactctgtcaacttaaagtacacagattaatgtcctattatggctgtttcaggagagctaccaaaactgagggaggaattatgtgaccatgtaagaagttagatgacattatattcaacactaaagagtctatgcttctactaactgataaaattaccataatttcagtagaataaactactggatccaaagaaacataagtcatagccattccttttggtcccaaattcacaagcatggaaataacaactacaaagaatcaaaattataagaaaaatagttcagctgattttcaaaacattcacagaattatctaacatgtaggactagatgaccaatgccagagtttacatcttgctaatcatgagaaactcaacaattaacaaggcagcaagtaagtgaagaaacacacgagatccaattttgtctcaacagaagaactttcactctctgtccaggtaggtgacaaaaagtgataattcacacacattcaattcattctggtgcttatttttcaaatgttccatgcaaatttaccactcactgcatgcaaacagagaaaaaagaaaacccacaaagcacatgtaaaaattgcataaacatgacttaaagacattttgctatctatgaagctataaaccccacctgaaaattaaaaactgttatcacagatttagcactatgcaaaatatgaaagtgaaaacatgtaaaaataaaatggaaatgcagaatctagaaaatttaaaatatatattgctacccttcagtaaagaaagggagataatgtcatgttctcccaaactacagtgacttccctggtgaaaatgtaagtaggtatttcctttctggaggaaaacagtgaacatgtatcgaaagtcttaaaaacacgaataccgtgtgaatgagatcctacttgtggaaaataatttgacaattttacaaaaatgcattgtttctatatctgaaaaaaacatgtctaataaaagattacttaaatgaactgataataggtcacacaataaaataaaaactatcaagatttgaattcgacaaagaactgcctagtcttcctgatatatcactaactgacaaaagtcagttaaaaagtagcaggtgtaggatgaacccattgttatttcaaagcattaatagcattttctctggatgatgtgattaagtgagttttaaaacttcttccatcttttgatttcttatttattctttccatagtaaggatgctacttgcatattaaaaattaataactataaggggaaaacaatagcagttataaaacttcatatacatgatttgaatggccccgagatttactaaattgtctctgatttttaaaaaaattacaaaagtcaaaataccaaaatagatatttttaatgtgagcttttatactaaaataacctccccaaaacttgtcagatacatagtacttctttatatactacataggaggagagtgatcagcacaaacagaacgagactgaaaaatcagaagatctgcattaagtgtcatccttctgtccctaagcagctgtaggatcctagggaaacaattgtctgggcctcagttttcccagctttatgagtcccttcagttctaattttaaagttattttatgtaatagggaggtgagcaagaaactagtatttgctggatgcctgataacttattacacacactgcggggcactttgacatgggttatctcatttgaataccatgacattgaggattatcttcagtccacagccaaagagagaaatagaactggagtcaaatcacgaaaccaagatctcaaagaaagtacagaaccaagacaagaataggagtccaggagtctttcagcttcagagtctaagtcattttgactatattgttttgcagaaggtgattcatttcaaaataattattttttaacatgagtaatactgaagaattctatggaaaaaaatctcataactaatgtgcaactgggaaaaaaatctgaagaatcataacgtgaacctcacatttatgcatctatctggtaccacaaaggcagaccaagtttcttgaggaaatggaaccactatattctgcaaagttaatttctctctaatttgttgaggacctatgtgctatgcattttatagacattcccactttagaggggaataaaccttaacagttaagagctcgcattctgaggccagatgcccaagttcacataatggctctacctcttaattaactatgtgaccctgaatgaattacttgatctttctggacgtaagtttcctcgtaatttaaatggtagtatctacgagcattatcatggtgagagtattattcttcttcacattaccaattgtgagaaaattaaatgtgttaatatatataaagtgcttagaacattgcctggcacatactaagcactatgaaagtgttagctactactattattgttgtaattgttactatcaccctcacaagtgtatgagttagcactataaaccttcattctgctgatgctcagagaaattacataagtcatacatctaataagagatttgaactcagctactaaacttgagcttttaataactattaagaggaggatctgaaagtagccctctatatttgatctgcctttctgtgccaagtttaacaaatagcagctacactgatgagacaggactaaaggaagccatgccagaacctccaagttaatggtggaatcaactatattaagcattcttcttttttcctcactccaatgacaccttaatttatctgacctcatctgcatcactatctaatttaggatatgtaaaaggcatacaaaatttagagcacataaaagggcctctacgttggaaaagtatacactaataacgactttttggtatagttcctgcgcaagggaaatccttgtaccatatgggtcaccaaatcatagctcgtaagtcaaatcgagtccaccacctgtttatgtctctcaagcttagaatattttacatttttaaatggctggaaaaagtttgaaaaataataatagtttgtaacgtgaaaattataagaaattcaagttccagtatccatcaagtgtactggaacatacccaagttcattgatttataaatatactatatatgataatgctttggctctgtgtccccacccaaatctcatcttgaattgtactcccataattctcatgtgttgtaggagtgaccccctgggagataatctgaatcatgggggcagtttcccacatgctgttcttgtggtagtaagtctcacgagatctgatggttttatcaggggtttccgcttttgcatccttctcattttctcttgtcactgccatgcaagaagtgtctttcacctttcgccatgattctgaagccttcccagccatgtggaagtgtaagtccaattaaacttcttttttttttcccagtctcaggtacgtctttatcagcagcgtgaaaaaggactaatacaatatactatatagtttatggctgtttttcatactacaatggcagagttgagtactttaggcctgcaaaacctaaaacaaataccacctgccctttacagaaaatgtttgccaacccttagtttaggatctattatttatctctgccctccagtgaccctgccatctaatcatttggcctcttaactctctctttaccctgagcaaatccgtaaaataaaaggtatacctttccccaagtactattaaagaaaagaagaggagaggggaaaagggaaaaaggggaaaagaaagtgaggaaagggagaggatgcaaaagaaaaagaaggaaagaaaggaatttccctgatgagatcccttagtaataccttatcagctgttcataatcaaaattcctagaagaggaacaacagcttacttgctataatttcttcacattccattgacttttcttattactcaaaaaacaaagtatgttataatgtgttgatttttaaaataaaacaaacttttcttatttagtcagcaatgaaggtcaagtgagaccttctagtaaaagtcctctaaagtcagacacatgaaaatacttatccatttaaaacagacaatactttccaattatttatttctatgattgaattaatgggacagtgctacaaacagaagtcctatggaataagtcatacttggaagatcagagtttactctagacaacttgacagcaatcagtttaaaaatggtttcacctagagggatgtgtactaatgttagcaattaactttgaaaggcataaaaattaagatggattgatggatacaaggatggttatacgataaagcaatgtaagtattaatggcagaatctaggtggcaggcatatgtgtgtcagctgtaaaatttgtgttcaatgtttttttagttcccacatatcagtgagaacatgtgatatctgtctttccgtgtctggcttagttcactaaaaaaatgaatttacaagacaactggaatataagcaatgaatacaagcactaagaagatgaagccatagaaacagctgccagaaagtgaagatgtgacagtgaacgccaaacaagtaagattagaattacaattagaatcagaaatgacaaaaaagaaacatgaactgtgagatgcaatataaaaactaatggtgaacaaagcaaagaataaaaaataaaaacggaaagattaaaaggaaaatgtgactgtaagtagagtgacctttatattatacagaaggtaaagcagaatgaacatgtgaggaatctaaaaaacagatataaaatagaaacaactgaaggcttatataattagtctataaagctaggaaccactgcttagtaatttctcgtaagtggagtctctttgttctgagacgttgcaaaactccattccatctcaaagttatttttaatgttaaaatttgtaagagtgagcaacggtatcctaaatagttctaggccttgtagaaatagactgtaagagacatctgtgacacaactatattcagtatgatgtagggtctgttacaatgggatgaagtgaatttagattatttcaagactaaacctacaattgtgaactcattagtaccatgaaccgaacaaaaacctattaaatatagaacaagacgattttcatgaaaaaataaatatgaacaaatcagtattttcagttgtttgaaatataggttaaccttcaattactgttttatggccgggtgcagtggctcacgccacgcctctaatcccagcactttgggaggccgaggcaggcggatcatgaggtcaggagatcgagaccatcctggctaacatggtgaaactacgtccctactaaaaatacaaaaaaaaattagctgggcgccgtggtgggcgcctatagtcccagctacttgggaggctgatgcagaagaatggcatgaacccgggaggcggagcttgcagtgagccgagacagagccactgcactgtggcctgggcaaaagagcgagactctgtctcaaaaaaaaaaaagaaaagaaaagaactgtttttttcatttttatagtctcaatatccagaatgcgtgatatatgataaaaaaaaaagtaaaattgtagaactaaatatttacataattcatctgtaaaatgaaaatctgttttacagtgtcatatttcacagttagaaaggaagaaaaaccttaaatcaacaaattaactttacatcttatggaattaggaaatgaagaacaaatgagactcaaacttaccaaaaaataaaaaaaataaaaataaattacagctaaaataaaatagagaaaaatagaaaatttttgcaatagaaaaaaaatcaacaaaattaggagtagctgttttattgaaaagatcaacaaaactggcaaattcttagattaagaaatgaagagaatagacacaaacagcaacaactggaaattagaaaggcgatacaacaactgctgccacagaaataaataggaccttaaaagactaatatgaacaactatgacccaaaaaaatttgataacctttgagaacggatagacacatcaaacccaccaagactgagccacaaatacatacaacttctgaatggacctataactattagagattgaatcagtaactgtccaacaacgccagggcttcactgaaaactctaccaaacatttaaaaactaacaacccttctcaaactctttgaaaaaactagaggacagaacactttcaaaatcattttatgaggtaagcattacttagatatcgaaatcagacaaatttacaagaaaaaagaatccctaataaatactgatgcaaaaaaaatcaacaaaataccaagaaacagaattcaacaatgcattaaaaagattatatttcataaattctcaactggaatttattcataaaatccaaggatggttcaacatacaaaaaaatcactttaatacactgcattcttaggacaaaaaccaataatctcaactgactcagaagaagcatttgacaaaaatcaacacccttttaggatttaaaaaaaggccagacagggtggctcatgcctgtaatcccagcactttagaagggcaaggtgggtggatcacctgaggtcaggagtgtgagaccagcctggccaacacagtgaaaccctgtctctactaaaaatacaaaaactaatcgggcatggtggtgggcgcctgtaattccagctactcgggaggctgaggcaggacaatcacttgagaacccgggaggcggagctggcagtgaggtgagatagcatcattgcactccagcctgggtgacaagagcaagattctgtctcaaaaaaacaaaaacaaaaacgctcaattcgctagaaagatatggaaattacttcaacataatgaaggccatatatagaaagaccacagctaatgttattcaatgatgaaaaactgaaagttttccctctaagatcacaaatggaacaagaatgcacacattcaccacttctattcaacatactgttagacatcctgccagagttagcaactgggcaagaaaaagaaatgaaaggtattaaatgagaaaagtaagaagtaaaattacttctgttagcaaatgacatgatcttttatgttgaaaactctagcctaccaaaaagaaaaaaaaccgttagaataaaggaattcagtaaagttacaggatataaaaaccaatattaagaaaagagttgcatttctaaatactaaaaatgaagaatccaaaaaggaaattaattttttaaacccatttaaaatgaaatcaaagagtaaaaaatacttagggaatattttcaccaagcaaatgaaagacatgtacattgaaaattaaacaacataggccggacgtggtggctcacgcctgtaaccccagcagtttgggaggccaaggtgggctgatcacgaggtcaagagattgagaccatcctggccaacatggtgaaaccctgtctctactaaaaatacaaaataaattagctgggcttggtggcgcgcgcctgtaatcccagccactcgggaggctgaggcaggagttgtcacttgaatttgggaggcagaggtgcagtgagccaagatcacgccactctactccagcctggtgacagagtgagactctgtctcaaaaaaaaaaaaaaaagaaaaagaaaattatacaacaatgctgaaagaaattaaagacaatacaaataaatggaaagacatccaagtttatgaattggaagatttagtactgttaagatggcaatactacccaaagcaatctgcaaattcaaagcaatccctatcaaaatcccaatggcattttctacagaaacagaaaaaaaaaatcttaaaattaatacagaatcttgaaggaccctgaatagccgtaacaatctggacaaaaaacaaagctagaggcctcacattccctgatttctaaagatattgcaaagctatagtaatcaaaacactatggtgctggcataaagacagatatacagaccaagtgagcagaagagagaacacagaaatagggaaaagaggttcttcaacaaactgtattgggaaatctggaatctaacatgcaaaagaatgaagttggagccttatctcacaccatatacaaagatgaactcaagctggattacagacctaaacttaaaacatcgaattataaaactactacaagaaaacatggagaaaaagcttcatgacattggacttggcaatgatttcttgaatagatcaccaaaagcacaagcaaccaaagcaaaaatagacaaactggggatacataaactcaaaaatttctacaaagcaaacagtaaatggagtaaaatggcaacctacaaaacaggagaaaatatttctataccatgtatctgttatttggttaatatccagaatatataaataactcctacaattcaacaacaaaaaatctagttaaaaagtggacaaaggacttgaatagtcatttttccaaagaatatatacaaatgggcaataagcccatgaaaagattctcaccatcactgatcagtagggagaaatgtcaattaaaactgcaatgatacatcatctgaaaccattaggatggccaccattaaaaaaacagaaaataagtattggtgaagatatggagaaactggaacccttatgcaccactggtgaaaatgtaaaatggtgccaggcactgtggaaaacaacatgaaggtccctcaaaaaatttgaaatagaattacctccagttccacatatgaagagcttggaagtcaccactccatcctaacaacaagtaaaaaatgacaaacttaaaaataaacaaatctgagataggataagtgaggtcacagggcaaatgactgcctgtgagagcagagaacaggtgaacacatagcatcaccatttatctgagatgaaaaacacaagcagaaacctccacggggtaggaaatcctgaagtgtaatagacaaattgatgaaggctcagtgtggacaactctgaaagctaaaaactccagagttacccaattatagggggagccctacaattttctaagttttacatccaggcaattgaccagcttctcacagtaaatataggagaaaaatcctcaaccctcagcaggggaggcaaagagaaatgattttcaagtacactagactattccagtcttaacaaggtttgtcctcaggagaaactagttaaccagagcctaacctgctggggttgtagcaaagccaaaatgatgtgggggaagagaaataacccaacttcaggccattatagctatcttgttctaactaagggaatgagggaggggtgggattgagaaacacttgtgaagttcacagtccagaggcataagctcactaaaaagactgacctaatcataagactacagaactcttctcctctccctacaccttacaaccacattactaaatgctcatttacaacagttccttttacctagtacatcatgtccaagctatcaagaaaaaaattacagggcataataaaaggtaaaaaacaagcaccaggaccagatacagcagggatttggaattatcaaacttggaatctaaaacaactatgattaatatgctaagggccctaacgaactgagtaaacaacatgttaaaaaagtagagatgaaaatcctaagaaccaaaaggaagtgctagagataaaacacaaacaaaaacaaaaaacagaacactgtaagagaaatgaagaatgcctttgatgggcttattagtaggctgggcatggatgaagaatctctgagcttgaaaatatgccaaaaaactacatctgggcataaaacgttgtaattacagaaattcaaggataagaaaaaaatccgaagtaagccagagggaaaaaatcaccttacctgtagaggaaaaaaagaaaaaaaagaaaaaatacatgtgacttccaacaagaaaaagagtgaaatattcatagtgttgagagaaaaaaaaaccataaacctagcactctaccttgtgagattattattcaaaagttaaaaagaaacactttctcagacaaaaattaaggaaatttgttgtcagtacacctgccttgcaataagtgttgggaagttcagaaactgaaatctacatatatagagcatcaaaagaaggaaacactgaaagtaaaataaaaccttttatttttcttatacttaattgatctaacaaataagaatttgttcaaaataatgtcaacaattgtgcttatgcatacaaatgctcctaaacttacttattgggttgtgtcccaataccattataaattgaaaatatcatgaaaacacaacttatccaaatttgtgggatacagtgaaagcagcgcttagaaagaaacatacaacactgatgcatttattagaaaagaattatctaggccgggcgctgtggctcacgcctgtaatcccagcactttgggaggctgaggcgggtggatcacatggtcaggagatcaagaccatcctggctaacacagtgaaaccccgtctctactaaaaatacaaaaaaattagccacacgtggtggcaggcgcctgtagtcccagctacttgggaggctgaggcaagagaatggcgtgaacccgggaggcggagcttgcggtgagccgagatcgagccactgcactccagcctgggcgacaaagcgagactccatctcaaaaaaaaaagaaaagaaaagaatgatctaaaaatcaattatctgagctaccaacttatgaaactagaaaaagcaaattaaatccaaatagaagtaataaaaattagagcagaaatcaatgaaattgaaaacaagatatcaatagagaaaaatcaaagaaatcaactagttctctgaaaagatcaataaaatcaataagcctctagccaggctaagaaaaagagacaaaggacaaaataactaatatcagaatgaaaagagtggacatcattacagatctcatggacattaaaaggataatcaagggatattatgaacaactttacggccacgaatttggtaacctagatgaaatgaatcaattccttaaaagacacaatctattagaactctaagaagaaataatcttgattaaaaagcatatattaaagaaattaaatccataattaataatgttctaaaagagaaggcatcaggcccagatggattctctgatgaattctactaaacatttaaggaagaaaccacaccagttctctacaatctccttcagaagacagaagcaaaggagatgctcctatctcattgtatgaagtcagcattactctaatacccaaaccagacaaagacattatcagaaaagaaaactacagacccatatttgtcatgaacaaagatgcaaaaatctttgtattagcaaagtattagcaaactaaattttactacaatgtataaaaagaagtatacaccagcacaaagtaggatttatcccaggtatgcaagactggttcaatattggaaaatcaattaatgcaattcaccatatcaacagactaaagaagaaaaatcacatgaccataccatagatggagagaagtatgtgacaaaatttaacacccactcatgatagaaactagtaaactaggaatagagggaacaccttcaacttgataaagaacgtttacaaaaaacatacagctaacaccatccttaatgatgagaaactagaaactttcttactaagatcaggaacaagaaaagaatatccccacctcaccactccatactggaagtcctagctaagacaagaaaaggaaataaagggtatactaacggggaacaaaaaaatacaactgcctttgtttgcagatgaaatgactatatgtgtagaacatagacaggaattgaaaaaaagaaaaagaaaaacaacaaaaacctcctagaactaataagtgattatagcaaagctgcaggatacaaggttcatataaaaaagttaatagctttcctgtaaaccagcaatgcataagttgaatttgaaattaaaaacacaataccattttacattagcgtgtcccaaaatgaaatatttaagtacagatctaacaaaattagtacaagatatatgaggaaaaatgttttagaactctgatgaaagaaatcaaataactaaataatgaagagctattccatgacccgtgagagacaactcaatattgacagaaaaagtcagatggacactactgatttcaagatttactgtaaagctacagtagtcaagatggtgtggtactgacaaaagaactgacaaaacagaccaacgaaacagaatagagagcccagaaatggacccacatagtcaaaggagcaatggcagtatttgacaaagaggcaaaggcaatacaatgaagaaaatagtctttttcaataaacagtggtaataactgaacatccacatgcaaaaaaaaaaagagtctagacacaggtcttacacccttcacaaaaataaactcaaaataaaccagagaattaaatgtaaaactcaaaactataaaactcctagaggataacataagaaaaaatctagatcttgggtttggtgatgacttttagatacggcaccaaaggtaccaaccatgaagaaaagaactgataagccagacttcattaaaattgtctacttgtttcttaaaaattgttgtcttttgcaaaagacaatgtcaagagtatgaaaagacaagccacagatagggaggaaatatttacataagacacatctgataaagaactattaactaaaatgtgtaaggaggctgggtgtggtggctcacatcccagcactttgggaggccaaggtgggtggatcacctgaggtcaggaggtcgagaccagcctggctaacatagtgaaaccccgtgtctactaaaaatacaaaaattagccaggtgtggtggtgcacgggtataatcccagctactcgggaggctgacgcaggagaatcacttgaacccaggtggcagaggttgcagggagccaagactgtgccactgtactgcaacctgggtgacagagcgaggctctgtctcaacagacagacagacagacagacaagacagacagagacagtgtaaggaactcttaaaattccacaagaaaacaaacaacccaattaaaaaattggccaacaaccttaacagacacctcaccaaagatatacagatggcaattcagcatatgaaaagatgtcccacacatcatatggcatcagagaaacacaaattaaaattataagatacctctacacacctatcagaatggacaaaattcagaacactgataacaccaaatactggtgaagatgtagagcaaaagaaacactcactcattgctggtgaaaaatgtaaaaggatagcgtcatattagaagacagtttggatgtttcctacaaaactaaacacttttaccataagatccagcaattgcactccctagtatttacagaaagtcgctgaaaacctaagtccacacaaaaacctgcacaccgatatctacagcagttttattcataattagcaaaatgtggaagcaaccacaatgtccttcattaggtgaatattcattcacaaactgtgatatgtccagaaaatggaaaaagagaggtactaacaacctatgaaaagacatggaagaaactttaatgcatattagtaagtaaaaatagtcaagctgaaagggctatatactgtatgattacaagtatataatatgctggaaaaggcaaagttagagacacagtaaaaggatcggtgattgccaaggagtgggagggaaggaaagataaataggcagaacacagaggattttggggcagtgaaaacattctgtatgatataatggtagatacatgtcattgtactttgttcaaagccacagaacgtacagcactaagaatgatccctaatataaactacggactttgggtaattatgatgtatcaatataggttcatcagaaagacatgtaccactctggtgggagatgcacactggctatgagagaatccatacatgtgtgtggaaggaggtacaggggaaatctctgtaccttcctctcaattctgtgaacctagaactcctgtaaaaaaaaaaaaaatctaaaaaaaaatagaatacatatgatccagtaatcctacacctgggtatacttccaaatatattaaaaacaggttctcaaaaaaatatttgtatacccatgtttatttcaacattacaatattcaagaagtggaaggaacctaaacatccatcaacaaatggttaaagaaaatgtggtatacatatataacaaaatgttattcagcctaaaagaaaagaaagaaattctgtaatatgctacaacacaaatgaaccttgaggacattgctatgtgaaataggccagtcaacaaaagacaaatacttaatgattccactgacatgaagtagccaaaacagtcaaattttagaggcaaaaagtagaatggcatttgccaaggaataggaagaagggggaaaagaagagttgttcaatgaatgtagagtttctgttttacaagatgaaaaagttctagagatctgctgcacaacaatgtgcacagttaccacaattgtaccgtacacttcaaatcattaatatggtaaaatgtgttgtttttgacaatttttaaaactctaccccattgttttctttacctcttatataaactgataaaaacctgttttatcttaatcaattattgtatgactactgctccccagagaaaaaagtgcatgtgaaatactactacttatccatctcctggctctgagcagtacatgtcaggaacaagagggaattgtagctggaagacagtagaagagccataggacaagtctctaagagaaggaagaaaaggcgcaatgaaagaaaacaagtttaagatagtagaaaagcattcaaagacggcaacctgaggtaaggtgttttcactgaagcttttggggtaaaacagttttgagttggcatgcctgtagacatgggaagcagcagtgatgcagaggtgaacattactgtagataaaaacggatgggaatttgacttgctagggactgaggggttaatcatataaataaagatggcagcagatttgggaaagagtgaagaagaataagttcaggtagcagtcctcaaaaaccgagaagaaactgatagctcactgaaggcagacagaggaagacaaaaccagaaggcataagcttcaaaggagcagggatttttatgctgagagagtaaaaggaatagttcaaagcagcagtggagaacacgaataacgttccatgtgggaaaagaacatgtccagagcttactgtacctataacctagcttctgtaactggaaatgaagaatctgctctagtcaggtcatcacttttcactacttattttacttggccttcctaagaaatatagaccttttggaaattattgacttttgggtctaggacactatttcttggtttcctcccttctctctggctgtttttcagagacttcccttccaaatctagagacatttgtattctccagggatcagctattagatactttcccttttaaatttccctttggacagtttcatctttcaaggattgagcaataactaaatgacttccaaatgtctacttcagtataaattctgcttgtcaggctacataaaaagggctcttcaaggaattatgatgtctaaagaaagagaaagccacgatttcaatatcacagagatgactacagaggaatagcaataaaaagagaggcaacttaggagaggtgaatcacaaaagatgactaggagctgatgacactatgggtgggaagaatgtttcagacaggggaagaatgtttcagatagaggaaaatgagtaaaagcacaggggcctgaaaacatgatattataagacaattccaagcacttcaagagcctaaagttcaagaaaagtttcaaaaatatgaaaatggagaggcagggaaaagccagatcatggaagacctcaatagccatgataagtaattctttttttagccaaaagaggagtaatctaataaaagctaaagatcttctcctcataaaaatacatgcacacttcaggagtgcaaatgcactcttccggaagattcgtaacccactacattcataaaccattagataagaactaaaacacaaggagtcactgaagggttttaagcaggttaagtgactgacaaaatttgccttttcaataactgaaaccaaagtgggcaaaactggaggcaagcaatccagttaggtaatgactactgtaatagtccggacaaataatgtagcagtaggaagaaaaaaaaagatgaaattgacccaggaaatatttaaaataagtagtttgtaagaggtaaataagctggaagagccagaggtaatgggtagggtttctggtatgggcaacaagatatgctacaagctgagatgttagtaaaaacaagcgttcatcagcatttagtaagtgatttatttatattatatcactgaatactcaattatgttaagaggcagacagcagttaaaaaacaaagaactcggtgaatcaaaaagttctgctaatttggggaaatagcatcccttttatttttgttaatctcttttgggtttgatcctcatttatagctgacaagaagttctatgtactaaaggtaaactattctcattaatgttcccaaaaatctcttggaataattaagatataaagaaattcaaaattcacatgattataaaaatctttccttagataatctcataatatagccatgttttgctcattctactttgagaagattcagccagaaacagttcatccattcaactatccctactgtgaactagaagtatgtttccttacatttgaaacagaagatataggtttatatgatgcttcaggtggtagaaaagcagggcagactatgactcgtgtcacttccttccacacgtgatgcctttcatgggctcctgtgtctgtcagaagaaagcaaagggccttagcgtgctcctggctttctatatccaaatgcattttttcacaccttctcccatcagctaactctacattactgcaatacggaacttcttactactcagtggacttgttctgctgtcttctctgattccaggtgttattcttcctgcctagaacactatgattcttagctattcccaagcatcctcaaggtttcagcttatataccacttttaagataattaggtattcttcctctgtagtctcataccaaccagtacctattctattatatataataactgcctattaattaaatgggaagctgaggtatatgacctaataacttatttactgtcgtatcctcagaacctagcaaattacagagtctcaacagagatttttcaatttctcttctgatactgtctcgataacagtgtcaattaaacctttctctaattatttgaccttgaagggaaatagatgtcagactacctcctggtttcgagtatactggaagcatacaaaaggaccttctcaatctggagaccaagaatatgatatgagaacctataggagaaccacttatttgattaaagagatttcttttacttcagaaaatatttcagtatgttacttgacccataaatgcttatagatgtgtaagtacaccgaagaagtcatataggaaataaaagcatccaagctatatttctatggtctactctgattaaaaagctcagctctcctatcaaattcaagataatgcatgtggattatggagcacagtcacttgctacatggtaaatgctcaaaaagatgataggtggtattacccacattctacaggctgtgtacatacttatcagtttatatatatacataaactgatcctaaaaaattcttcctacatttctgcaagataattaaaaaggcagaaacaaacattttgcataaatttactagcttcattctttcatgtaggaagtagttactgactacctactgtatgccaggcactgtcattaggcttccattctagtggtaaagaagcaaaacaacaaagaaatcaatatgcaagaagtcaaatgacattaaatcccatgaagaaaaatgcagcaagttaaggggaatgcagaagaacatgatcattctttgatgcagccggtcaggaaaagcatcatttgagcagagagctctctgaatcaagtgaggaaggaagccacatggattatcacagagaagggtcacagggtcacagacaatagttacaagccttaagatgacaaagatacagccattttagacagagatgagcaagtgcggtagagagatcacagaaatgaaaggaagccagttcacacagggccatgtaaatctccagattttacttttaagatgggaagcctctgaaaagttctgtgcatagtaaataacatggtttaactcagattttaaaaagatcattccggctgctactagagaatacactgtaaagcacaagactcctgggaaacaatttctttcttttgccaaaagatgatgcctttaaacagagtaaacagaagtataatggttaaaaaaaataaaatgaattatgggtatttggaaggtgtagccaacaagatttaccaataatttgagtatgtgacatagagaaattaaaagatgcttccaaggcttctggctgcacaggaggggaaaaaagctgttattgactgagatggcaaaatattatgagagacgtaggtttgggatgatgaaaatcaggagctccacttaggacaggttaagtttgagaaccagacttaactgttggataaatcagtctacagttcagagggcaagagctgacgatggaaatagaagagttgtcaatagacagagtcctggggcatttctgacatttacagtaaactgagcatttattaaaactaacttgctttactgaaccataaatcacttgttgtatttacccctgctccatttatagttatacatctggaaacatagccttagtgttagaggtaaagagtaaataccaaacataaaaaatctgatctggttgggtgcggtggctcaagcctgtaatcccagcgctctggaaggccgaggcaggcagatcacgaggtcaggagttcaagaccagcctggccaatatggtgaaactctgtctctactaaaaatacaaaattagccaggcatggtggcacatgcctgtaatctcagctactcgggtggctgaggcaggagaattgcttcatcctgggaggcaggggttgcagtgagccaaattgcgccactgcactccagcctgggtgacagagcaagattccatctcaaaaaaaaaatctgaagttactgagaaactggtatgaaatcattaagaaaactaaggtgtctaaattaatacatacaaagagattctacaacacggtatttataaatttaaacaaaatccatggccaggcacggtggctcacgtctgtagtcccagcactttgtgaggccaaggcagaaggattactttggggccaagagttcaagaccagcctgggcaacatagtgagaccctgtctctacaaaaaacaaacaaacaaacaaaaacactgttttagcctggcatggtggcacatgcctgtagtcccagctactcaggaggctgaggcatgaggatcacttgagcccaggaattcaaagttgtagtgagctctgatcacaccactgcactctagctgtatcacttatgacagagcaagacaatatctcaaacaacaagcaaacaaaacaaaaaactaaagtaaatccaggtaaaataaacatacgaataaatgaaaagatctgggttattgcattagttctgtttctaggcttaactacaaaatggtgtccagttgttaaaaacacttgtttaagagtattaataatttttttttttactatgctcttctacatcctaggaaattggcaacactaagaattcctaaaaacaaacaggagtgttaactgtatataaattattatttaagatgcattcaaggcgttacttaaaatatcaaatgcatgtcaaagtacaaacaacaaaatcatgcttcaacaaatgtgggatgttgccattaatggacagttagctctgaggtaaaaccaagaatccttcattacctatttttgtaaattaggacaaatactattaaggtattaggttggtacaaaagtaattgaacaaacctggacccactcacctcactgaaagtgctgcctggctacagtttctagatataggaatgtgagaaatggtagcagccttgaaggtttagagctatattcccataccaattatggctagaaacttaaaacagctctattgagacattatgggaagtctaatttcctgttactctactttaacacagccaagtaaaacagtaagaaagcttgcttaattcaacaaggactgagtgccagagtgtcacctggaaacttgtgacaaataatcatgcctcacacattcatccttggtttttactaccaaatgcaagcttcatctatcctcttccattctaaacttgactcatcctcctaacctcttccagaaagatctctagaaacccagaggctttctgaagacccataggctatcccccatcttcaactactttacataatggcccctcaacttcttagctttcatgaaagcctggctcctccccaaaggcactgcctatcatgcaacccttttatgtgactcctaaaactcctaagtccaccattattcttctaattccctgtattaaaaataaacggcaaaattccctgtattaaaaacaacaaaaaaacagcttgtaatttgaaactcatgtcatctaaccgaatgccttctctttccctccctgttctggtcaattaaacccacatatttaagcctccactttgcccccagttacatcatcagcaaagtgacttcaatgtccctgtacatggttctatcccaatactctaggcccccaaaatatttgcctttctaaatttgagacatcttcacctcctcatttcagcaaatcactcccttgtctttgttagacatactaaaacctctgacaatgatcatctcagctatctttgtaagagtttcactcatactcatatctcctttcacctgtcaagacaccaggtttggtgacaaataaaaatgatacgtatttgggaggctgaggcaggagaatcatttgaacccaggaagcagaggatgcagtggccaagatcatgctactacactccagcctgggtgacaaagcaagactctgtctcaaaaaaaaaaaaaaaaaaaaaaaacacaaaaaacaaaaaaaaggatacatatttattgtattcacatgatgttccaaaatatgtatacactgtggaatggctagatcaagctaattaatacatgcaatacctcacatacttatattttatggcagaacatttaaaatctactctcagtgatttccaaaaatacactgttattaactagtttccatgttgtacaatagataccttgaacaaattcctcttaattgaaattttgtgtcctctgaccaacacctctgcaacccagtccactcacccccagcccctggtaaccaccattttacatccctgagttaagattccacatttaagagagatgtagtatttgcctttctgtggctggcttactttcaacaatgccctccaggttcatccctgctgtcacaaatgacagcatttcctcctttttatggctgaagtatattccactgtgtatacataccacattttctttatccatgaacacttaggctgatgctgtatcatgggtattgcaaatgataccgaaaggaacatgggagtacagatctcttcagcgcactgattttattcttttatttatatatatatatatatatatatatatatatatatatatatataaaaatacatatatatccaagtgtgactgctgaatcatatggtagttctattttttaatttctgagcaaacgtcatgctattttccataaatgctgtactaatttacattcctgccatgcgcaatatatctcttgtctgcaaatcctcatcatactttaatagccattctaatggccatttgtatgtcttattttgagaaatgtctattcaagtcctttgcccatttcttaagtgaggtgctttcttactattgagatgtctgagttccttatatattttgcatattaaccccttaccagatatatggtttggaaatactatcttccattctgtgagttttttcattctgtagattttttctttttgccatgcagaagctttttagtttgatgtgatctcattcatcaatttttatttttgttgcctgtgcttcgagggggtcatatccaaaaaaatcactgtccaaaccaatgtcatgtacatttctcctatactttattctggtagttctacagtttcaggtcttatatttaagaccttaatccattttaacttgaatttggtatatgatgtgagatacaggtctgatttcattctcatgcatgtagatattccattttcccaacaccacctattgaacagacttccctttccccgctgtgttctttgcaccctgtccaaaatcaactgatagtacacgaatttatttctgtgctctccattctgttttgtgggtcgatgtgtctgtttttttgtttcttttgtttttaaaagacagggtctcacgctgtcatccaggctggagtgcagtgatgcaatcacagttcactgccaccttaagctcctgagctcaagcaatcctccttcttcagcctctcgggtagctaggactacagatacacagcaccgcgcctggctttaaaaattttttttttttttaattttagagacagggtctcactatgttgcccaggctgctctcgaactcctggtttcaagtaatccttctgcctcagtctcccagagtgtgggaatacacgtgtgagcaactgtgcctggcctgtctacttctatgtgactatcatgctgttataattactgtagctttgaactatattttgaaatcagatagtgtgatgtctccagctttgttcttttcactcatgacagctttggctatttaggatcttatgtggttccatataaattttagcactgttttctagttctgtgaaatttaacattggaattttgatcaggattgcattaaaactgcagattgctttggataataaaaacattttacaatattaattcttccaatccataaacacaagataactttccattatttgtatcatcttcaatttctttaatcaatgttacatagttttcaactctttggttaaagttatttctaagtacaatcatccctcggtatctgcaggatattggttccaggatctcctgtagataccaaaatccatggatgctcaagtccattatataaaatggtatagtatttgcatacaacctacacacatcctcgtgtatactttaaatcattacttagtacctaatacaacgtaaatgctatgtaaatagttgctatactgtagtttccttattgtataagaaaacagtatttttattgttgtatttttttctcaaatattttcatccaaatgttggttcaatttgcaaatgcagaaccactgatactgggagccactgcatgttttgtttttggtacctattatacatggaattgtcttcttgatttttcttttagataatttgtcattaatgtacagaaattctacggatttttgtatcttgattttatatcttacaactttactgaatttatcagttctaacaattctctggtggagtctttaggtttttctatatacaagatcatgtcatcttcaaacagggacaacaatgtcttcctttcctactgggatgccttttctttctcttgcctaattgctcttgcaaggacttccggtactgtgctgaatagaaatggcaaaagtgggcattctcgttttcttcctgatctcaaaagaaaagcttttaacttttcaacattcagtataacgttagcagtgtgtttgtcaatatggcctttattttatagaggtacattccttctatacttaattttttaaaattttgtagcacaagagaatactgaattctgtcaaatgctttttctcaattatctcaattatctattgaaatgataacatggttttggcctttgttctcctaatgttgtatatcacattttatggattcaggtctgttggataatccttgtacccttgaggtaaatcccatatgatcacagtaaatgatccttctaatacactgttgaatttagttattattttcttcagaatttctgcatctaaattaagaatacgggtctgtaattttcttttcctggagagttcttgtctggctttggtatctaggtaatgctcatctcccaaaatgagtttgaaattactccctcttcttaaatttctcataaaattatgagaacaatctgtactagttcttctttaaatgtctgctagaattcagcagtaaagtcaccaagtcttgggcttcctttggtgggagatatttttatgactgatacaatccttgtcactggactgttcacatttttcatttcatgattaagcttggacaagttgcatgtgtctaggaatttatccatttcttctatggtaatcaatttgttggcatataattgttcagtctcttatgatcctcttatttcttgtacttctctggtatcagctgcaatggttcctctttcatttctgatttaacttgagtcatctctttttttcttagtctagctaaagacttgttgcttttatcatcaaaaaacacaactctttattttttttatcttgagtcatctcttttttccttagtctagccaaataacctgtcttttgagttcagattcttttgtctgcttgctcaattctgcttttaatgctcttttgcatttttcattccatttattgcattttcagcttcagaatttgttaaaaaataatttcaatctcaaaatttctcattttgattgctgttttcctgattttgttgaattgtttatctgcattttcttgaaattcattgagcttccttaaacaattactttgaattctttgtcaggcagttcatatatctccatttctttatggttggttcaggtgccttattgtgttcctttgactggtgtcacgtttccctgactgttcttgatccctgtagtcatgtgttggcacctgcacatttgaagaagctgagacttgttccagtctttgcagagtgactttattgggtaaagcccttcaccagtcagcctgtccagagattatgcagcctgagtctaccggggctggcctggagtctgggtcagcagggtaggtcctggagccttggtacacaggtgctgctggcctggcatcctggtctactagagtgagcctgaaccttggatctgcaaggaccagtgtgaaggctgggtaggtggatgttggcctagaatttggatcacaaggggctggccaagtactgggtttggacccttgttctgcagtgatgtgaggccacaggggccgatctagagggcagggctgcagggaccaccctagcactagacaggcttagagcctagggctgtgggatccagcttggtgctggggtgggcctccaagcttggtttgtgggtattggcctgaagtttggggccatgggggcctgcctagcattgagttttactggggcgagctcaatgttagggtctaagtctggtgtacacttcccctccttcccccaggtgaacagtctctctctccatgctgggatctcagggactgagggaggtgtgacacaagtaatgtaaaactgtccttcttacccttttcaatgtgtcttttcttatctgtgtgccacattcaggtaatctctcgtctggtttcttagctcttatatttttgtgtgtagacagttgttcaaattgatggttctacaatgagatgagtgctgcaaagtgctagtctgccatcttgctgttatctagacctcaggcttttcttaaaacaactcaacactttggtctggcatcccaacctttccaatcatggccatcatccacagcatataaattcaaatactccaatgttaacatcttatgcacatgccactaatgattctgttccatcagctctgctaatatccaaccctaaaataccatgcataatcttctggctattggagaaaagtctttaaatttcaaatgtgataaagtctttaatcttaactagtcactcagtggaatgagattctcctactctgatacggtttctgatttcaggtagccagccagtcaagactctcaacttctgatccacttcttcacccattcccctcagtagcttcctaagttttcagtcttctcaaaacctctaaacaaaccttgtattccacaaaatattattaaaaaatgtttcataaaaagtttcgtggtcactaacctacagtaacatactaccttatatccactacaatgactactattgaagtacacacacacacacactctcacacaatatgtgatggcaaggatgtagagaaactggaccccttgtgcactagtggtagaaacgcaaataggtacagttgctctggaagagtatggcagtttctcaaaattttaaaaataaaattaccatatgatccaacaattccacttctgggaaaacaattcaaagcagggtctcaaaaagatatttgtacactcctgttcatagcaacattatctgtaatagctacaacatggaagcaacctgagcgctcatcaacaggtaaatggataagcaaaatgtggtatatacatacaataaaacattattcagcctgaaaaaggatgcaaattttgaaacatgctaaagatggatgaaacttgatgacactgcgaagtaaaataagccaatcataaaagggcaaaaactgtatgattgcacttatagggggtacttagagcagtcaaaattagacacaaagtagaataatggttgtcagaggctgtgaagataaggaaatgaggaattattgtttaatgggtacagagtttcagttctgcaaaacagagagttctgatcgtgactgtgcaacaatattaatatacttaataccattgagccaaatacttaaaaatggtgaaatggaaaattttacattatgtgtattttactacaattttttaaagcttaaaagacaagtcacatggttgggtcacataaatttgagaaatacattttatagtcgtttcttgcagattcacaatatataccggcatttaaataaggttccaatattttcagtaaaaaaatcttgatttttccaccctcacccacaattacaattaatatcacacatccatctttacttccttgttctaatttcattagatgggcatctttcctcttattcaaggtcaatcactatatctgcatttttctttttttatattacctgtatgagagatacacctgtatttttcattccaacccttaatacctcgaaaaactttgctttgataattactacctctattatctgaaacatctttagtcttcacaataaatcactaaagtcttacttacttcatgtcctaaatatttgtcttaaatccagaaaaatttattttgaattcctattataccactgtcattgtcaaggctctcactgactgaactaccttaccaccacacgtttctcttcaatcctttctctcttgcaaggttattaaaaatacacgtttgacaaacttactatctacctactgagcaaattctttgctgactccctaataccttctatcacatcttatcttcttcattttcctacctctcagctagtttatgatctaaaagtcctcaactgcctattgtcccctactccctatgctgcttctaactttggctcatacttctgcctggaataagccgctcatgcttctagctgcctgattcccagtcacatttcaagactgaacttagcatttcctggccactcttacttccctgccatctacactagattcctattgcatacctgggtactccagtactccttcatgttactattgtattttggataccattctacctcagtgactgaaattatttgcttctgcatctttcactcttgagtataatataaatttctgtagggtgaaaactaattattacgcatctctgtatctataacatagtacttgatgccttaaatatggtaggcgttgagactgttaaactcaactctttcctcaacctccctatttccctacaactgctaccagggaagcaaaaagactaagaatttaggcgtgtgcatttatctatctagtagtagaaacctagtaaactgttaccgaggtttagagttatctgataggaaaaaaagtaggtatgttcctatctcccatttactgctaaatgattcctttcttttaaccagaaattatttccaaataatgtgacgtaatttaaagcagtctagggcaactcaaaataagaaccacagtctcaaccaagttacacttacattcggctagcttcaatgtcgtcagactgaggttctcctgatctgtaaaatgcaattgagaaacagttagcaaaatattccatattccaaaaaaaaaggtagacatattacttaggaagacaattttgtaaacaagatttaagcactaaataaaacagttttaaaattaaagatgtcaacatgaaagaaagtggtcagatcaggtggccatacaacacatttattttaagggttggactattaaaaaactcaatgcatgttttttaaaggaaactgtaaacgctatacatagataccaacagacaagccattataagccataattattcacaaagtcaaatacgtgtaataaaacacacaactaaaaaacttcctatagccaagtattggttatccacattaacaaaggtactcactggtattcactcacagtattaaactttagattagtggctcagtaaactactccctaggcagacagactaaagcttaggccagccatgtagttttgtaaatgaagttttattgggatgcagccatactcattcatttaggtatcatctatggctgctttcacactaaaagaacagagctgaggacttgtggcagaaaccacatggcccataaagcctaaaatatttattttctggccctttaagaacaaatgtgccaaccgctaccgctactccagacaattcaaactaaaatctaataccttggtaagtttaaagacacttaaatcagatacaacattctaatgatgattatcttggttcaacaatgaaactgtttccctaaaaatacacttactgtatgtattacctgtcaaaagtgtatcacctgaggtgaagttttgcactggatagctgtgaattaacttcagttttaaacagttgccagttactttgttatttctaaatatactactgctctctcatgtagaaatatttaaaattctaagtcactaaaaagcctttcattttcatttcacgagatatgaatcagtatttccctatctattcacttttataaacagcatcagcaacaatgaatgagtcaatataatattgatttctaacacttagaaattcccaaactagataaaaaatgttttttgaggtcaaaagctaaattttcaaattggcattacaaagtcctgatttgtgaacttctcactgactttaggcttccaactttaagcaactctaacaagaatcttaaaatcagtcacacacacacacacacacacacacacgcacacacacaaacctgttttctaaatttcttagctaaaaacaaaaacaaaaacaaaaaacaacccctcacttctttatcagactctcaaaattaccctcactgcaattcattcagattccaaggacaagaatggaaaaggaaaaaaaaaaaaaaaaaagactccagcagctcaaatatttattttagatcttctttgcaatgtatttaaattttcaattttgcacaaaattacataacaactaaaaactggggcatgctggaggtggcagtgacttggctgtgacacaaatgcaaaaatttcactccaccctctcccccagggagcaagcaaatcacctatgtgacacacctggtctccaccagccttgtgggtaagtaccccaagattgcttccaaacttgtatctcccagacagaagagctaaaaattgatgataaccccatgtaccagctgactcatttttgaaagtgcgaccctccagcatcagatgtcatactgtaaggaggcagagctggcttgcaaaacaaaaaataaacctgctggcactgagggaagagaggcagattagaagttttcaaacacgtaggcagcaaaactttcaaaattaacagggaaagagaagagagggaaaaaatgaggacatgatgataggaaaataaaaatattactgcaaaaaggtaagacacaagaagaaaaacaaatctaagtcttagaagtacaatatgtaactgttacaaagttttgagatcctgaaatgggatagagtttaaatacattatcaaatgataactacatctatcttcccaatttctgttccctaagcaagagaatatgtgaactttggcatcaaaatgtttgccaccaaactgtaacatattaattactactttttacatatattaaagtaggctattaaaaaccattgataagacaagctaagtaatttaaaccaatccagtatagaagaagaaggattgaaagattattaccttaaaataaatctgtcctgggtctattaaacatagcaaagttgttctactcaaattggaaattgttttttaatcaagagaaaaatgaatatatgcagaactagcagacatttttcttgcagtaatttataatagtttctgtctgaatgaatttctactcatcctaataacagtatatttctagaatattataaataagttaccaaagtcccgaggttagaattcaaactctcaaaactatgacatatgccaggtgtggtagttcatgtctgtaatctcagcactttgggaggtcaagacataaggaccacttgagctcaggagttcaaggtcaacctgggcaacatgatgaaacctcgtctcttagccgggtgtggtggtgggtgcctttagtcccagcaacttgggaggctgaggtgggagggtcacttgagcccagaaggtcaaagttgcagtgaactgtgatcgtgccactgcactccagcctgggcgatggagtgagaccttgtcttggaaacaaacataaactatgaaatatataccacctagcaacagttcccaagcttgactttggctcctaaagagtctacttattcttttactgccaagttgctggaagtaagaatcctgtatgtgcttgtaaatgcagaacatataacctaattcaaaacatataaccaaagggaaatttttgtattaaactattgacttaggttatcctaaagtgtgtcagaataacaagtcagaaattttaaaactgaaacaataaccaaataacattggataataaaatgtaaatctcagaatgagaatcaattttaggtcttgatttgaatcgcagaaaatatgatcacaaaacacccactaatctgaatactgcagcatgagctagcaaattcaaatggtggctcacttccaataacactggtgcagcttctccatcctgcaagccactccttttacctccactgtaactctctaggagagaaaagtatactagttttattaatgttataaaaacttctagagaaatgtttagttaaaacgttcaccacataaaaggcatactttaaaatgcatattaagaaatttttaatgttttctataatgtttatagtaaaatgtttaaaaccttgaagtttttttgagaaatactttcctgtttatacatacagataggtctttgatagtggctactgatatttttaatgagaaaaaaagacactaaaatattttaaggagattaaatgaagtaggtcaactctcaggcccactattcttagcagtattcctgccaactatacattgtcttcatttttacagtatgtatttcactttacaatgacagccttttaaaggctgtaaaataattcaaaattaccttttacaagctgtggccattcggtgacatcagggtgatcacagctttgagtcactgattaaaaacaggttgtcacaccagtctagctgctaccttgatctgagcgtaggcttaataactctaataaattaaacaaacctttggttagaacactttaatatataaacccaattcattgttcaaaaaataatattcaaagcttcaaattaggtgtcaatgtaaaattcatcagaagagtaattattatagaaaagtttttaaggactattttccagcattttgtttttcttaaatgatctcttcatttgagaaaatgtaataattccttgtacttttatgtaatgttatagtttctgaagcattttggtcaatagtaccttgagtcttataacaactttggctttacctaatcaagacagataatatactaagaattaaaaaaaaaaaaaattaagcagcctccgagtgattaactgacttgcccaagattttggaactagtgttgaaggactgactaaaacccagatatactgacttcctatcaagggatggatttttttgtttgttttggcttagttttgctatactgggtttcaagatttaagtatatgtaaatgagtaaagattcagaacacagattgagatctttcaaatacggacaaattcagtcaaaagattcctaagctgatagagcaatcagtcaccaaggagggcaactgcttaatggaatagttatatacatacacataaacacacacacataaacacaaagtctagtcccactaattctgtatgtacgtaaagtcatttaacatcagtcaccgcatgttctcactcacaggtgggaactgaacaatgagaacacatggacacaggaaggggaacatcacactctggggactgttgtggggtggggggaaggggagggatagcattaggaaatatacctaatgctaaatgacgagttaatgggtgcagcacaccagcatggcacatgtatacatatgtaactaacctgcacattgtgcacatgtaccctaaaacttaaagtataataataataaaaaacatcagtcaaaaccccttaagtactgcataaaaatatattctactctttcttggccataaatctactaagatttaatttcatgaaaaagtatggcaaaagatgaaagcatatcctcctccctcaaccaaatatctttttaaccccttacatggccttagctgaacttttctgattgtcacagttcaaatttagcaggcctctttactgacactgtagttctggcaaagataccatacatctgaaatatcccagtatcaaaagatcattttgtgcaactagttctttcccctcacgattcccctatccaggccaaatctgaggcatcaactacggaaagatgaggaaattaggaggaagaaacctttcataattaacatcctcaaagcaacaatagtcaagcgtaaaaggtggttaccagtgtggattcagaacccaatataaaacagcaaggtatctgcgaataccaacggttaaaacatgaatgtttgagcccatacctatgcagctatgaacgcagggcttcaaaatccagattaggtgaggattggcctgaatatataaaaataattgcaggggattccaataaatgggatttatagtatctgtaagaaataacgcaatctcccagatactcctatcctaactatacattgcctaataagaacttagacattgctgaggtcatatgggaaacaccaccttccctaaaataaacaatgtggtcatgatacagcttccccttgggttctcaagagactaatggtatgtggaattagaagattcaaacaagtctaactttccatcttgtaaacacaaaaataataaagttaaaatatcttttaattgactaattgacctcaatgtaattaaagagctatatgtattttgaaaactagagtcaagtcctctcttccagtcccctcttttatgagatccggtgctcaaaaggctccaaggccaggctggacttatgtctctgtttggtcattcactagctgagaaatcttgggcaagttacttaacctctccgagtctcagtttccttataggtagaactaggataatagtacctattccatagagctgtcatggataaacaagctaacatctaagtatctcagaacagtgcctgacataatgtgctcacaaatggctgggcgtggtggctaacgcctgtaatcccagcactttgggaggccaaggcgggtggatcacttgaggccaggagttcgagactagcctggccaacacggtgaaaccccgtctctactaaaaatacaaaacttagccaggtgtggtggcacacgcctgtaatcccagctacctgggaggccaaggcatgagaatcacttgaacctgggagatggacgttgcagtgagtcaagaaggtgccactgcactccagcctgggcaacagagcaagactctgtctcaaaaacaacagcagcagcagcagcagcaacaacaacaacaaatgaaagctattattaatactcatagcccaaaatccaaacctgccctctcaatctttttatgcatattattttacctctcatagcacactaatctcttgtaaattttttcagcaccctacctgggtccctcatacagtcttggaagtgtagttagtgagcacctgacacaatgctttaaaaatggcaggggcccaaatttgctgaacacatctgtcattattatgacattaagatacacatgcaatacgaattccaaaaaataaaacaaaaacataccatatttcgccaaacttctgaggagctggtgaattctaaaatcaggctcttacagatttttaacctaaaatataaaacacctcactcaattctttttacataaacaactggatgaactttcaaaaaaaaaggtactaaatttcatcataaaggcaaatttattttctataattatgaacatccaaaaacgtatcaagaaacaaattactgctgttgccgggatgaggaaagcataggtaggcaggccctgtggcctgagtgctttcagcaggcaaagccatatttcccatattcatccataaagcttagtgccttctatttatttactctatcctccctccaaaagggctaaacacatatgaaaactatttgactatatccctctaatcctttcaaatacctatagcaattttgtttttaattaaattctatatgctaagcatcggctatgttaggtacaaatctgggcatctaccactttctagagtagcagccttgggccgaccctctgacccttgagtctccaatgtcaggttattgtagcagagaaaatgcgttaaaaagttatagtataatgcctacctggcacaaaacaggacttcaatatacgacgataattataatttattaaatcaaccacttaatatatatcaaaacttaactcttaaaaaaaaatcctgaagcttaaagcaagcccctaaattatcactgtaaattcttaacttgtttgtatacaatcagaacattcctcaatggaacaaaaataaagtcctttcatgtactgcattacatataaagaaagcaaatctcaaaggttaagaaacctatccagtgtcctagaggttgatggtagaaagtgaatacactgcatataaaacattttgaaataaaattaaccaacttttaaggttttagagactgactttcaaacttcagtctataatagaattacctggggaaatctaaaaatgcaactacttgggctctactcgcaaagattttcattcagtgcatgaagtaggggtaaatgaattttttttttaatttttttcagaccaacccaagaacgcagaaatgaatttgcattttaacatatacttcacatgacacacagatctcattttaagaagccctgccttccaaattatgagttaggaacacataatcatggaggaaatataccaaatctataaaaatacagaataacaaaaactgtaagcactacaaatattaggcacactcacttgccaatttaaccataagaatcctaataccagacatagttctcttactttatctcttcaacagagggctcagtctaataatcttataaataagtatagtctaataataaatgcctatgttgatctatatctacctccctaaaattttcattttattcatttctatttttccttcacctccttctaaagctgtttcaaaacttaatttcacaaactgtttttttctatcactttttattataacacccaacacttctgttctcctttgcatcatgtttatggtgtcttatatttatggataatgctacttattaaaactgtctaagttttgtccgtttacacatttcacaattaaaggactactacaacaattttcctaagtcctcctgctttagtttctccttattccagtccattctgcagttaagacttaaaaagttttaaatactgctttcaaataatacttgcaacataattccctcaactccattagctcctcagagtaccatttctttatcttctttccttttactgccaaaaagacgtgaaaaccactagctcagctgctatttttctatctactgaaatttttcttgtaaagtttccatcatttctgtatattcccagtgctttggccccttaatcctacttaatttttgtagcttttaagactgctaatgactcctcacctcctctggcttccctaatgttgtatccactcattttcttccatctctctaaaggcaataaggtcttctgctagttcatcttcctacctcatacatggcctctctccaagtttctgtcaatagccacttttcttaacctaaaccaattttctgcgcaatgtcatccattcccatagcacctctatgcttacaaacccctaactctgtatctttaagtccttatgtctggcatggtatgcctgcaactacatattaccaacggtacacatccatttggatgtctcattaacatctacattcaacgtatctaatatcaaactcaattattttcccaaagaactcactctgcctaatctcactgtcctggttaaggactaaaaaaattggtgccattcattactttctccccctcatttttatttgccctaaccactgtgtaggttgatacttgttcagccttcaaattcttcataatcattaattcaaaaactgtctactagattttgagtgcctactaggtggatgaagatgcagaggtagaaaaactagacataatttcttgccctcatgtggtgaaggaaatgggcacaaataaaaaccacaattaattatgcaataacaatgcacagttaagtgttgtgatggagagatacagggggtgttaagttgtgtactgtaataaaaagtccttagtctgaagaaaaggaaaaccattctttatgagggacaagcaagatttacaagacacactaagaaaaaccctgtgaggtaatgatggtagcactatcagtccagctgctcaaattggaagattctcagtcatattctaaagagtctctctctttcccagtatatcaaattgtttaccaattgctaccaattcatccttagaaattcccctacatttctacattctcacattattccccagtcttttttgattgcttttagttgcttccagaataaagccaaagctcccaatcacgtcagatgagattctacacaatttggtcaaaacctgccagtgcagcctcttcttacagactagaccagacttcaagagaacatgtgtatcatttgcttttatacttccagtgcttgcaaatgtttatagaataagcatcttacaaaagagaaaatttttctcttagggaactagctttcagtcctttagtaaatgcaaggttaagattcaaaccctaatttgtctgattctaaagaccacgcttattcccttgtacttgccttctaatttatactcaaaccctatgaatttccttaaaaatatctcttactccttttttcctcaaacttaccaacactgtcctactacagtgccccattatttcatctggtttcccttttgcctttatcctcaactttgccactagaattatcttcctaaaaactcaaagttacacatatcattctatattcaaaagctttaacactttctcatgccaacagaataaatttctaactccttcacattttatttgaggcccctgccatgtggccctgaccccagccatcccagcactactgcccactatatgacatcatcaccagttaccagatctagtcccatcatttgactattggctataatgtactggatatttgtgtttctgacttcaatgcttttgcttctgaggagacttcactcggaaatggtcctctatccattactaacctctatcccccacccacctatcatgccatgttaaaaactggcctcattctaaacactgtatctcacagggttatctaaactcttatacataatcaccatctccttcatgtcttattatacattcttaataccataaaataatttattaatttctccttatatttattatgttataccttacattacagctatctgtatacatttgtcagtgcctctagttgtaagctgattgatggtagggatcatctcttccatattttacttttcgtaataatggtgactatgttttcttgacaccatacctcccctctacaagaaaaaaaaaaaaaaaaaaaaggaatcaggacccatggcctttgagctagttccaaatgtgactcatagatgaacaaagataccatttcttcccaaattaacacaaatataagtaaatgccaatttaagaaacgttttttcaaagactaaatatgtaagaataaccaaaacaattgtttctaataatgttcctttctctaccagatattaaaacatattaacttaaatggaataattaaaatcggcatgcctttaaaaaactgagtatacactaaatatatgcataccttatgacttaaaaatttcactcttaagtataccaaacagaagtaaacatattcacaagaagacaatcactgaaatgtttagagcagcagcaatattcttaacagttccaaaccaaaaatgattaaatgtccgtaacagcagattaaactatggcatattcttaaaatggaatatcacttccattcttaaaatggaatatacagcgactatcataaacaattactacaaccaacaatgtgaataaatctcacaaatacattaaaagaagtcagacacaactaaatgtgcttgattctagttaaaggatgaaaacaggcaaatctaatctatgctatgagaagtcaggacagtggttacacatggaagaaaaggggtagtgacacagagcacaaggggctacgcaggagctgctgctgttttttgatctgaatgctagctaaacgggtgctcagtgtgtgaaagtgcaacaagctatacacttagaagtgtatagcttaaaacattctaaaaaaaaaaaaaaaaacctcatatggtattagcattagacaaagaggtaagcacaacaagcacaacagaaagctaatttcagagaaagatccgaaagtatctgacagttgctccttctcaaacgagaattttcagaccttggataacaggcagcagaggactataatgcatgaaaggacaaaaacaaaggaggtgagccatccactgcttggatgtctgcctggaggtaatttccaacctgcagtcaatggaggggaaatccagtgagaagacagcagttttactgagttcagaatcaagagatcagagctgagaaagctgaagtgggtaaaattgatgacaagtgccagacaagtgcttgtctgagaaggcagagaaatggcttcagaaatctgccatttgagagtccactgctgagtactaactgtacacgattaaggtaagtgactccatgaagctagtgaaagaggggcagtaagctgaaatattcccagtacttataaaggactgggagactcctaaaattctctctaacctgagtgaagagaacacggtgacactgggagcatttagtaaagactcagaaggatcatgccttaggtaggagctactaccattaaagcaaagccttctctagacaaactccaatgtagccctgaagggataaaactgaccagcaagttatttaggtggctacaaaacaaaacactctaaaagaaaacaaaatctagacacccaacaacaaaatattacaatgtccagcatccaatcttaaaaaatcattaaatatgtaaaaaacaaaaaataaaataaaataaatactaggaaaatacaacccatgaccaagagaaaaaaccaaccaacaaattcagagtgaaaaaattcaagaaatcaataagtaacctgattttcaaacagctattacaaatatgctcaagaattcaaaaaaatacatgaataaaatgaatcaaatggaatttcttgaaatataaagcgaaatatctgaaattatttaacaagggaggagaaaaaacagtaaaatagaagacaaagcaaactgaagcacagggaaataaaaagactgaaaaataatgaatatgatgttaatgacctgtggataataccaaacagtctaacatatgtgtaactggagtcccagaaaaagaggaaatgatgaaagaggagtaaaggtggtaaaaaatatatatatagaagaaacaatggcaacaatcttccaaatttaaggaaaaccataaatgtacagattcaaaaagaaaaaaaaaacaaaaccccaacaactctcagcatggtaatcattgtgcaaatatcatagaacgtacttacacaaatctagattagatggtatagcttactacagaactaggatacatggtatagcccgggtgctcctaggttataaagctgtacagcatgttactatactgaatgaatactgtaagcaactgtaacaaagtgtaagtatttatacatctaaacctagaaaaggtacagtgaaaatatggtggtataatcttaaatgactattgtcaactatgatctcgttgactgaaatgtcagcatgcggcacatgactgtataaccagacttctcatcaaaaacaaatgctgaaagaaaaacacatcaactaaccaagaaaaaagaaacatatatgtccacacagagacttctttttttacacaaatgttcattgtacctttttataatagctgggaactgaaaacagcctggaactgaaaacagcccaggtgtcccttaacagatgaagtcacaaaccaccgaaacattcaacaatatggatgaatctcaaaaacattatgttgagcaaaaagaaactttttacaacatataagtattgtatgactctacttacataaagttctgcgcaagctaaactaagatgaaaacaatctgaacaatgttaggttctaggggtggtgtggggggaaggaataactaggaagaggtgtaggttctataccctgatagaactttctggcaaaggtgtatacatttgtcacagctcatgaaatggtatatgtggtcaactgtattttccaaagatggtcacaatagaagccattccacatgctcttaacaatgtaacactgtcattttttcatcaggtggtggagtctatggcccttctccttgaatctgagtgaaattagtgagtctttcaatccaaagactacagtcatacctcaactatctacagaggactggttccaggactcccatggatcccaaaatccaaggatgcttcgaatcccttatataaaatggcatggtatttgcatataacctacatgcatcttcaaatatgttaaaccatctctagattacttataataccaaatacaatgtaatgctatgtaaacagttgttacaatgtattgtcaaagacaagctctccttgccaatccctgaccaaatgagagattcatgagcaaaataaatagttgctgatatttaaggcactaagtttggggcaatgtattacacagcaataaataactggaacagcatagtaaattctagttaaaaatactaaactactaagttttagttaacatacatgctcaagttaagggtgtggtatactaacaactgcaacttactttgaaaagcataaaaaaagacactagaagaagacaggatggatagatggacaagatagaagacaataacaaatagaacaaaatgttgtgaaattatattctacaattattttaaagtctgtgtggtttgaaaaattgtacgataaaatgaagagtgaaataaagacatttccatacaaacaaaagctgaaagattttgtagccagtagacctatactttagaaatgtttaagaaattttttcaagtaaaaggaaaataacaccagcaacaaacttggatctacaaaaaggaatctccacaaagaaaaataaataaaaatggtaaatatgaaggtaaatataaaggaatgttattcttagtttttaagtttcttcgtaagacaactggcctttgaaagaaatagtttcaaacgctgctgtggaatctataacacatatagaagtaaaatgttaagatcataataccaaaaagaatgagggagagtaaatggatgtatactattccaaaattcttacattatacattaagaggaataatatttttgaaggtagattgaggtaagttaaaggtgcatattgtaaatcctagaagtatcactggggggaaaaaaaacagagggacaagctaataatggagacaatacaaaattccaaaaatgctccattaaccgaaaagaaggcagaaaaggaagaaaagattagacaaatagaaaacaaatagtgtcttaaacacaattatattgccaactgcaataaatgtaaatggacttaatcaaaaagcaacgatcgtaaaaagtcaatctgaaagcaagatgcaactatatgctatctaaaagaaagacattaaatgaccaataagctgaaaataaaaacacagcaaaatgatataatgtgcaaaaattaatcataagaaaggaatggatacactaatatcaaagtagactttagataaggaacattaccagcgataaacagagacatttcataatgataaagacatcaattaatcaaggagatctaacagtcctaaatgtgaacacacctaaggacacaactttaaagactttgcttcaaagcatatgaagaaaaaatgaacagagcagaaggaagataaactcaaaattatagttgaagatttcaacattcctctctcggtaattagtaagtggacagaaaatcagtaaggatacagaagaaatacatttatctatctgacaaagaacatatgttctgaaaagaatgtgaaaatatttgaacagacacacaaaagaaaacttctcaacagcagtcatgaagaaaatgtaaattaagaccataatgactttttacacccattagaatggcaattattttaaataaaaaacagaaattaccaagtgttagaaaagatgcagagaaattggaacccttattcactgctggtgggaatgtaaaatggtgcagtcactgtggaaaacagtatggcagtctctaaaaaaattaaacatacaattaccacatgacccagcaattccactcctaagtacataaccaaaagaattaaaagaagggactcaaacagatacttatataccaatgttcatagcagcatcattcacatagttaaaagttacaaagagtccaaatgtccactgacaaataaataaataaaacaaaaagtgatatatgcacacaatgaaatattactcaaccttaaagaatcaaatttggatacatgctacaacatgaatgaactttgatgactgatacggtttgaatatttgtcctgcccaaatctcatgttaaaatataatccccaatgttgggggtggggcctggtgggaggtaactgggtcatgggagcaatccctcatagcttggtgctctccttgggatacagagtgagttcgcagatgtggtcgtttaaaaagggtgtgccacttccccaccctctctcttgctcctgctctcgccatatgacacgcctgctccccctttgccttccaccatgagtaaactcaccatgagggctccccagaagctgagcagatggtggcgccatgcttgtacagcctgcagcaccaggggccaaataaacttcttttctttttaaattacccagtctcagatattcatttaaggcaacgcaagaatggcctaacgcaaggacattattattattaaatgaaatgtgccagacacaaaaggacaaaaatcgtatgattccacttatatgaagtacctggaagagtcaaattcacatatgaagtagaacagtgattaccagcagatagggagagtaggcaatgaagagttactgtttaatggatagggtttcagactgagaagatgaaaaagtttcagagatggatagtggtgatggctgcagaataatgtgaatgtactttatgtcactgaactgtacacttaaaaatagttaaaatggtatatttgatgttgtgtattttagtaccacttaaaaaaaaacactgcaatgggataccactacacacctctcagaacgtgtgcaattaaagactgagaacatcaaatgctgacatttggagaactggaactctcatacactgatgatgggaatgtaaagtagtataatcatctggaaaatagtttggcagttccttatacatttaaacataaacttaccatgtgacccagtaattccaatttaaggtatttaccctagaaaaatgaaaacatatgttcacacaaaaacatgcacacaaaacagtacctttattcgcaacagcctaaaactgaaaacaatttaaatgttcaccagaaaatgaatgaactgtggtatagtcatattgtatttaaaaaaacgaaacaaacaaaaatctgtgacaaacacaaattggatgaatctcaaaaacatgccaagtgaaagaaaccaggcatggaagagtacatgttacttgattccatggatatgcaattctagagtaggaaaactaataaacagatcagtggttgcctggggccaagagggagaaatgactacagacaggaaggaactttttggaggtaattcaattgttctaaagcttgattgtagtagcagtgatagtgtatatatttatcaaaatcaataaaactatatagttaaaatgggtgcatttcattgtgtatcaattatacatcaataaacttgatttttttcaaagtttgtgagaacttaatatagaaaaaggtggcattatcagtggggaaaggatgccttacaagacaatcagctacccaagtggaagaaaataaaaggtagatataattcccaaaccatgacaaatgcaatccagatctaaaccatatcataccatatccaaaaatatgctgaatgctcatatctaactttctaaattaaagtctataaagtaaaatcacaaaagtatcagaagaaaatacaagagattggccaggtatagtagctcatgcctgtaatcccagcactttgggaggctgaggtgggaggatagcttgaggccagaagtttgagaccagtctgggcaacacactgagatacgttctctaccaaaaaaaaaaaaaaaaaccaaccaaccaaaaaaaaaccaactagctatagtggcacatgtctataatcttagctacttgggaagctgaggcaggaggatcacttgagcccaggagtttgaggttgcagggagctatggttgctccagcccgggtgacagagtgagatcctatctctaaaaagtttttgtaatatatatatgagatcatatttatatcaactttgttagcatgctgaaacccagaaaccataaaagatggacagatttgcctacataaaaactttaaaatttcacatgactagatactataaaattaaaggtaggtagagataatatttgcaaattataataaagaattaaatgatatataaagaatgcttacaaatttaaaaaacaaacaccacaatagaaatggaccaaaaaaccaggcaatttcccaggttatttataaagacttaaacagattttatatatacatgaatcaaaacaaggtaaatgagcagtccctaatatattttaaggaatgaaacttgctaaaattattttttaaaaggtaattggcaaaacctatcaaatatttagattgacatgatctaatggcctgacatcttatttgtaggaatctaccttacagaaaaaataacaggtaccatcattgcaaaagcaaatattgaaaacaaccgaatttccaaaacaggcaaagggtctcataacatcatgaactctcagagttaattcctagttcagttctaaagattgagagaacacatcagatttagagtattccatctcaggtttctcaaggacaatttttcattaaggcctaatttattatattttaaaacatgcttttccatccttttttctgtttttcctcttttccccccacaagcttatatggtaaaattacctgtagttaagtgggcatgtgatatgatgcacagatttaatgcaataatttataagaattatccaactccattctctcagctgctctggtcaaaaaactttggcatcatgttttactcctccctttatttcccactttcatctggtctactaccaaatcctatggactctatttcaacatatatcaagaattcaaccacttctcaccaccctcactgtgaccactctgtccatttcagtcacgtcttaatctgtactaatggtctaccaattggtctgtttctgcccttgtcccctttttcagtctatgattaacacagcaaccagagtgaccttgctaaacataagtcatactttttcactactctgctcaaagacttccaatagcttcccatctcacttataggtaaaaatcaaacaccttattatgatcaaaatatctgtaccctccattctctctatttcccatcaattacttttctaaagctacactggccacacctcgagttcttcaaacacatcaggcactctcactttggggtttccctattcactacactctgcctgaaatgctcttcccccaaatatccacatggctagctctctcatctccctcagttcttcacccaagttaccatttcagtgaagttttctctacctaccctatctaaaatttcccatcatccttttcacctgcaaacacttcccttatttgtttcttctccttagcactatgtaacatatattttacctatctttatgatctctttttaggatttaagtgccatgaaagcaaaggactgagtgggttttatacactgctgtctctaccaggacctagaaaaaaaggcccactacacagtaggtgttcaagaaatgtttactaagtgaatcagatggatgtgtatgtagccaaccatttgaaagattcctataacacagttaagaggaaaaaaaaattatatgaaacacaagttttagtacacaaaaatctatgcacaaggaattaaaaacctgaaatgaaattttaaaaaattcaatttgcaataccatcaaaacataaaattcttagaaataaatttttaaagtaataagtacaagacctgtatactgaaaactacaaaacatgaaagaaattaaagaacaccttaataaatggaaagatatcccatgctcatgaatgagaagacagtattaaggtagcaatacttcccaaatagacctacagattcaacacaaatccaagtcctattaaaatcccagttgcatttttttgcaagctaaccctaaaattctatggaaatttgagaaacccagagacccaaaacaattttgaaaaagaataagttagaatactcacatttcctggtttcaagacttactacaaagctacagtaatcaagagtgtgtgttacccaaaaaaaacagacatacatgtcaatgaacataccttgaaaataccatggtaagtaaaagaacccacacacaaaaggacacatactgtatgattcccatttatatgaaatatccagaataaataaattcatagagacaaagcagattagtggtttccagaggccaggaaagaatggggaatggctgctaacaggttaggatttattttggggatgatgaaaatgttctaaaattcaatagtggtgatggctgcagaactgtgaatatactaaaaactttaaaagggtgaattttatagtatgtgaattatctcaataaagctattaacagttttgaaagttagagaatatgtttggtaggattttttttaaatactgcctccccaaaaggaaaaaagctgtatgtatatcagtacttttacagctatcttacattttatatttgattggtaatttccttccaggcatttttttccctctacagttaaacacacttaacaactgttaagttttagaattggctatgaagcgaagagaaacctttcatttcttcttatacttaaaaaaaaatagctttttatttttcttttctgtatttcctcatcctcaaaaatagattctacacaccaatatttgagggatggtggggcaactaccacaaaatacaagaggctctcttctggaaatgtaaaaatgttagaattcctaggaacttttcatgatttatgagcctaacctaacatttaaaactgagcccatgctggtaaatctgggctacacagtcatacatacatagaactctggaatcacaacacatccactgtgcactggaagagtactgtaatctccttctaatgtgcaccttggctctcccctcccttgggttctttgaaattttttttttaaataaggtatgtttatttcttatttacctactaactacagaaggtagactcacaatgtgccaatattaaaatgttatcattcctcattaaaatatttacttaagtgttttattacatgacttaccagcaatggaagaatctcatctgagagtagttctcaactgtcatctatgaaaatctttagaaataccaaatcatcagaattactttaatttcctggcttttaatcataaagcattcctactggtcaacaattctacaatctgaaaacagggacatctgtaccatatagtcccaatgatttattattctgaaattttcctctgggttatttttacactgtaattagagttcaaacttccatagcgcctagcctaaaattaaacccagaattatgccaatttatgcctgctatatatgcacacacaaaagacttataatgcaatatactaaaagaactaaaggtaggtgggtttttccttgaaggaatcatagctacattattttcaagtttaatctgttacattcacctgcctatcaaataaatgtagcacttaaacgcataaaacaaaatttgatttagtgacaaaaaaccattagcttctaatttaacttcaaaacgcttttcaaaaaatctaccccatctaattctaagtgaaccagaccacacttgatagaaaactgttgttctaaaaaccatacgtacttaacacaaacagtaaacatatgagaacatttagtcttctattaatgtcttacaaaatatttcaatgtggctggttataatttttttttttttaagggacagggtctgtcaccgcggctggagtgcagtggtgtgataacaactcactgcagcctggaactccagggttcaagcaatccccccacctcagcctcccaagctgggctaattttatttttcatagggataaggtctcactttgttgcccaggctggtctccaattcgtggcctcaagtgactctctcacctctgccttatatttccgtttgagctgttattatcaactggagtaacatttctagttggggaaaaaagaactgatccttatctgtagatgaacacttatacattcagcacttacaaataactgaatgtgggcatgaaaaaaagaatgacagatgataaacatttactgttctcaaaataaattacctaatctcagttgagataaacacgactcagaattcaattaacagtataatataaagaagccccaaaccaatgagtgcaaaaagaaagactctcaaggaaggcttccctgagtaatatttaggttgagccctataagatagaaggaagatggataactcaagaaactaaaagcagcctgtgtggtaagatggtactgaccaaaggggaatgcacaggaaggtaaggctcagaaagtagacagaaccctatcaaagcaaaattttaaatagaaagcactcttctatttcaaaataactgttatttgttcacaataatacaaaggaattataaactactaaaactaacaaaccaaagtgggcaacataggaagaccccatctctacaaaaaaaaaaaaaaaaaaaaaaaaaaaaacccacaaaacttagcagggcctggaggtgcctgcctgcagtcccagctacttgggaggctgaggcaagactatcgcttgaggccagggggttcaaggatgcagggagctatgatcatggcactgcactccagcctggggaagagagggagaccctgtctcctggaaaaaaaaaaaaaaaaaaaaaggtgggtggggtggggagaattcaataattaggacgaatagactttaaaatgtagtttatacacacagtggaatactactcagctataaaaataagaataaaaccctgtaatttgcaggaacacggatggaacaagaagccattatgttaagtgaaataagccaaacacagaaagacaaataccacatgttctcactcatacatgggctaaaaaagtatatctcaagaagataagcatagactggtggttactagcagccgaagtggggagtgagaggacaaaggcagaagaacataactgtatttattattgctgaactgtacacttaaaaaactgtacacttaaaaaatcattaaaaatgaactgtacacttaaaaaagatggtaaattatgtatgtatatttaacctcaatacaaaattttaaaaattcaatacttaatgctggaacaactagcttttcatatttaaaataaaaaatcctaactcctttcagatgaacctaaatgcaaataacaaagagtaacaaaaaatcctcaactattagcagacaatataaaaagaggatttcttaaacaaaaagcacaatcataaagaaaaagacatgatttttacatcaaaaattaaggctcatactaccagagaatactacaatgggcaggattttatattttactcttattctggtaactttctttggctgcactgtaaagtaagaaggttggatgaaatgatcttcatggtccttttcaacataaatgttgtacgatagtgtgcctttcctttaaaaacatttatttttgagatatttaaaacatacagaaaataataaatttcctatccttttacctacgattcagaataatcaagcaactgtaaattaaaatgagatagcatttcacatgcctcaaattagtaactattttaaaatctgacaatcccaagtatgggtgaggatgctagaaatgcccacataatgctgataaagtatacatgggcatatccatttaggaaaagaatttaccaatatctagtaaccagcaatttcacttctacggtttttcccaaaacacctgcacatacactcatgtaaaaataaacactgcagcattatttataatagcaaaaagaaaacaactcaaaatatccatcaatagtgggacacatacattttatctatgcataaaatgaagtgccatacagcagtgaaactgaataaactacatgtacacgcatcaacatatacacctcaaaaacttgatactgagtttaaaaaaatcaagctattgaaagacagcgttatacatgtctgtaaaaatttaatacaaaaaccaacaccacatatcacttacagatacatgtacacatgtatagtaaaagtataaaacaaggatgtgaaatttacttaagaatctcaagacagttgttactttgtgtagagacgggtaacaggacttgaacagttggggttgttaaaagtgattatataactgcatcctttcccccaagggataaaaatggacataatttatatttccaggtggtggataaataggcacttgctatgtcattttctggatgttttaaaaattttacaattaaaacatatacacttattttaaaaacaaacaaaagacatattagcatataatgtccaagctgataattaccttggaagattatctaatataaacctccctacttcactaaaaacaaaattacaaaagatatcagaataaaaatatgatacaggctggacgcagtggctcatgtctataatcccagcactttgggacgccaaggcaggaggatcacttgagcccaggagtcaagaccaggctgggtaatatagtgaaacttcatctctacaaaaacaaacaaacaaacatttttttaagaatgtaataggattggtgtggtggctcatgcctgtaatcccagtgctttcagaggttgaggcaggcagatcacctgaggttaggagtttgaaaccagcatggccaacatggtgaaaccctgtatctactaaaaatacaaaaattagccgggcgtggtagtgcacacctgtagtctctgctactcaggaggctgaggcaggagaatcacttgaacccaggaggcggaggctgcagtgagctaagactgcaccattgcacaccagcctgggcaacagggcgagactacatctcaggaggaaaaacaaaaaaaaacctatatatatatatatatatatatttatatgtattatatatatataatacatatatataagattatatatatattatatatataatacatatatataagattatatatatattatatatataatacatatatataagattatatatatattatatatataatacatatatataagattatatatatattatatatataatacatatatataagattatatatatattatatatataatacatatataagattatatatataatatatataatacatatatataagattatatatatattatatatataatacatatatataagataaatactattgtagcagggcaattttggacaaatactaggttatctgaaacagcactttggggaattagatcttgaccatttaagagagagattagccccagtttctcaaaatctggcactgactagcaatatggacaatgtgtgcaccgccctcgttccacctcccctcctaggaatgccatgtcaaattcagcacaggcataggcagtaaaactgacccctagttctgcctatcactatttaaaattactttaagtgttgaggactgtccccacagcagatatctaaaagtaggcctgaaagaactagaaagtagttcatgcatccagcagttacaagtgcctaaaactgtacatgaaaaaacaaaacaaagaaatgaactgagagcaaacatttactgttttcttataatcttcaatccaggatttaagaaattatttaatatcagttgagatacgtgaccaacccattctccagctgagatccatctatttttaaattcactcccccagcctttcattcagcctaaaagagggaataagaatgggaaggtgggaaggacttatcccatactgagttaaataagaccacaagatcttttcatttttacaatatttgaaatacagtacactgagcaataaatttaaagaaatatgcatgatttgaaatgcagaaatcttgatttatgtgtataaaagaccaaaattagctcagttcgtctaatacactacacttaagtgttcttcaatactacagtcaacttttcagaaatattcccattctgtgaagcaggatgtattcctaccttgattaccaaactttatccacgtaacttcctattctcccactctgttctttaaacatgttcaacatgttacagagatggcaaaatgtgttacaaaagggaatgagaatgaagcagcttaagtaattaggaaaactttacacttcttagaaactgaatttgaatgatcttaaacagcatattttcttttcttttcttttcttttttgagatgaaatcttgcttgcccaggctggagtgcaatggtgtgatctcagctcactgcaacctctgcctcccaggttcaagcgattctcgtgcctcagcctcccaagtaactgggattacagacgtgtgccaccacgcctagctaatttttgtatttttagtagagacagggtttcaccatgttggccaggctggtctcgaactcctgacctcaggtgatccgtgtgcctcggcctcccaaagtgctgggattacaggagtgagccaaggcgcccagcctaaacagcatattttcaatcaccaacacacaacatgaccactgacttcagaaaactaggaaagaaaaatgttacccaattaatctttgtgtgaaacaggatttatccattagtatacgtatcacataccatagatgcacaaaagattttttcaattcccaaaacaaaaacttaaaatatttagcaaagataatataaaaatccttatttatggcacgctgtaagattatcaatattggtgcatataaccacagaggcacaatagaattcttaggaaaaatgtattaagacaattaacaagctggaaataacccatatttccccttatgacccattagctttatatagaaaacactgctgtgcacttcatcctttgctttctaaagaacagcattatggttcacatctgttaagagacaaaaaagtatttgttggaagtacgaaaggaagaaattcctgtactgttacatgcagtgccaaaggaatcatctgagaagaaaataaagaacatgagtttaacatgagctttagagagggattacaagagtgcaagaaagtgacaaaatgtgacatatgtccatagtgaatacatggtgctttattgttttcagtatttctatatttaattaggaggtggaaagtttcagaatttattctgcatcacaaagattataaaaatatatgagttggggtgttggctacagtacacaaaggcaattctaagactacttattaacagaagcttgaaatggaaaagccatcccttctgatttcattacatgaaaagaacctgtgtagaagtacagcaatggtagcatcttcattcagcccacagctatgtaatttgtatgcaagagtgcttgtcttaaatatgaaaaggaacatcctgaattgctgaaagtatatacaacgggcacacatccagaactaggaaagagctaccaagcctgcatgctacgaagacatgggtcaaaaaatttttctcatgtttggtttctataactaaagtctgtgctagactaacctcaattgatcctgaggagatgaacttctggaacacacaaaactgttaagagtcacagcattagactctacactgtccagccaacagttttaagaaaaattttatcctacttgtatgagtgttcagggctcatatactacctctatgctcttacttgaaacacagatgcagaccttaataaataaagtcttacatcagactctcttctataattcacatgtgattccttacacgagattcctgttcagatttcctgaaaatgaactataggaataatcttatccaatatgattctatgtcccctaaaaatatcttttcctttcaggtcaatcttatgattcacttgccattgatcagattaacacaacaggtctggtacagcaaattacaaaagagatttgacttttgattaatacactgaataatgtatcacaaactattaagatccattgtccatgtcaaatggagttcacatatttaaaatgaattcacacactaaaaattccccaaaacaacgtttctaaaaagtttttttttttttctttgagaggcagtctcactctgtcgccaggcagtagcatgatcttggctcactgcaacctccgcctcccgtgttcaagcgtttcccctgcctcagcctcctgagtagttgggactacaggcatgcgccaccacgtccggctaattttttttttgtattttagtagagatgaggtttcaccgtgttggccaggatggtctcgatctcctgatctcgtgatccgcccgcctcggcttcccaaagtgctgggatgacaggcgtgagccatggcacttggcctctaaaaagctcttaatctacattttcaagaatgatcacgtttgaaaagcatactcttttaaaacaaagcaactatcactttcatttgacaaaagaaggaacgaaggcttcaaaagctaaataacctgctcatgaccattacgaagctagttaaaacaacctcaagaccaaaagacagtgctcattccatttcaatgactctgatgcacttaaaattttataaataatttttagggatatcagtcataaggcttagaatcaaatagtaacgactcatgtacaaagaccagtattttttaaaaatgctcagctgggcatggtagctcacacctgtaatcctagcaccttgggaggccaagccgcttgagaccaggagtttgaaaccaacctgaacacggcaagaccccatctccacaaaaaaattaaaaaataaaaaaattagccaggcatggtggcatatgctaatcccacctactcaggagggtgagatgggaggatcactccagcctgagactgcaatgagttatgacagcaccactgcactccaacttgggcaacacagcgagaccctgtctctaaacaaataaacaataagtaaaataaacaaaaagaaaatgctaactttacttcactctcagataggcctaataattaataagcttctttttgaattattatccataatggcatttacctgttattgataactcagatcaaagcactactaagcaacatttttgatagcaaatgaaaacaaaagctggcaaagaaactgtgtattaataagtcatttgattaaaaaaaaggacttggccaggtattgtggctcatgcctgtaatcccaacacactgggaagctaaagtaaaagctgaggagttcaagaccagcctgggcaacacagtgagacccccatctctataaaacaaaaatttttaatattatctttttacaaaggacttatttatatggcatcttcaagtatttcaaacatttcgtgtttggattatggaatatgtctccagaagaattaacactatttctatttaaggtaattttacatcatttcctttattagaagaaataacagatctgcagatggcattttgtgaaggctgccttctattaatagtgtacaaaacactcatatgtctccaaaaaggtgggtgagtaatcacaaagcaagtataactattcatcccaaaaggtaggacagaacatgtgccaatgtgtgcagagtcctgaactagagacatggactctggttctggttctgacacctgggtgactttaagaaaatcattttaaagctttgcactccaatttcctcttgtataaaatgactggagcagctgacctcatagacaatcctactcaggtagcatctatccatgtactgccagaagacagaatgataatcatgccccccaaaattagagtatttgaagacaactgccggagtaaaaattttaaattctatatacatacacacacacacacacacacacacacacacacacacacacacacacacacaaatactaatacactacgtgccagatactggggtggtgggctgggaccaaggaatgaagtaatgcatgtgccagagggttgaactttttaaaaggagtaaaaaagtaaatctttacagtagcagctggtgggtaggaggtattgagtccatagaactgctcttagattggaagggcatgggaaaatgaagttccattatgtgatagggttttacacacacacacacacacacacacacacaaatgtgagaaagtcactcaactataagcattcaaaaaagacagacatctttcttgtctttgtgggtcctgtacttagctcagctcatagaagccacaggaggaacctaataaatgttagttgatcatttactgatttaccaataaccaattcatgcctgctctagtgctgtggtctgaatgtgtcccccaaaattcatgttgaaagcctaacctccaaggtgatagtattaagaggtggggcctttgggaagctttgccatcattaatggaattaatgcctctataaaagaggccctatagagccccgtctactcttctactacatgaggtaatggtgaaaagacagctagctatctatgaacaagggaagagggccctcactaagatgtcaaatttgttggtaccttgatcttggacttctcagcccccagaaccgtgagaaataaacttctgttgtttataagccatgctgtctgtggtgttttgtaatagcagccagaacagactaagacatctagtaacacattctctggtaaacactaggaattcctggccttaaaaagttcatagctaatgagaaaagaaataaacaacataaaggataacatgctgtagtccactacatacaaggtgcttccagaccattcagaaaaactggataggaagatttctaaggtaatacttattgagtgcctacgtgttaggcgttttacatactttaagcctcacaactctggggaagtttcaccaacccattttacagatgacaaaactgtggcttaccaagattaataaggccagaattaaaattagggtctaattccaaagatattaccactatacataccaagatgtcttgttactacattttatccttacatttggcagtgaggggaaaactcaaaaagcagtcaaaaaacttttgtcctgaaccaacataaaaagagcacctaagacttcatccagtattttaccgaaagatcacttctaaaagtttgtcttcaccccgatctaaaaattagaaaactaattttctttcagcagctgcatatgtacataatgtaatgtttctacatttagacctacacaattataagtctaaacaaaatatgtgtaacatgattggagaacataactagcagtcatttaagaaaatggacatttggaaacatcatttcaagagcttgggatgaaaaattttgctatgacctataaatctggatcattccactgactgacactgagagaaacagtgtattatcacagtttacacagtaaatttttttggaggggagagggaggagattgaaatagaaatgatcgaaatagaaattatctaaagtttaagaaatacaactgattaaatgttacatgtcaaagacactgtaggtacccaataaatcctgttaaatggactgcacaagtgggatgagaacacgttttccccacacctctgactagtatgtacctttcttaggaagttattttttcagccatgggaaaaaaaagggcagaatttaggacagataaaacataagtagcttataaatcctctgaaaggaaatcaaaacacagtattttgtatctctgtataaagttaagctcctcagggacaggggcaatgtccagaggatagtgagcatactacttagcaaactaatgcaggttaataaatattgacacagtaagactagcatagtttacattctaattttgtaaagattataagttacctcttcatattctgttcttttatttctcctgtgtatattataaatacacaaagattgaaaattatttcttgaagctatttccttttttattttttggtcaactgtattagtgtttcttaaaagggcttctggtcatccttagggcttatcagtagcatcattaataatgtattcatttcactaaaaatgtggtaagtagcttggatttaaaaacaggatctaatttcaaagctatttccactatacacaccaagttacaactttcttatctctcctaaattctaaattttacatgatttaccaaatcacttcttaagtaagagtacttattgatcagaagtgtgagacaaacaccttatcccacttgtccaatttattcaacaagattgattgggtacctttgtgtctctgacaggtaactttcaacagttgtatttcttaaactttaggtcgtctcccaaaaaaaactgtaataatttgctgcttctctcaatattgcaggcagtaaaatgatccaaaattacgggtcatatccacatttcttcatgattgaggttaactgtgcactgtaaaccccatatgctattagtttacattttcaacagcaccctcgccacttaataatctcaaacagattttggactgttactaatttagcatatccataaaaagtcatttaaaaaatgtagacgctaaattctctttcaaggttgccaagcttcaccagtgtctgtattaaaattatttctaaaattttacggactaaggcatttggtacattcaattctacctttaccaacaaaagcctttaccaccaagatgaggaaagcatccttttcattttctacactgaaaaggggggggaaaaaaggccaactgcttgcatacaggtctgcatataacacagcagtctctggcaaagccaataactcacgttcaacttcagaaatcctggtggccggtaacacagagtaacctgtgcgcacaacccttgggcttgacataccacttcatccgccctcccttcccatcaatccacccccaaaaccccaacccaccaagcacacggctaaatatgtcttccccaagagagccaaaaaccttgaaaacgccgagaaagggctcccctttgaaggaaagggcctgcccttccctgtctggggccccggctggctcgaagagcctggctcctaggaggcccaaatctcgacgcctcgcacgtcccgccccgccccgggcccgctcgcgtcccctcgggcgacaaaaccctcccgccgtcgctcagccaggactgacagttacggctgcagcagccgcggccaccaggggcctacttctggcaccagccccttcggaccacgcgcccccaaacactcgcctcggcggcggggggcggggaaggggggtgtcgacctcgccacagcgggccccgaaggccggccgagtgacggaggggagccagcgccgcctggcgcaggccgcggcaacactgacctgtcgtcgcccccgcgcctgggctgcggcggccgcctcactggtcgtagtcgccctcgcccgccgcctccgcccgccaccgcctcgttctctttcgctgccgccaccgccggggctcatgcgggacccgcgcttccttatccggaaaacgaggccgggaaagggagcgccggggccgccgaaatcccggcgttcgtcgccagccgccgctgcctgtccacaccggggggctgaggggccctcctgccaggggctacaggccgcgagctattccgaggaggagccgaaggaggcgccgccgcccgcagccgagcgcgccgggtcggcagaggtgaagcgtaagtaggcggcggatggcgggcgcccgcgctggcggatggctacgcggcggaggggtgcgcgagcgagcgaagcctggtgtgtcgggtcctggcgaagggaaaaggccccgtcgtctcctgtagtcaccccgagcccagcgccaccatcttgggagacacacggatctcgcggccgcggcgcaagacgggaggactggctgggcgggccgagtatcccggcaggcagcgcgcgccgcccggccgggcgagggctccaggccgggacgcggggacgtggggcggggccaagacgcgcgggagggcgccgcgctccgcccctccttccttcgccggccccgcctccctcccgcttgccgtcgccgccggcgcacgggccattgggaagaggaggtggcctgcggcccctcggagtcccaccaggctcggtcgccatcttgcgactggacagaaagggtaatccctctttttagtttctgctgtctgtgacccgaaagaataaacctgggacttccggaagccctctgggcacccccccccccaggagggttgcagagccccttggtgtacccagcagaggaacgcctcagactttgttgggaaacgaatggctctgaaagttagctgaagccgctggaatagccccccagccccgaggcggggcaggtgcctgccgttattggcttttcgaccccaacccttttctatctggagctgcctttgtagatgttgcaggggtgccccgagagtgcaggccagattttagaggaccaaggtcatctacttaggcctcttgccaacacaggatgtgtcaactagtttaccagagacgaaggtaaagtcccgtctcctgcagttgttgacgttcagtaggtcgtcggttaagaaaagtggctccctggttgaccccagctggatagaggctaattttgatccatatgacagctgaacgtagttaaagccattaaaattaaatccatttaaagtcatatttggtaccagggtcaccattttaaaaggtgtgtgtgtgtatgtgtgtgtgtgtgtgtgtgtgtgtgtatagctttacaacacttgctagcaaagccaaaagagtatcactaacaattcatagtgttacaacttgcaactttgttgataagcccttgaagtactagatgagtacccatgtctagtattcagattttttatatcaacagtcgtacatagcagtgtatcttttttaaatttatttttatttttaaacttagaaatggtgtcttgctatgttaggcccaggctggtctcgagctcctggcctcaagtgatcctcccacctcggcctcccaaagttttgggactacaggcatgagccacagtgctcggccagcagtgtaatttttaactgtcagtctcggaacatcttttttgtatagccaagtgtgtgggtgtgtgtgtgtatccgcctcacaactataaccaaccattgaaaaaccaacaataagctagaagaatttaagttattccaggacaactgatgataatgatagtattaagccatattcgattttaagatgttttaactcagctctttactcacttttcatttcctctcattacacatccacatttggaaactatttgctgttatatttcatggaaaggactagtaagaattataatctttaaaaaaatttatcttcgcaagttttcaaaataggcaacaaagaatgtaaatctttaaggactttattgttggactaattaaagcataccatttctactatatctagcatatggagatacttataggtattcttccttttaagtagaaattgacaataaattaagtgtaattttataatggcctggtgtatcaaagtgtggcggaaatccctgagttccaaaaagattaaagaccgaagggaaataagtctgcttttagctagatgtcagaatgactattcattgctttactgagatcaaggaggatcttaattcctcctggagaaattacgtatatccgttttagttcattaattttaaatctgtattcttatgtgtgacattagtattagaattctttcaagatttcactgtgctttttgttttatccattttcaaatttagaaatgtttgctcatcaaacttaccaacataaatactttcaggaatccttaagatactagcagtgttccacttccctatacacctgtttatatgaaaaataaaaaaattctcccatatcagacccatgtgtttttttttttttaggtgtgtttttcccagaaaaacaactttgtatctactaagtgaacagtgatttcttcagacttttctagtccaaatgagacccagtagtttctaataattttctcatttcaggtatacagtaaaaagagcaatttaattttataagcatctgcatcaatgccttgagcaaactttgagctaatgtttacccagaactatttatgtgtcatatgttggactacttgaactactatttatgtgccagaccttgggaaacaataaaagatgaacaatctctatccctgccctcaagaacttgcagttccagaggaagtcacacctgtaagattggacactttttcagagtaacccaacacttcattgagcatggggggtacctagtaatatgtatctgctaatactaacaaactttttattttattattattattatttttttgagacagagtcttgctccgtcgcccatgctggagtgcagtggcgcaatcttggctcattgcaagctccacctcccaggttcatgccattctcctgcctcagcctcccaagtagctgggactacaggcacccgccaccacgcctggctaattttttgtatttttagtagagacggggtttcaccgtgttagccaggatgggctcgatctcctgacctcgtgatccgcccgcctcggcctcccaaagtgctgggattacaggcatgatccaccatgcccagccaacaaacttttttttaaaggaaacattttgccctaaattgctggtgaagttgttttttgacagagctgttttattgctgaagatttcttattgatgccagtcataacagatgaatcaaaatgcaagaacaactttttttactactcagcatgccccaggatcagaaataagtcgagcatggaagagacaaaattcagatatggtgggatagaagtcacggttgctatttttaggccacatccaaatgttacacactcaacttctgaaaaacactaagctttcaatatatgaatagctcccattatttaagaaatactgttaagcaaacttagctccatgaagaacactggcatatgataagtgctcagtaaatgttagtgcttagtagtggtagtagtagtagtatatgtatcattgtttagtactgcacacatcaggcatgaactcctacatacccccacccttatgcctgcagacctgtctaaatttgcattctttctgacctcgagtcttaaggtagaagccatccttctgtcctttctacaggtaatttttatttcttgagggaagagagattgactcaagactcttactcccttaaatattcccactcctgttcataaattctccctctactttgtcccttctatttagaaaagctgtctatacttagattgctattaccttccaaattcctcttcaactacagaaatttagcagctccctccattttactgtatacattgcttgtatcaatttcactgtggcataatggccaaattgaaaggttgcttctcagttttcataacatctgatctctctgcagccttccacactgctgaccactgcctcctggaaactgctcccttggttctgtcaccttacattctctgctcttctgccttgtcttaggccactctttctcaggtctcctgtgcagaatcctccctccccattcttggttctctgcctaccatgttataatctttgacagtaccatttacgtatactcttctatcacttatttcagtcaggaatcaagtctgaatcttgaacacagatctcagtcagaagcatcagacacagtatcttcaaccccttattggaaacctgtactgggtgttctacaggcacctcaagctcaacatgattaacatcaaacccctgagtttgttctgtcttccaccatggactgagatgtgataacagtgcaaaggagcaggttttgggagaacaagcaggaatttagttttggtaatgttaaatttgagatacctgttggatatctgttgtacaaactgcttcctagctgactcttatgcattctgctctttatccatgataatagaacatctagccagacacatggttgcctataatacacccttaagtgtggccatatctcttaagttctggccagtaggatgtgagcagaaattatgtatgcaacttccagatcattttctaaaagaaattgggtgtcacttgccctttcttttgtccttttctgatgaatgtatgtattaaatagttggggtagtaaaccatgttgaaagatgctgtggtttcaatgatggtgtccccttcaaaattcatgttgaaacttaatccccattgtgatgatactaacagctgatgaaatcatgagggccctgcctcatggatggattaataccttgtaaaaggactggagggaactagcttaggccttcttttgcccttccatccctttagccacacgaggacacagcattcaccccctccagaggatatagcagtaaggtcccaccttggaaactgcagccctcaccagacactaaacctgctgggggtcttgagcttgtacttcccagcctttagaactgtgaaaaagtatatttctgttcttcacaaatttcccagtttcaggtattttgttacagcagcataaacaagactaagacactgggaaacattctagggattgcagagcaacaagttggggccctgaggacttcattgggcaggtcctgtgtaccaggtcaactctgatgtaagacagctactaacttctatgatctgccatggttattctaaatccctttaactgcagctgaccttgtgtcttaatatccaagcaaagatatcaggaggcagttggatgtggaagtctagagttagaggagaatgaaaccaactcatcttacattctttgacttgattggtgactctaccatctatggcggtccacagtcataataatggtagcaatcctggatttcttcctttccctcactctcctggcaattaagaggcaaagttgtatctctctaaagaattggctttagaattagtgtagcaaagtagctgagagcacaggcccccaacttactggcaagtgcacagataccaggcaagattgtaaacccctttctgatttagtttcctcatctataaaatggaggtgtagggattaagtgttaatgtacataaagttcttagaataatgctgggcacatagtacaactcaacaaaggcaggcttccccccgccccacgcaaatcccagttctgccagttaccagaaatacaaccttgagtacctcaattggtgtctgtttcctctttaggaaagtgggaaaaaataatagtaccatcctcataggaccattgtaatccttcattcatctattcagtacatatttattgaatggatatgtgcgagcactgttatcagtgctgagaatacagcaatgaacaaaaacagtctaccttcatggagtttgtgatccatggaggaagaaaaccaacacatatgtgttatgtcagaatatgatatgttaaggagaaatacaaagcaaggcaaagggaatagggagtgctacaggagttccgtcatgccgagtggccagggaagatcttattgaaaagaattcgtttaatcagaggcttgacagaagtgaggaatgaactgtggaaatacaaaggaaacaaccttctagacagagggggccctgaagcagaaaggtgcctagagtcatctaggaacagtagcaaggcgttgtggctagagagagaaaggaggagttgaagatgagctcagagaagtcacagtgggtcacagcctggaggactttttagcttttcctaagaacttaggtatttgtgctgaatgaggtgggaagcctctggaagggtttgagagagttatgacaagatccatagaataactctagctactgtgtggagaatggacaaagatagtgcatatgaggtgtttagtgcctgacacatgggaggtgttcaataaatggtaataagcaatatcatcatcatcattatcataacatccatttccttctgtatatttccactgctactaccttaatttagacccttagtgtttagacccgttgtgtttctgaactagactgtaagttccagaagggtaagatcatattacctcattcactattttaaccccaacattcagagaatgctggttcatattatactactttcctgccaaatgtcctcatcacagtatgttttcttaagaaacatgtgttatcaccttgctgcctttcttaactctatcagtggctcaccatggccttctgaataatgtctaaactccaaaaacggcccattggatgtggcctctgcctccattccagccccatctcccacttcccacatgaatgtattgcttaggcaatacttaagcttgagagtcatttggagctcttttgcatgcagtttattctaccttttagacaagttcaagctcctcctctgagaagcctttcagatctactcaaggagggtcattgcttatacctctgtgtgccctccgcatactcgatgtatgtgcttagcacttctgtcttctcttaagcttcttgagagaggagagcacccttgacttcttgtgttcccagtatctatctcaatggctaaaacctggtaactcctcaaaaaaggtttgaatgagtgaatcgggctttgtgagtgtaaaagttaagaactgagaccagcatgtctaatagagggcccctttactgagctaacatgtaataaagtagtgtatctttgaatgtttcatttttcagctatgtcaagtagagatacaaagtgcagtagtgcctgcttatacaattcagtgggaacagaaaaatcaggcaaatgaaataaatgtaagaaatcttaacttcttgtcaattccaataaatatgcaacaataaagtattttaattagaaccgtggtatatgaagtataaaattaagatattgaacaagatgatctatgaagtccttctaaagctatgactttttcaaccaccaatttcacgaattgcctctatagccaagactacacaagaagttactggagcaaaaacctggaagtctatcaaatcatgctttgaccttggtcatcccaatctctttgtgcctgtcttaacccagctggagagtaggtggaaaagggaagcatttcattgaacaccagctgctgctgctgctaatctgagctgttctgaataaaacagttccacttgaatcaatgaagcagcccttagaaattgtttctttctgacatgcgcatcatttgagttatttgaagtcattcctactacagtccatatctctaattccattttaaatacgtatcatactgattctaacacagactctaacaaaatgatttttaaatctaaggaaatgcattgattcaattaaatcttagtattaaagatggtacagacattctacacttattgtttttcttcagaatctctcaactgaaaaaaacatctgactagggaagaatcatgagtatcatttataattgatacactattttgttttagtactgcttgaggcccacatacagaacacaaaattctgttatcaaaatgataaatgttactatgtggattctttggcattgcttcaaacaaaattttatacttaaagtctgactttttaaaattattgattttacttttattttgtaacattaaattagcatactacatatggaaagaccaagatttttaaagatagtaatatagttatcatttatgacatacaaattttatattgcttctttttttaagttactgctaagcatagtactgattgcatccatatttcagtacttaccacaaagttcctgaaaggacagtacatttctgcaaattaaatttgtacactcattaggtgccagttgtttaaataaatctcattaattcatacaacattcttggatattatatactttatggattagaaaattgagcttagagtaagtaagcaacttgcccatgtcttacagctaaaaactagtagtgctaggatttaaacccacaggtgtatgtgtgtgcgctcttattgtagcatgttgctttcctagaaaacaaaaatttcaaaaatatatttcattgaaatgtttcctcattcaataatcccttttttcattgcttcgtagcaatcttataatatactcaaattattaccccagcagaaaactcattttttatactctccattcaagactgggcatctgggagtctcagccatcttcatctgccatcagtcctttccagcactctgtcctgattatgtgatactgagtcagctacttaatttatttcaaccttgatttcttcatttgtaaaggggataatactgtgatgagaaaagagataacatgttgctaaggacttattttgtgccttaaggacttattaataattgattaagctcaataaatgatgaatgaatggacgaagttgtcttagtttgtgtttctcacgaaaacagaccttgagacaatgatttcagtgcaagtaatttatttgggaggtgatccctagaaacactggtaagaaagtaagtgagttacggaagggaggaaaccaaaaagggtgtattatcaatcaagtgtccactttgggcaactggaatttgcttatgttgaagaactctgggagccagtgtagaacacacacttcacaattatcctgtgagtgtataatgttgttatcctcatctggctggcttgctgtggttgggacacagcagctccagctggtcagagagagccctaagcaagaaatgcaggagctggcaattgaaactaggactggcatacaatacagtaggaagatccagggcaccaatcgcatttgccacacaaatgaacaaacgagccaaacttggtgagttgactagagttcaggtctggccctcatgattgcaggcttagaaactgatttaagccagcccaccaatcaaactcacatttaacaaactcaagagatggaattataaaatcggaatgccagtttattgatttaaattgaaaagtacccatcagagggactggaatgctggaaaggactggtatgcaggtgaccagagcattttttccctgtaagaagacacacagggtccccacataacagaagcttcttaggaagcttgaaatctagacaaagggaagtgacagaacaggaactgaaagaactggacaattgatacctgatacattcaacttccgtgaagcatcattgacgggaatgagagtatgttgaagcttttgggcaaatatcccctaggaagttacagccagactttcctagtctgattttatccagtgttttcattgatgactagcccttttctttagaaatgtcaggcttccattatatcttgcaggcctggaagccatttctcttttttttaagtgacttataacaaactctgctttggtccatatgtgaataagccaacaggttaacacccaaaggcaatcatattttcctttttttccatatttctgtggcatttctatgtgtgccaagtgtcaactgtactatattttattacctgattgtaatctcctcacatctagaagtccttcagtctgaacttcttcatgactttcaaacctactaaacctactatctagttctcagtagcttttttcctatttctctctttttttcaatttattttatatatatatatttaagtagagattaggtttcactatgttacccagactggtcttgaactcctgggctcaagcgatcctcccacttcagcctcccaaagtgctaagattacaggcgtgagccccacacccagcctcccaatttcccttttatgtcaaacacttctcatatgaaacatgccatagttttttgtacttccttatttcttggtcattttttaaatctaaagaaaagtttagagcatagtataatcaataaccatattttctttagctagatgtcctggtagtttatatctggccatatttgttctatctatccatttatctgttatctccagctatggacccatttgtcataagttacagactttgtaacactttatccctgtatcttttccataagaaccagggcattcccatatataaccataaaccacatgcaatttaaccttgttctgggttagcagagacatcttccttagcaggccagttttatgatatggttctgggaaatgttctcagaaatacaagctagaagctgtcttttcatcccttctgattaaactgtgattttccattttttttttaaataaatcttttcttgctgcacaggaaagggttaactcagcagtcctgggttggtcaaaccctgtaggttccaaaaaaaggcctgccttggctgggcatggtggctcacgcctgtaatcccagcactttgggaggctgaggcaggtggaacaccaggtcaggagatcgagaccatcctggctaatacggtgaaacccagtctctactaaaaatacaaaaaattagctgggcatggtggcgggtgcctgtagtcccagctactcaggaggctgaggcaggagaatggcgtgaacctgggaggcagagcttgcagtgagctgagatcatgccactgcactccagcctgggcgacagagcaagaccccgtctcaaaaaaaaaaaaaaaaaaaaaaaaaggcctgccttcaggattggtccttgactagcccctgactaacctctgagaccctgaaacattctgcctgatgagagtgttttatatacctgaggctgtgggtcatgctgtatcagtttggccagataagttcatcctaacaaagtgatttatggtaaatgcctgtttttggctcaggagccagcagggagaggagaagtttgcggtggctggaatagaagtcatacaggtactatatgcctatgtgactgaccactaatacctgtgaaaaccctggacaccaaggtgtgggttatcttcaaataatggcaaaatttatgaagtcttgccaaccaggaagctacttcatatgtgttacacattattgcagagacaattaagtgtatctccatgtgactccagcagagaagatatctggaagcctggacctagtttctcctggatttcatcccatgtaccttttccctttgctgattttaatctgtatccatttgctgtaatgaactataaccatgagtgtaagagcttttctgagtcctgtgagtccttccggcaaatacttgagcataagggtcatctaggatcatctgacatgcctgcctagactagttactatggattctgttgtctccaaccaacaagtattattgacacagaattgatgacaaaagatccttaaagaaatagaaatctgggactagtgtctgaaatggatttgaaaacagtaagtatctaagtagtgctggcagtgggacagtggtccatggcacacagtgaccaaacagttaaatgatcttttgtagtcagctggactaaagtagcttttgaaggaaagactttgatttaagagattgtggttcaagtcattaagcaggccacgtgcagtctaatttaggaggtgaaatcttgcacaaaagagctagagtagcaatctgaatagtttagcctacagggatctttgacaggtgaattggtcatgaagtcccaaggactgaaataggtaatcagtttactgtgtccttttagataagtacaattctagttctgagtaaaccaaagcttgacttaagccacctcaatagagattcacagccccttgccaaatcccaaacctcagtcagttcatagacacagagtcatgtgagtgaaggtgagtctgggtacagctgaggataacccaataagttcatgctgtatattttccttctagccctcctgaaggagctacgcgatcgtttagcagaataactgttcaccaagggaaaggaaatatccagatctttcagggatttgggggcactgtcactgagctaacatgtaataattcctggcgaccataaagacactctggtccttcaagcctgatgagggcttgtgaacatcagttgacatcatttctcaatgggtccagtaggtccatgagccatcctgttaattcctcagatcctgaatgtgagttgtaatagacatacttgttatctgacaagatcctcagttgttccactgacccatagaatgagggactctcgtgatataaacctatgaacgtagtcctctatttgaaaaaaataaaccaaaagcaataccatgcctcaaggagaatattagtgatttagtgccaccacctaaaattgggaagacataggggtgttgctttctactacctctcccacttaacttggttgtttggcttgtgcaaaaaatcagatggatattagagaatgacagtgtggattattgtaagtctaatcaggtggagatttcaatggtagctgctgttcttttcttttgttgaatggctatcaactcacagactgcagactggtgaatcttacgtagagtaaaagaaaaccccactgaagcacaccacagtcagactgctgaaaaccaaagagaatgagatgaccctaaatatggtcagagaaatgagacacataacctttaaaggaacaacaataaaacttacagctgactttttatcagaaattataggtgccaggagaaaatagaaaggcatctctgaaacctgaaataaaaaaagcagccaacctaacattttatactcagagaaaatattcttcataaataaatgtaaaataaaaatgttttagacaaaaataagttgaaaatagtcatggccagcagattttttctagaaaaaattttaaaatagactcttcaggctgaaagaaagttatcccagatgaaagcataaaactgcaagaaagagaaataaagagcactggattgggtaaatatatctgaaaaatataaacaaataactgttaaaaataattatgatgtattgtgaaatatataacatggagaagtaaaaatatatgccagcaatagcacaaagactgaggacagtgaattgattacatgtgttgtaaagttcttgcaccctcaggaggtggtaaaaacaactagcttaaggtagactgtagaacataaggagtttgtattgaatctctagctaattattaaaatattcaagaatagctaatagaggagaataatagaatagcaaaaaagctgattattcaaaagaaggcagaagagaaaaaatatgaaatgaaaatagatggagttaatagaaaataaatagcaagactgcagatataaatccatctattttatttgttatattgtatatgtataactaaacatttcaattaaagacagattgtcacactgcatacaaaaacaagactcaagtatgtgctattgataagaaaggcagtttaaatataagaacacagtgaaatggagagtaaaaggatagacgttataacatgcaaacaatagctataagaaagttgattattatataatatcaagttaatagactttaaagcaagaaaaatcactagaagaacacaagaacattttgtaatagtaaaactgtcaattaaacagaaaaatcataaaatattctgtatgtaatatttcacctatatgcacctaatagcttcaaaatttatatttcaaagtgtaacagaattagatgaggaaacatcaaaatcatataataatagttggagattttcacacacacttctcagtattagaacagctgtcaaagcatcaacaggaatataaaatatttgaacaacatgattcattaaattaatcaagttgactatgtaagataccacagttaacagttctagatcagattttctttttatttacacagggaacagttaccaaagtatactgtatgctggcccctaatttaagtcctaaaattttttcaaatgattgataacatttaggttgtattctctgaccacatcacagtgaatttaaactgacaattaagaacagaaaggtaagtagacaaatttccaatagcttagcaattaagcagcacacttctaaataacccattggtaaaaggataagttacagcaaatcttcgaatcttagaaaatagtttgaatcgaatgatactgcagtatatcatattaaaaccagttaaatgcagctaaagaagagcttacaggaaaactaatagttttaaatagaatcaaatttcaaaatcaattatctaaaccagggatcagcacattatttcctgtaaagcaggggtccccaacccctgtcgtggcctgttggaaattgctgcacagcaggaggcgagggcagggaagtcaaggaagtttcatctgtatttacagctgctgcccatcactcacattactgagctccgcctcctgtcagatcagtggcagcattagattctcataggagcacgaaccctattgtgaactgcacatgcaagggatctaggttgcacactccttatgagaatctaatgcctgatgatctgtcacgtctcccatcacccctagatgggactgtctagtttcaggaaaacaagctcatggctcccactgattctacattatggtgaactgtataattatttccttatatgttacaatgtaataataatagaaataaagtacacagtaagagtaatgcgcttgaatcatcctgaaaccatccctcacccccagtaggaggaaaaattgtcttctgggaaaccagtccctggtgccaaaaagtttagggactgctgctgtaaagggccagagaataaaagttttaggctttctgggttatgtggtctctgtcccagctgcttaagcctgccattgtagagtgaaggcatacatagacattaaattaacaggtaggtggcccatgagctatggtttgggtaatacttaattcagggactatgaagaatgtacgtggtctttagatctcgtttaaaaaaaaagcagtttatctgagcagcctaacagacgtgggtgaaaaaatgaagtcacaccatagtatatgcaaggaaattatggaaaacttccatctctctgtgatggtacatccttcaactttgtgtttacctcttcagagaagcttttcctggcctctacatatcaaaatagtattggccacatgtacttttgcttctgtttttttctcctggtacattttttctagtactcaccactaccttaaattatatcagtaatttaaaaaaactttaatagagacagggtctcactacgttgtccaggctggtctcaaattcctgggctcaagcagtcctctcacttcagcctcccgggtagctgggactacaggcaccgtccacctttccatctcatgtactgaattgaaagttctatgaaaacataaactttatctcttctactactatatatttagcacccagaacactgtctggcataaggtaggtgttcatgattatttactgaatatgtaaataaatgatagggaagaggactgtaagtcagaaacccccaagtcccagaagtgacactagatggtgtacatggagagctactcatagtcacattcaatcgatccctgggaaacatgtggcaacagaggtgaggcatgataaacaaggcctggcagatctttgattgctgatatcaaacctgtgctgtcagttacttaagaaatggaggactcattcatgctcatcagaaatggttttacaaaatgaaagaaagaaaagtaggacccacattgctttcccagtcaacaagacattcactgagaattgttgatatagcacaaacacagtttctccagctctcttgttggaataaacatgtgagatcactggcgaggaagggccagtatggagtgatggatgagcttgacttaatcctcccttttccctagaggagacatttacgaaaataatttccctacatttctttatacttttgccatctaagtttgaattgctaaatactatggtttagtttttcttgttttttgaacattatgtaaaaggagtcatacagcatgtattcttttgtgtccaccttctttcatcaaaattgtttttgagatgtatccatgttgtagcatggagctacagtgagtttattctcattgctatataatgctaatatactataacgtattctttctactgctgatgggcatttcagttttctcctatttttgaatataatgaataatgctgctggaaaaattcttgaaatgaatataagctgctgctttctggatcatgaacaaaggactcttctgccacagaaatagcttcctagtactctaagcttccttattacagttcagttttataacctttgatagcgtttgattggccatattctttcactagacagtatgattcatcaacacaaaataatccacactttctatcgtagtccattttgtgttgctacaaatacctgagactgggtaatttatagagaaaggtctatttaactcaaggttctgcaggctgtataggaagcaaggcactgacatctgctcagcttctggtgagggcttttgtgctgtttcaaacatgacaaaggtcaaaggggaagtgggcacgtgtgaagagggactttccttatttttctatcaatacgtgtttgctaagagggcatgtgatgaggactagtgggatttaagacttttttttaaatttaagattattgaagtcatttggccccttgcaagaagtacactagactcatccctgcttatttatattaatggggcctaggcatagcataaatcaatggtatcagtaatacattaaaatcttgtttaagtcatacagtttaagtttagtcctactttaggagttctccaactcccttaataaggctgctaaagggcaaaaataacagtaaggactaatgacaattttgaattgttaatatctatatgactctcctggatagtttgttaacattcagtttccctggctccacttagagagcttggattaataggcttgaagtagagaccaggaaactgcatttttaataagcacccaaaggagactttaatgcagatattctttggaccacactgtggcagagctatcaataaacaatggcgggaaggagaagcaaggattacaactacagtagtgaaaagaaagacaaacatctgtagaaagattacaagaaaaccaattgtggttcttcctggggacagggataaagctctctgactgtgggcagtgattgtagtttgtagcattcagggtcctcctctctgggcatgttcacctcccactctagggttcaggcaagctggggctcttaccttccacatagcccagcagattctccaaagcttcaaaggttcatgcacctacacagaaataaatcatttgaaagggctgtttcaaaactgaaagtaacatgctcgattttagattctgtccaacgcaaaaaatgttaagaggacaaaaaaggtaaattaggccaataaatatactaaatgagataaggaacaaaattagtaatattaagcaagaacaattaaaacactaaaatgaactaagcagaatagtaggtatcaaaaataatacttaaagaatactatcattggatgagtagcagactggatgtgttggaggattgaattaatgaattagaagacaaattgaaaaaatctctgcaaagggaaaaaacaaaaaaaatattgtatacaaagccaaaaagatatggagtggaatagaagtggtagtactcagataataggtgtctcagaaagaaaatataaatggagataaagaagtagttgaagaaataatggagataagttttcccagattaaataaagatgaaagacttctgtttcaaagaactcatagagagtgtccaagaggcgagagaaggaaatcacaaccagactctttatagtatgatttaataacaaaggcaaagagaaatgtgaaggcttcagagacaaaatgaatcacaagcccaagaatcacatcgatatcagatctcttttgctatcaactcgatgcaaaagacaacaaagtaggattttcaacacattggtaacttagaatctagaattttatatccagacaaaatgtcattcaaattcagagatgtgataagatattctcaggcatggaaggcctcaggaggtttgccacacggagatctgacttgggaatatttaggggtgaaatatttatataagtggagagaaaaaatccaggagatgctgcaggacatagatgaaggaactgggtttttcattctttggtaacatttattgctttctctaaaaagtaagattaaataaaaagacaaaaatgtatttataataactctgaattttaaaccgacattaccaacataaagagtgaggagttggagttatttgaaagtgtactaagattctttcttcactgggagtgaaagagacatagatgtcaatatcccccctcccccgcaaaaaaaaggaagacaaattaaatgatggaaaaagtgggagagaactgaaatagtaaactaagattgtaaaaatgggttttgagattccctaaaagcacactgtaagatgagaatacttgtataaatgttttactaaagaaatgctcccaggggaaactggtaatggagtgggtgaaacagaacatggacaggaacaaagcgaagcaaggcacaacctcatgaacatgcagtggtggcttcgggtgacctggaagagcaactctggagtgtgtgtttatggcttctatgttctcacccccatcattcactgatgaattcttcctgggtacctccagagggtctgggggactaggagactgagacagttactttaaacagtggcaagtgatagctgtaggaaataaaaaactccctgacagtgggggctaagcaaaaatggctgaaaaggatccacaagaatctgggcagatccattatccactaaccagatccaaatacatcagtactgtcaatatatgtaaatgaaggaaacctacagtcaaaaaaacatgaacatgcaaaagttgaaactataaggatgaaagtataaggatgtcaaacaccaaccttttctcattatgtagtgatcccttccaaccctattagtgcttatggtcttaagtcctattctttttcgtattattagatagaaaaggtcattcaacacaccaagttgatacctctgttttaaacatgtgtgtacttaacaaaatagcttcaaaatattttaaactggtgattcaataatacagaataacaaggtaaacggttaagttgaaagaaaaatttccaaagcgtaatacgtatgaaactataaaagaacagattacaatgtgtttatagctgggacttctcctggtactcaaagtattaaattctgttgtaaagaggtgaaatgtctagctcccaaatgattagatgttaaatttatttcttcataatatgaaattattttcagtgttgaacaagaccagggaagccgttcataatatactgaaagctttaaaaacaactgataaaaaccacaaaactcattttgtataaaacttaaaaactacaaggcctcatttttgtaaatatagttagaatatgcatgtaaattaaaaacaaaaaatattgactaaattatagaaaataaaataatacacaactttataacttttgaaaatatataaaaattataacaaatgttttaaaaatagactatcattattaaagagattgaagcaatggttaacaatattcacacaaaaaaattagggtcaaatggttttatagcttagttttacaggtggcaaagacattataaaaaaattatcagctcactttactcactgatatagatgcaataatcctaaataaatacaagcaactcaaatctaacaaaggatacaaaaggtaatatgctatgactaatttgagtttatttcagctatgtaaggatgatttaatattaaatctgtaaatatagtttactgcactaacatgaaagggggaaaaagctgggcatgatagcgtgtacttgtggtcccaactactcaggaggctgaggcaggaggatcacttgagcccaggagttggaggctggagtgagctataatcacaccactgcacttcagcctgggtgatagagcaaaactccgtctcttttttttttttaattttttttaattttattattattatactttaagttttagggtacatgtgcacaatgtgcaggttagttacataggtatacatgtgccatgctggtgtgctgcacccattaactcgtcatttagcattaggtatatctcttaatgctatctgctatccctcccccctcctcccaccccacaacagtccccagagtgtgatgttccccttcctgtgtccatgtgttctcattgttcaattcccacctatgagtgagaatatgtggtgtttggttttttgttcttgcgatagtttactgagaatgatgatttccaatttcatccatgtccctacaaaggacatgaactcatcattttttatggctgcatagtattccatggtgtatatgtgccacattttcttaatccagtctatcattgttggacatttgggttggttccaagtctttgctattgtgaatagagccgcaataaacatacgtgtgcatgtgtctttatagcagcatgatttatagtcctttgggtatatacccagtaatgggatggctgggtcaaatggtatttctagttctagatccctgaggaatcaccacactgacttccacaatggttgaactagtttacagtcccaccaacagtgtaaaagtgttcctatttctccacatcctctccagcacctgttgtttcctgactttttaatgactgccactctaactggtgtgagatggtatctcattgtggttttgatttgcatttctctgatggccagtgatggtgagcattttttcatgtgttttttggctgcattaatgtcttcttttgagaagtgtctgttcatgtccttcacccactttttgatggggttgtttttttcttgtaaatttgtttgagttcattgtagattctggacatcagccctttgtcagatgagtaggttgcgaaaattttctcccattttgtaggttgcctgttcactctgatggtagtttcttttgctgtgcagaagctctttagtttaattagatcccatttgtcaattttgtcttttgttgccattgcttttggtgttttagacatgaagttcttgcccatgcctatgtcctgaatggtaatgcctagattttcttctagggtgtttatggtttcaggtctaacgtttaagtctttaatccatcttgaattaatttttgtataaggtgtaaggaagggatccagtttcagctttctacatatggctagtcagttttcccagcaccatttattaaatagggaatcctttccccattgcttgtttttgtcaggtttgtcaaagattggatatttgtagatatgcagcgttatttctgagggctctgttctgttccattgatctatatctctgttttggaaactccatctcttaaaaaaataaaaagaggagaggaggaagccatataaccatcttaatctataccagaagaagtattatattaaatttaacatatatatgtatgtatttatttatttaaaagtagcaaatttcttaacttgatagaatgtgtttatttaaaaatctaaaaggcaatattctgcatagggatattaaaagcatatctttataatgacaaaagaaatacgggtattcattataaccacttctagtcaacattgccttggcagccttaccagtgcaacaagacaagaaaaagtaattacaagtataaggactgagaggaggaagtaaattgtcattaaagtcatgcaccacataatcacataataactttttggtcaatgatgcactgcgtatagaactgtagtcccataagattataacgaagctgaaaaatctgtattgtctaattatgtcacagccatggtaaagttgtagcacaacatatttctcatgcgtttgtggtgatgctggtgtaaacaaacctaccatgttgccaatcttttaaaattattgcatatacagtggtgtacagatcataacacttgacaataaatgaccatgttactgggctatgtactttctgtactatacttttaattattactttacagtatactctttctacttataaaaacacgttaactgtaaaacagtctcaggcaggtccttcaggaggtattcagaagaagccattgttagcataggagatgacagctcccagcatgttattgcccctgaaaacctgccagtgtgacaagatgcagaggtagaagagagtgctattgatgatcctgaccctgtttgggcctaggttaacgtgtgtgtttatgtcttagtttttaacaaagaagtttaaaaagtaaaaaaaaaaatttttaattaaagatagaaaaaagctgatagaataaggcaataaataagtaaaatatttttgtacagcagtacaatgtgtttgtgttttaagctaagtattattacaagaggaaaacgtgtttaataattttaaagtttataaagtaaaaaagttacagtaagctaagatttattattgaagaaagaaaaataccttagagataaatttagtgtagccaaagtatgcagtgtttataaagtttacaatagtatacagtaacatcctacaccttcacatgcactcaccactcagtcacccaagagcagcttccagtcctacaagctccattcatgtgagtgctctatacaggtgtagcattttaaaaatcttttatactgtatttttactgtaccttttctatgtttagaggtatttagatacacaattactattgtgttacagttgcttacagtattcagtacagtaacatgatgtacatgtttgtagcctagcagcaataggctacaccatatagcctgggtgtgtagtagactctaccacctaggtttgtgtaagcacactctatgatgttcacacaacaacaaaatcacctaacaatgcgtttctcagaaagcatccccattgttacatgatgcatgactgatatttgcagatggtgtggtcatttacataatcagtctaaaataatcattatttgaaataataagattaatatacaaatgttagctgcatttctatacaccagcagcaaacaactagaaaatgtaaagaaaaaatactctttataatagcatcagagaactttaagtatctagtaataaatacttattttgtaagtcactgaaaatttgaggttgtttgttatacagcaaacctgattagctctacaaggaaaatgttaaagctctattatgagatattaaacaaggctcaagtaaatagatagctcatctggccttgaataggaattttaatagaataatatctcagttctttccaaattgatctataaattgaaaataattccaatcaaaacctcaacagtgtttttcatagcatgtgataatcctagatggaagagttaagggctgaaatagttaaaatatttcgtcaggaaaggacacttcccttgctggttgtcaggatttactatgaaactagagtaattgagacagtagtggtattagttcaccgatcaatggaaatacgtagggagcccagaaatagattcccatatgtttggcactggggataagaaaaaggtggcatattatcagtagagaaaggagctgaaagatggaactgaaaacaatgcttctccaagtggaagaagttggaggtgtatcccaacctcacctaattacaaaataaacttcatttaagttaaagactttcaaaaacaaaactttgaaacccatacaaaaaatataggtcagtattttaaaacttggagaagtaacttaaacaaaacatagaattgttgactataaaatgaagtattgataatgtgggctaaagtaaaataaagaactttattcatcaaaataccccttaaaggacctgaaagttaagaaataaattgggagatagttgccatgtacatgatcaataaataattggtattaaatagctcctacatatcaatgaggaaaacacaactcaagggaaaacatagacaacatgaaaatactgttaagaagagaagcacatgagagcagtaaatatgtgacattaaatacgtgaatattattatgagaaaaatgcaaaatgaggtctcactgaaataccattttacccaaaagcaggccaggaatactaaggaattaacactctccagcaacatccctcaacctgtgatttgttggagttagtgcaaaaataaatccactgccccactctttggatagaataattctgagacaagtgtttgcaccatttctcagtgctttccatgggatcttcagccctcattcatccactgggatagctggaataattgaataccctttattagctgtagttcctgtcctgtatcccctctccacttctctattggcgttattacttcccaaatgggctattttcatttaaatccttgtctcaggtttcctcagaaagcccaaataaagactgtattttttgcataagaatatgttgagatgtgatgaaaaatattaaatggaatagttgggaatgatgcacagggaattcagattgctggttaccttccatggggtgttggatggcagatctggatgagaggggttcagatggatatatgtgtgatctttgtaaaggttctggcttttgttcagatgatgagtttgtaggtgagtgttattaaaaatagccaactaatatatcaatatatgtaaattttgtcattaactcagctctgtggcctcaggtccttcagaataggagaaaagagaatgagacggggagagagagagagagaataacaaagcaaggaaaggagaaagaaagggagggagggaaggaggaagagagaaattatgaggccatgttaggatattagtgagctctaggaagaatattgtcaagaaaaagtggattgactctaagcaataagtggaacgaggaaaatgttggaaattattggaagtcttttctcaacaagaaaaaagataagacaatgaaaaatttcaggaacataaaaactgtagaagatcatactacaattatgaattcatctaaaatggagcatacctggggcaactgatagaatgtaagatatttgaatctattttcctgatgttagaatagttctctgttttgagaggcacaagatttatgacattgtcccttcaaagattgaaatgtaattatagtacatacttcattctactatgaaacatacttgcatactaattccccagtcatcttcactttcttaccatcagaactccaacattaattatggccatgttgtgccaaattttaaaaaaacatttcccagcctcccttgcaactaggggtagccacatgatatggtttcaaccaataagatataagtggaagttgctgggtggaatttgatcttttaccttcttgagttactattccatcttcttttttcctgtctttcagtaacagactcgagctcaagattagacactagcctaatctttggttctctgccaaatacctgttcttaatcttttagttttctgccacttttctgagaatgctttcccaaagcttgctagtaacatcttaataggcaagccctaattacactctctcagtcttgatcttcttagaacttggtccatcctgtaatactcttaaaagcttctcatttttcaggcagcatctcagctcctcaagtactttgattctgtgctgatcctgtgttaaccacagagatcctccttggtccctagtgtcttttgtcactctgaaatttaaacagtcactgtggtttgctgttagatttctttctttcttcttttgtcagttgtctctgctatggggattgcatttttttttcaaggctgtggcaattacgttgatgaagatcatttcccagcctttagctttcctctagtctctcccccacgtgccaggcctgtatttccagatgtgtgctccatagagccactacctctactaaaaatgtctaaactgagacatatcgttttttaaattccctaatcaggttctccttgtgatggagatgttttgatcaacaaattgttttaaactctcagcagcaggggtttatcatgtgccagggacagtgccaagagctttacatttttgattctcacagcagctctgtcaggtgcatagcattgttagccccattttacagatgaagaaactgagacctaaagaagtgaggcctgatttttccaacatcacacaatttttactggctgagactggtcccctgatgcctaagtcaaatggtctccctttccataataacacttctgacatcctcctagtttaaaaatctcgattctacattgaatcagttgccagattctgtcagttctctctcccagacttcccatttccccttcttattgcctaaccaaagaaaacccactgtcagcttgttgtgtgcagggtcattgtctcttgtgttccaagcctttttgcaccctccacaagtacagttcctctcccttcaagtcatgtggacaggagaaaatccaagcatccatgaaatggccccagcgtactctttcactcttcgttttggcttttttcaacctgtcttgggctgtagccaaatgaccacttgctctggagggattcctcactgacccacctgaggatttgtgcttgtccttagactgtaacaacctacccagcctcctaggcgcctagccaaaattctctctggctcagagcccagacctctccaatgccttgcatgccttgatgggaccttgttgcagttttcctttgactttgtgccccaggttcagtacctgggttcttgccatgttctggtgactaattcccatcttctaacccacttcaggaactggggcacagctactcttggcagttctctcagagcctgaaattctctgccagcaccacaggttagcagctgaaactgctaccttgtgcacctgcctgagcagctgcataaatgcctgctccaagcttcaccatgaccctgtttgcctgccttccagaacggatcttgacctccacatgtggacaactgctaggaatgtggcccctgcttcacgtgtgaccctccagacctggaaccttgtcctcaatcatccaaatccaggccactttacagtctgtgtcccaggggttcccaaagtgtggtctgcagggtgttactaggcactgggtgtggggtgattaaataaatgtaggcgacatttagttatatataggtagttttcttaagatgtgactttgtagagcttttaacatgttttcatgtattacagttctccaagttcagaactgtaattaagtgctgttcccatgcttatttcaaaatgagaccatgtttttcactgaacagctctagggatactggaagcactggccacaagtagagttggcatataaaatttccaggtccaattcctctctggcgaggcctagcccattaagcagcatctactgtgataaggaactgtggtaggcgccacacataagcacatatgcttggtccccaaagagctcatagttcaatggtagaggaatatgttcataggtaagtggtagtagttacttgactgagagtggataaaggtcattttgggacggtaaggagtaaatagttctgcaggagtatttggggagttttcacaagaaagggatatttaatttagatcttgaaggatgatccagaaattctgctgtatgcaaagcatgtgcaagatccagaatcacacagtgctgggtgtatctggggagtgcttgggttctgcgggtcagagatgcaggatgtgtgagggcaaagtgtgggcatgaggctggagcataggctggggccaacagaaaaaggccttaaaaataaagaagttagactttggagtgcccggatggagttttgagaaagtttttagcacagtggttatggcagtggtgtggcatgtggagcggactctgctggcccaagttcttcttttggtgcagatgcaggctcagctcaggaaggctgacctgaggcaaacttcccttagctggttattcatctgttatcctggaccacattctctcccagaggatgatactttttcatggtggaggatggtattggccttttttttccccttggtgccttacacagtgactcatgtcaagtacgtgcataacaaatactgccttttagaataaataagcgaagtgttaaataagtctgtacagactacaggtgccacagttttgaggagaaggccctctttgggagcttgagtacagattgtaggaaggtaggcacttgggagaagatctgacttgtcattgaagtgtagttgcaattgggatatggatgaagaaaggacaactcatcctaggtaaagggggtagcccctgcaagtgccagaacagggcatggtcaggatttagaggacagagaagctcaaggagctgggcaggtgatgcaagggtgctgtccacacgctgaggacagagacttatggctcagggagccgccagggagcacgacttggccctgccttgctggttgcctcaaatgacagctctccaaacacttgaagggctagaagtgggactagcatgggaaaaacatgaaaccaaaatgctaggggaaggctggagaaggatacagctatccaaattgaagtgaaaagcagagccttagtattgaaagcagggaagagctcagcagaggacagggcaggaatgaaagatgagacttagatgagcagcaaggctgacttaaggagaaactgctgagtggtcactgaggactctttttctcagaggcacagttcccagagctgaatggagagtttcatacacgtatgagctatgcagtccacatcagatactaagtacaaagtgaaatgatggctgatcagtggtgaggtggctgggctgatggaacagaggtgcatcctgcaaagcaggaaagatataaggttcagtcattggatcagattggggtgggcttggtctaagcagaggaatatacagttaaacagtggaattaagaagccctgacttggccgggggcggtggctcacgcctgtaatcccagcactttgagaggccgacgcaagcgtatcacctgaggtcaagagatagagaccatcctggccaacacagtgaaaccctgtctctaataaaaatacaaaaattagctgggcgtggtggcgcgtgcctgtagtcccagctgttcgggaggctgaggcgggagaattgcttgaacccagaagggggaggttgcagtgagcagagatcgcgccactgctttccagcctgccgacagagtgagactctgtctggagaaagaaaaaaaaaagaagccctgacttttgataaagcaggggtatgaggaaagcagaagcactcattgcaggttcaaaggagagcctggagtcagccatttggggaatgttactggagcaaagcgaagtggttctgaatcaggtaaggagctatgcagttggagagaagaaatgcagagagcattttgacagaactgccagtatgggtgactgacgggacagctggacaaaaaggagagagtcagagatcatgtcaaaagttttgagagcatgaggccgccatcttggcgggccctggccggccagcacacagatcacgtcctcaggctctgtgtttcctccggctctgtgtttgcgcagcctcgtggaaatggtagccagtgagcttgtgtgattatgaactgtgaattattattttcggactgcctgagggaggtgggagcatctgtgataagatcgtgagctcaggcaggagaggagtgctgtgcaggtggcccctggcatgtgtgtggacatgtttcccgatggagaattgggaggaagaaaatgattagagtgttagtgccagaaggcaagtataatatggtctaaatgttgtatccaatcctaaataccccaataggaagaaaaaagaaatcaagcatgtcatttttataatgtaaaatttgagggtagtgccaatggaaaaggccttgaaaacacccataaagctcaaaggattgtccaaattattttttttgtgctcaaattctattgtatcaaatattacttgagaaagtttagattgacagctaagtctcagggatgttttgtattatgtggagtttcacttgaattggatttgaccattgtgtataatcaaatctgaatccccagcatatattttagggaatagtaagtgaggtcattgcatttggcatgttactgaaagcagtgcccagggaataaatcctgacatcaaccagctagctaagaacatgacacatttccttgatcttctgccaaggaacactgccaacaactgacacagagagcaggagagaatgcggggtgtctaatgtcccttccacccttacaaataatccccaaataattccattagacccaatgtggagaagacaggaccagcctacaggaagggtgtgtctgtgggcacattctctgagctgttacttctggcctggccatggtgtcttttattggtggattatactttttcctgttggagaagaaacaacagcaaacagggccactgaagaatatttttttttggatatggagtcttgctctgtcacccaggctggagtacagtggtgcgatctcggctcactgcaagctccacctcctgggttcacgccattctcccacctcagcctcccgagtagctgggactacaggtgcccaccaccatgcctggctaatttgtttgtatttttagtagagatggggtttcaccgtgttagccaggatggtctcgatctcctgacctcgtgatccatgcgcttcggcctcccaaagtgctagggattacaggtgtgagccactgcacccagccaaagaattttaaaataagaggtgaagaggttagagatgtattaagaacaccatactaaaatctgtaatggagctgcaagaaacagaaaaccattcttcagttttctgttgattgaatgatatagtgtcccatgacttgcaaaggtcagggtcagcacagagtatatgttgttgtctaaatcaacgactatgtcaaataatgcttggaactgatagatccagagaagagaaccagcctaggccataaggttgctctggaatgcatcattgcctcaagagggacattctagtaacaggcttggcagagtcagtcctgcctgagaacctcaccataaaaagtcacacctgtcaatgtcagcctctgtagaacagagccattggggttctctttcactagaatccatttgaaagtcatcctggtctttgtccttgagtcagcagaagtgtctattagagcatgtttgaagaaggtattgatttaattaaataatcttttttcagaatctcaaagagaacagttagctaagtttaatgtctacctgagtacacaaaaacttcaccaacatacaccttcttatatttctgaaaagaactgtgcaggatgtgacttgaacaggtgatagtgggcagaacgggaagtcggaaaggcgtgcttccagaaaataaaaaaggcttcggaacaaacttctttgtcttcagtgaggactattgggaaaatttgaggttagaaagggtagatttatgtggggatgtgcttggattgccatgtggtgatggttagttatgctattttttatatgcttgtttctagaaaaatagatttttgaaccctaagtgcaaaaaatgccataagacttaaggcaatcatccaacttagggatgaactctgcatatgtcacaaataattatagtttatagattatagtcattttatttaaaataaaaataaacattttaaatggttacattggacatttttattaaaattttgttttcagattataaaagtaatacatgccacaattcttcaagatctattccacctatatagagaaaatactgtgtgtgcctattcacatattcaacaagttttggtccttttctatgtactagacactcttttaggtgctgggaatacaaaatttaaaagaactattctcatctttcagaaacaggcagtctacagaaaaatgtgctcaaatacaataaaaatcctgcatgctgtgaaagtagcctgtgcacagggagagcaaagaggagacagaagttaggggagcaagagagtgtagggaggcttcctggggcagcgagaattggaggccagttccaaagcaggagtggttgttgggggtgggatcgggggaagtgggtgggcagggagactccaggcagatggaacagcatatgaaaaggcgtggagatatgagagggtattggctggaggtgggctactaccaagtgatgaaactggagaagttaatcaggaaggcagcttgtgaaggatctgtgtgctcgagagtgaatctgatttcaaatgtgaacaagactttcagatgtatgacttagcccatttagacatcctctgaggtagagagcataggtttattctaagattggctcctcattccattggctaaccttggtatttatcaaagcctgtgagcctaggtagcctctgttatacaaaccgtacccatcctcatttgaggtagtatcattgtcatcaaaagaaactttaggacagaaaacaagccagataagcacaatgagccctggctgagcatccaaggaacccacacctggccggcctggagagaagcaggtgatgatcttgagaggtctcatttatatggtgggagaaggctactcagagggttaaaaaaaatgagatgataactaactagtgctgggacagagattttcatggatattccccaaatactaaggtttaactactctttaaactgtctcatagatctaaaggtcaatttattggctaaataatagtagctgatatggtttggctgtgtccccacacaaatctcatcttgaattgtagctcccataattcccatgtgttgtgggagggacctggtgggagataatttaatcatgggagtggtttcccccatactgttctcatggtagtgaataagtctcatgaaagctaatggtttcatgaggggaaaccccttttacttggttctcatttttctctcttgcctgctgccatgtaagatgtgcctttcaccttctgccatgattgtgaggcctccctagccaggtggaactgtgagtccattaaacctctttttctttataaattatccagtctcaggtatgtctctatcagcagtgtgaaaacaggctaatacaatagctaatatctattgagcatgttctctgtgccaggggcttgctgagttttcatgagatacaatacgagagcaaccactttcccaatcctagctctccaataaagatggcataagctgctcaatgcaagtatgggcacattttaccctcttaatgggagaaaaatttttaaagtgatgaagaccagcacgaaaatgctcaaggtgaaatggccagaaacatagtgtgagtctagttttgtccatatatgaaagaaacgcaaaagcataaattgtattcatctctgggaagtggaagccaagtaatgtgtagttccttctttagactttcttctagaatgaacagaaactatttttataataaaataatgttgttgtttttttataaaaggatgattttatctggctgaattggagcccagaagttgtgaaggaaaataatcctcatgtttctctaacatgcccccatgccattgaaccctgagtgtgtgtttgcatctgttgctatgcagaagagtttttattctgtcactggggttagtttttgttgagtcaggggggcagagactggatttgagtttccacagttagaaggagacgggaaatgaacagagctactttttatggaagacttggtagagaagagaggtcagaagttgacaaaactatcaaagaaagactagatgactctagagcagaattgtatgggggtcatgagactgaaggtggcattaagtaggagcagcccactgtcctcacctctgacagcaccgagcacccaggaggatcctaagactgcaggctgggcatggctggtgttgtcacataatgggcaggggtggggtgagaggagtggggcttcttttgggtaggtaggtatgtgataggtttgtctggatggtggaagctgaagctgaagacctgggtaagggatggcttgatttcaaaccaagaagggtggcctcattttgtgatcacaggctgatggaggctcagtgtgaggttatgttgctaggaaacggaaagaagatgcatttataagcaagtaagaacttctgcaaccattggaatgcagcccaaagcttggcacagtttttggttggttttatggttctgataagcaccagagtatacaaagcagctggagactgctagggtccctatgaaggaaggtggcagatgtgctgactgacatacacctaccggcccccatgggacttttatggccatgagcgttagggagccacacctccctgtgaaagacacgaccacagtcatctgctgtagctcctgcaaaaagtgaagtgaaaattgattgacttaaacattggatcttatgaataaaaacttccaaatgtgactggtgaaacccaacttaaatctggacccaccaaaagttaacgtgatacccacagatttgatgagcgctctgaggggtcctgcgttcttctcatatggccacggacttatgaggtttctcttccacttccttcaggacagatgctaatgtcaatttcaaaatcagcataaggacccctttctgacaaagttcacttttactgagagagtgctattttcagacagacttgaagagtgtaaatttgccattacactatttctggaatgaggaaaggaataaagtgggtacatttttaaaaacctatctatcccatttcagtgtttattgttatgatatgtagaagaaatatagctgctgtttaaaaagtgatttaccatttaatcaatgaaagtagcttctcgtgggcctaacaccaccctgtcacttcctcagaggctgtcgcccccatactggggtatgaggacagccttggtgctgtaacaggactgttctggggcctctggaaggatctgcagtgttcccccagagtgttctcttggattgctccagggatacagagtgctgttgacagaggactgtgtgataggtagcacccgatgcccccttagactgttgtaatgcacagctggtcatttaagagccctgagaagtccttggatcatggagtatttgcaagtctaacgggaggcacttggtgaatgtttcataggtgtgcttgaaaaaaaaagagagtattctgccattactgattggaatgtacttaggcatctattaggttctaataggtcctgtgttgtttggttcttttatgtctttgatgattttctgtctagtagttttattctcaattttggtataaacttttgatgatccttcctccttacagctgctctgaatattctactgaacttgatttcactatacacaaattttgcataagtctagagcagtatattagaattatctgtgagctttaagagatgcatatgcctgaaccatattccagaccaatttaagtcagattccctaggggtgggtcctaagaatctgccctttaaaatctccctaggtggctctattgtgcattcaggattgaggaccactggatagaggctatacaacgtgatccaattcacgtgttccaggtaacagacctgggtgaagccacgagaccacatccactgtgtctagagcagcattgtccagtagagctgtctgagagggtggaagctgtgtctgtgttgtctaatgtggcagcactcaccacacactgctgttgggcacttaaaatgtggggagtgagactgaggaactgaatttttaatttgatctttattttaagtaatttaaatttaaatagctgcatgtggctagtgactactgtaggcagctctagatccatgtaatttttgtcttattttaccaaaaaaagaaatacattttcacccgaacttccaatgataaatgattttaagtggaagtactcagttaaaaatgtgttcttttatatcaaatagtacatgtatcagcaaaacacgtgaattgatattgtttcttctctgtggagaagtgagactttagaaaacaattcaatgtgcctctatgattacaaaattgcaccttggaaaatatttgtaaatgattgtgctgaggaataacacttgtcctgagaaataaacttacattttctttcaaatacatgcctgttatctgtggcttttaaaacttattgggggctgggcacggtggctcatgcctgtaatcccagcactttgggaggccaaaacaggtggatcacctgaggttaggagttcaagaccagcctgaccaacatggtgaaaccctgtctctactaaaaatacaaaaattagctgggcgtggtggcacatgcctgtaatcccagctactcagaaggctgaggcaggagaattgcttgaacccagaaggcggaggttgcagtgagcctaaaaactgtctcactcccacctgggcaacaagagtgaaaccccatctcaaaaaacaaacaaacaaaaaaaaaaaaacaacttactctgaattccccaattacattgttcatctctccatttcataaggcttgtagtttccaggagcacaattgtaacggtaaaaaaatgttcaaacccaactgtgttggactcagaatgcttgcaatcactctgtcacctgtaatcaaggtgctgtgataagatgcatttgtattggctgttcagtgtttcctacatgactgacataagtttgtatggtgagccaggccatgaactcttggcactagggagtaattccttaaacactggcaaaattcgttgcaagataaatcctaagtgcatgtattttacaccataaatttgaggtagcaggaaaacaagctactcttcattttgaagtatttattcattctctgatctttttttttttttcttgaggtggagtttcgctcttgtcccccaggctggagtgcaatggcatgatcttggttcactgcagcctccacctcctggattcatgcgattctcctacctcagccttccgagtagctgggattacaggtgcccaccagcaggcccagctaatttttgcatttttagtagagacagggtttcaccatgttggctgggctagtctggaactcctgatctcaggtgatccacccgcctcggcctcccaaaatgctgggattataggcgtgagtcactgtgcccggccttctctgactatttttaaatgctaatttttagtgttgggaagaaaaactaggaaaaggagtgctttatcataagctcatcaagaaaaagggttatgataaaattattttggttttggttctttataaaatgtttctgaaaaattgaaataataaatacaatgtatcacgacagcacgaaagtcagatgttaatttttccatattttgttattcaacagaaaatcattaatgatatgcaaaaactaggaggaagtgtttaaaaaataatgggaaactattaattctcactttccatagctcctttcagcttctgaaactaagaacattaattttcactcaagcctgtccaagtcctaagaaaatcgtaaccaatcctaagcccatatcaataggctcttcaccagttggttaaatctgaatcagtctgtagccaagagtctgttgtgtgtatcccaagcagggcccagacagaggaagagagaaatcctgagtccatgcacctgccaagtttcagttttcttctgttccagtctttctggcatccatttcaggtgccgctgacctagggggaagggctactgtaacccacttgagaggatggtcagccatcactcaaattaacacacttagaagggcccaggagaatcaggtttgtctggcgttcagcataactgttagaaagtgctaagaagcagaggggtgttttttggtgttcctgcaggcctgggagagtgggctctttgccctctggggtgagcttttctctgctctcacctacactgacagatctgccatttcttgtactacatctgccctcattgtcttccagtctcaaaggattgagtgtccttcccctgttggaagctggcctactcagactaccatggtggcaccaagcttttacactaaggacgttgtgaaaaatgagaatttctgggcctttccccctttgtgttctgatgctgggtgttgcccagggatttttgtctttagcccccccaggagaacttcccataggatttggtgggccttccttgagaaatactccctgctccatggagagtaaccatcctctccatattcatttatttttattgagtcattccctactctgtaagtatgctcacttccccactgaaaacagaatcctctctcaacacctcttctctgcattcctttatagttgacttctcccgaagaaacaaaccccatgcttgttgcctgtttccccacctttctcctcagttctctgcagtccagtgtttgtccccagtactccacatttactcttattatcctccaaacaaacaaaactcaccagtcagctccaatccagaccctccaacaaagcctgcagagccccgttcctgccccctggtcacgtgcagccctgtcctgttccttgctgtctgctgccttagggtcccggcttccgtatagcttcctgatgtgcagagcccttttctgcctcaggcctttgcactgcagctgtctggagcttatgccccccaccgcaggcttcctcctcacaagggactatgtcatgttcttggtgtgacagcatccatatcagaaagaggccttgcctgtgaatgtgatttaaagcagctatcattctctctcttatagctcctgttattttccttcagagtgcatttcctaatttatatatgttttaacaaatttattgatacttcccctcactagattctgagttttgaaaggctagtggccttactcgtgtagttcatcactgtaccaaacccagttcctgaaacatggtagatgctttacttggagacatagtgaaccaatgatgctgttttgatggaggccaactaatgactccctaatttccaccttctccacctgaatgcagagctgcctgggtgagagaccatggcaagcgatgactctgcagaaaatctgtgacttaatatttgccctgagtgttctcagttctctgacaaacaaagccagacacccggcacttcacatcactgtggctgatcccactggtagaaaggccttggggaatgttgtgttttaatgatttcactgaaaataaaactaaaagcctagtttcttcctttgtacagaaaaatggtactgctgatgttaaccttgtgattacaggataatttcaataaattgctagagactttttgtttttttttttgtctttgcagagtgaatgaaatacagagagaactacatcctccacttcctgtgtagcattgaggtattcagatcccccttaggaaagaaggtttcaggagctttgcctctcagcatccctgtacacacagcctggttcctgagcacagtgcctgtcgtgttcccatctaagcctcatttcctttccttctttagggacatgaatctgctagcaataaaaatatctaactgggtaataatgtatgcagggtacactgttagtgttcctaactgctgttaaatggtgatgggcgttaactggcattttgaatacagcccttacaaagcctttttttttttttttttccccactaaagctggtgcctgcgcaggtgtctaaaaaacatgcacaaccccacaatggaaactgcaacaagttcctagtcccttcaagaagctttctcagcacatgagacactctgaatgagagtctggacatttggttgttttattatttaagaatgtcttagaatgtaatagaaatgaaatataaataagaaatataattatggcaaagaaagaaagtaaatgaccactattgctaaatggcaaggctagaaaacccatgagagtcccttgtccagcattagtttagtagagatggatacaaaataaataagaaaaatcactataatacagttggtttcctatgtgcttcctgggatgtgctttacacacatcaagcccctgtgatgctgagcagaaacaggggcttcaggttcacacaggtcagctcttgagtacgtctttgctactccttgcaatttccattatcactgccaacttatctgggtccttcatacagttcatgtgaattattggtagtgaatagctcttagtgctaggacttagtagctggtcaaatgaggaggggaaggacaaagaggctgttcataaatgtactgagcatctactaatctgtatcaggccttgtcccagatgccagggtgggactgatgaagacctagggtagactctgaggacacacagggaagggtgtgctgaagctctcgggtttgataatgggcatgtaaacgggattcacagagaagagcaggtttgggtgaaagatggtgagttcagacatgggcactaaggacttggatttccacatgatgatgactggcaacacccccaaataaaagaccagagcagaagcaggggccagagtctgagatggggactcaggagccaggcccaaagtggtccctgaagtcctgtgagtggatgagtttgctaagaacattcaaacagaaaaggagaaattagtgagattagaagcttccagagatctcatgaattagtctgcaggaagaaataaaatcatagaggaaatagagctgaaatcatcagtaaagtttgcaagccaggcaagtgcccaagaaacaaggccagagagagttcctcgaagcagatgggcacagtgacaagtgcggtaaaaggaaaggcagctaagccagaaaatggctttgactgacctggtgctgagagatgctggggtgagttgctcagtagagcaatggaggtgaaaattgtccaccaagggctagggagtcagggggtggggaggcagaggccatacaggatctgtatggggaatgggggatagggtggtagatggaaagggaaatgtgggagaaagggagaggctgataatgctgggcgacagcggatgacccaccaagtgcaggttggactgcaaaggaaagtggcaagagaggagaaaggggaagataagaaggcatgagataagatggaaagaagagaaagtggagagagctttccttggctgttcttgactattttacaaaactgagaggatggtaatttgataaaaatggagggggcagaaatgtccctgtgggcttgaagggaccatcccgttagacaatacacaggaaagtcaagaaaagatgaacaaagttgagcactgtgcagtcactctgagggccaaattacagttagcatgaattttgggaatccaaataacacagctttgtgactttcttcagaaatccttgggcaagaaaatgcagaaaagaattgggttggaaagcaacaattctaaggcccccagagggtctagtggtttacagtgctgaccatggggtccagcctgggcagaggggaaattgatggccgaaaggggaggaaaagccagatcagggaagatcttagggacagcagactctgaactgaggtgaatacctctcttcccttagagggagatgcaccacttcaagggtctgtgaggctcctctccatatctgcttgctggcgggtgagcaggagtggttgcccaggtagtcccagagaagcccatactcctgacggtggtttcccttacccaggctcaggtctcccttgtcttaaaccaatgtctaccccagagaagaggctgctgccctaattatagagtacagattgactaaaccatacccttaatgtctgtcaatactgataaactaccaaatgtatacaggtgattaataacagtactcccctcatgatgacatgatcttgcaccagtgttttatatatatatacacacacacaccgagtcactggcctaacctgtttagtctcctggagaatttaagtggcagcaggggagagctgtgccttttgtgtgtcctgaaaggcacatacaacccctgcagcctgcgggttaagatggaagattataattaatcacaaagatgtggctgaacgcgcagtgttcttccttctgctgcttcctgctgccagggaaagagccagtggcctctaaacgacccgtgagagcagctctgttgccgtgtgcagcattggcttcagatccttcttcctcagtcctgcctccctgcagttttggctttcctttttctgtgctttttctcttgacttgccaaatttgggcttagtcagggctgtggtgttaacgctcctaatgagccagctcacgccgactcagagcctgagcagcggtaatcagagctgaagacaaaagcaggggcggaggcacgcgtccaggtgtgctttctgcagtgcctctctttgtccaaacattttacagactccagaggggagagggcagggacaatgtgagaagcaatgaactccccaaggaaattactgtttcaataaagaaggaagattgcaagctgcactctgtacgtgtagatgagtgtgtgctcatgttttaaaactctgaacatgcaaattattattattttttattatactttaagttctgggatacatgtgcagaacctgcaggtttgttacataggtatacacgtgccatggtggtttgctgcacccatcaacccgtcatctacattaggtatttctcctaatgttatccctcccctagccccccacccccgcgacaggccctcgtgtgtgatgttcccctccctgtgtccatgtgttctcattgttcaactcccacttacgagtgagaacatgcagtgtttggttttctgttcctgtgttagtttgctgagaatgatggcttccagcttcagccttccttacaccttatacaaaaattaactcaaaatggattaaagacttaaatgtggccaggctgggtggctcacacccgtaatcccagcaatttgggaggccgaggtgagtggatcacctgaggttgggagtttgagaccagcctgaccaacatggagaaaccctgtctctacaaaatatacaaaactagccgggcatggtggcacatgcctgtaatcccagctactcgagaggctgaggcaggagaattgcttgaatctgggaggcagaggttgcagtgagccgagattgcaccattgcactctagtctgggcaacaagagtgaaactctgtctcaaaaaaaaaaaaaaaaaaaaaaaaagacttaacataaggcctaaaaccatgaaaaccctagaagaaaacctaggcaataccattcagcacataggcattggcctaaaacatcaaaagcaatggcaacaaaagccaaaattgacaaatgggatctaattaaactaaagagcttctgcacagcaaaagaaactatcacgagtgaacaggcagcctacagaatgggagaaaagttttgcaatctatccatctgacaaagggctaatatccagaatctacaaggaacttaaacaaatttacaagaaaaaatcaaccccatcaaaaagtgagtgaagaatatgaacagacacttctcaaaagaagacatttatgtggccaacaaacatatgaaaaaaagctcatcaccactggtcattagagaaatgcaaatcaaaaccacaatgagacaccatttcacaccagttagaatggcgatcattaaaaagtcaggaagcaaattatttttaattgaaatttgtatcgatctaattccagattcatatgcaattataagaaataatacaggcagggcacaatagctcatgcctgtaatcccagcattttgggaggccaaggcaaaaggatcccttgagcccaggagttcaagaccatcctgggcaacacagcaagaccctgtctccataaaaagtaaaaaaataaaaaataaattagccgaattagtggcacgtgcccataatcccagctactcaggaggctgaggcaggaggatcacttgagcccaggagactgaggctgcagtgagctgtgatcatgcaactgcactccatcgtgggtaagagtgagaccctgtctcaaaacaaaataaaataaagaagaagtaatatatagagatcccatattcactttcccagttttctgtaatggtaatattttgcaaatttatagtgtaatatcacaaccaagatattgacattgatacaatcccccatcgatctcagatttccccagttttgtttatactcatttgtgcatgtgtgtatgtccgtgcatatggtgtttagttctacacaattttatcacgtgtagggttgtgtttccaccaccacaatcaaaatactgaaattttcatcaccactagaacggcttgtgttgccctattatacctaaatccacttccccataggattccccattgccaccccagccttcaacctctggcaaccactgttctccaattctaaagttttatttcaaaaaatgatatggaaatggaaacatacagtatgaaacatttgggatttttttttcacttagcctaattgtcctgggatccattaagtcattgtgtatatcaataattcattccttttcattcctgagtagtatttcatggtatggatgaaccactttgtttaatcattgaccctttcagtctaactatatctgccaatctctttttattgctgtttaaattattgatattgataagtatttatatgttggtgcttaagtctacctttttaattatttgttttctgtttgatttctggttctcattcctctgtttattttcttaccttccttaggttatttgaataattgttttggattctaccttgatgtgttgttagtgttttttttgttttgttttgttttttatacggagtcttgctctgtcacccaggctggagtgcagtggcatgatctcggctcactgcaagctccgctcccgggttcacgccattctcctgcttcagcctcctgagtagctgggactacaggcacccgccaccacgcccagctaatttttttgtatttttagtagagacggggtttcaccgtgttaggcaggatggtctcaatctcctgaccttgtgatccgcccgcctcggcctcccaaagtgctgggattgcagacgtgagccaccgcgcccggctgtattgttagtgtttctgtgttttgaatatatttctttgtatagcttgtttttagtgggaaaaaagttcttgctgtgttgtccccattggtctggaactcatgggctcaagtgatcctcctgccttagcctcccaaaatgctgggattacaggcataagccaccatgcccggctggcttgagtattttacggtgttaatgtttttgtttcaatcatcaaatgtgatttagaaaaatcataaggaggatagtctattgcatgtactcatatttttatttctttaaaaaaatttttttagacacagtcctgttctgtcacccaggctggagtccagtggtgcaatcatagctcaccgcagccttgacctgcctcagccttgtgagtagctgagaccacaggcgtgtgccaccatgcccggcttccatattttcatttctgttgtttcttcttcttttctgatgcttcaggattccctcttacagttccttgctgtttgataaattatccaatctttaaggataagtctcctaggcacaaatttttctttcatttgagaatgtctttattttctcttcattcctgaaggatagtgttcccagacataaaatctgtggttgaattttcttttcacttcaaatacacgaaaaatgttgtgccattttcttctgggttccactgtttcagataagaaatctactgtcatttccatcattcttcccctatgggtgatttgtcatttttctctagtttctttcaaaatgttttttctttgtctttggtatggatttcttgggcttatcatatttgggattcactcagattcttgaatccataggattgtgtgtgttgccaaacttcagaagttttcagtctactccttctttcagccccactctcttttctcctcttcatctgagactctgatgacagaaatgttagatctattttacagttccataggtccctgagaatatccttaatatttattaaggatattttctgattgttcagattggttactcaaattaggcaaattatatcctcaagttcagcgattctatcctctgtcatctccattctacaattaaacccatctaggaagttgtcttttttttaagtttctgttattgtatttcttagttctctaatttccatttggtccttttgtgtaacttctgtttctttgctgagatttttaaaattgtttttatttgtttaaccgaatttataattgattgttgaagcatttttattacaactgttttaaaatcttcatcagataattccaaatcttgctcatctcagtgttgctgtcagttgactgtcttttcttatccaaattgtgattttcttggttcttggcaaaatgggtgatattttattgtatccggaacattttgtctattatattaagaaactctggagtctgttaattttttttaatttcttttttttattttagctggcagtcactctgtttaggttaagcactcaggtcctggattacttttgtgggctgtggttttaaatcagttatatttcagagactttggtctttgtttatctatgagggctgggaatcccactccctgctggtgctgtttgagggacggaacaggttctcccaggttgggctatggagtgtctcttggagtaggatgggaatctcaggccagtggggacaaagaggtttcctgggctgggctacttgtcatagtgacatccttctgctggctctgcccacccaccaggcaggcagggaatctcagcacagaggggtctcttgtttgtattttcactagactgtagacctgtggaggtaagaccaagtctggctctagctccagtgtgaagcacagaatacaatgtgtaacagggtgtgtgtgctgggctggctgtgctattgttctccaacacccaagacctctttgcaatttggcttattcatatatctcatatgggtaacgaaatgcaagcaggaaagagtatcacttataggtgaaggctttgagggccaggagaacctttgcttcacactctttcctgtgtcatcatcactgacaatgtttcagatggtagctgttccatcaacccacatctcagagtcccagagtaagaatgcagacagcttgaagcagaatccctgcagatcttggacggcatattacgtgagtgagcaggaaactttgtatgtgaattgcagcaatttgggaagttgtttgtcaccacagcatcacctggcctatcctgcagtgaattttgcttaaaggagaaaatgaagaggcaaattttgttggctctggagagtactagaaatgtataaaaccacatatcttaaaaattacattcattaaacattttagtaattcagcttgtatcctcttgttagacattaacaattggggttttactctagggaaatgagaaaccacagtttggtttgacagcatctgtctgcattagagtaccttggtggtctgtgaagacatttgcaatatagactgtttacagttaaagagaattgcgggggtctggatattttcaattgccagagaaaagctttccttctgtctgcgcctccaggatggattctaacattaaggattattgacttggtggctttgtgcttatccccaaattatttctgttcatagattttgcatttctttgtcattcttctgtaaatttctgtctccatcctatagcgttgtattgagttctccataggccagtaatggaatcagcttatcttgaaccagaccgtaatacagcctctgggtgtgaacaaggccacaagcaaggaaactgaatacatcctagaggaaggaaattgagtttctgctgaggacgtttaggtaacatcacagcacttgtgttattgctggatgatgtttcttagattaagctggccttgacactttctccaatgcttttaatacgatttattactgaggaaaagatctggtcatttaataaagatgcagaaatactttctgtcaaattgtaaggaagcaatccgtgtatttttgcaatattgaattggtgaaagtgaaatcactttaaaatgaaattagagtgactcatacaccccctgaatcatggaaatacagagacctgtggccagttaaacccctgaaacaaattatccatccatggctgtccctaagcacccttttctattaaggagacacctatagcatccagcctattgtcttttttatctttctagctttattttctgcttcctgtcacctactttttatacttgacatttcagtgtccctaaatctagcaatagaatagttttttcctctgtacatattggtccttttctgctgttctgatcaaggcatactgtagactttttattttaagaattgtattattctccagatagttttcaagtctattgtatagctagacagagggatatggggctagattatgttacaatgccataaaccctctgttctttcccactttcagcagtttttctggaacaaactctcctcagattactgtaaacctttggttaatttcaagatctcttaaataactgattttttgacaattttggctactgtgtttattgctctgatggaaaggtagattcatagggattgtcaacctactattctggtggtaaaattttaataagttaaattataagggaatgtacccacaaagatagtgcattttatttaataaaaaattgttgagcagctagtatttactgggcagtggcctagccactgaagattcaagtgtgggaaagaaacacttttgctcacatttagcatttgctaacagaaagtttaccattttcaaaggaaatagactcgcagataggaagaagtaagctgaggaaggaaataagtcttcctcttcaggactaaaaaagggacagttggccagagaatggagtaaagaggctgacacatccacttccatttacattttggccaagccagagaataaaaaccgtaaggtcattgtgagagtccttccacattaaactttgccccaaattttccatttttcactttatttctcttaatttccatctggagaataataaaagaatcaaatggcaactgtagagctaaaactatcttaagttttagcttaagataagatgaggccaggtgcagtggctcatgcctgtaatcccagaactttgggaggccaaatcaggtggattacctgaggttaggagttcaagaccagcctggccaacatggagaaatcccatctctactaaaaatacaaaaaattagccaggcgtggtggcaggtgtctataatcccacctacttgggaggctgaggcagaagaattgcttgaagctgggaggcagaggttgctgtgagccaagatcacaccattgcactccagcctggatgacagagcaagactctgtctcaaaattaattaattaattaatcaaaacataaataaaactatcataatgaaatgtaaaatttcttagagggtttcaacagaagatttaatcttacagaagaaagaatcaatgagtttgaaaataggtcaattcagattatgcagcctgggaaacagaaatatataaaagaatgaagaaaaattaacagtcataaatacctatgggacaccatcaagcacaccaacctacccataaaggcagtccaagaatgagagaaatgagaaaaaggaggagaaggaatacttgaggaaaacaatgaccaaaacatcccaattttgatggaagcatttatgttcatatccaagaatatcaaattagataaactgaaagaaatctacacttacacatataataggcaaaactgttaaaagacaaataaggaatactgaagacagagaaaaatgactcattacatgcaagtgatctataataagattaatagctagctttccataaaaaaatcatagagatgagaatgcaatgaaatgacatattcaaagtgccaaaagaaaaagaatgtcaatcaagaattctatatccagcaaaactatcttttatatataaaggataaattaaagctgctgtagattttaaaaaactgaggccaggtgtggtggctcatgcctgtaatcccagcactttgggaggctgaggcaggaggatcacttgaggtcaggagtttgagaccagcctggcagacatggtgaaaccccatctctactaaaaattagctgggtgtggtggcaggtacctgtagtcccagctacgtgggaggctgaggcaggagaatcatttgaacctgcaaggcagaagttgcagtgacctgagatcacaccactgcactcccacctgggcaacagagcaagactctgtctcaaaaaaaccccaaaaacaaaactgagaaagttcagtggtagatgacctgctccccaagaaacactgaaggaagtattgcaggctgaaattaagtgatatttattagtaacttgaatccgcatgagtttgtaacactttactttctgatttaaaagacaactccacatagcaataattataaaactttgttgatgagcttttaatgtatatagtttccatgatgcacaatgaaaggagaatggagctatatttaaatgaagcttttgaataccattacaattaagttagtttaatctgaaagatattgttactatgttattaaccactcaaaaataactaaaaaaatacatagtaaaaggaacaacaaagaaattaaagttgtacactagaaatatatattactataataagatattaatgggcatgtacagggacagaaaccacataaagcatgtggaaaacaagtagcaaaatggcagacataaatctcaccttatcagtaactacattaaatataaatgattaattaatacatcaggtaaaagacagtgactggcagaagaaataatataatccaattctattctgtctataagagatacagtttagatttgaaaaccaaatacattaaaagtaaaatgatggaaaaagggatacaatgcaaacagtagccaaaatagagctgaagtgtctataccaatatcaagaaaaatagtttttaagacaaaacttgttactaaacacaaaggataagtgacaaagtggtagtgatccctctggaaaacacaataataataaacatatctgtacctaacaacacaaattttaaaatacatgaagcaaactgacagaagggagaaatagacaactcagcaatagttggaaactttaatatctccctttcaatagtgaatagaacaactaggctgaatactaagaaggaaatagaacattttaacaacactgtgacacaaatagacctaattgaccattaggtatataaagcattaggtagactatgcaagaaaaaaaaaagagaagactcaagtcttaaaataaaaagccaacctcacagaaataaaaagattataagggaaagtataaagactgtatgccgggcctggcacggtggcacacacctataattccagcactttgggaggctgaggtgggcagatcacctgaggttgggagttcgagaccagcctgaccaacatggagaaaccctgtctctactaaaaatacaaaaattagctgggcgtgtggcacatgcctgtaattccagctactcaggaggctgaggcaggaaaatcgcttgaactcaggagatggaggttgcagtgagccaatattgtgccattgcactccagcctgggcaacaagagtgaaactccatctcaaaaacaaaacaaaacgaaacaaacaaactctatgccaacaaattagataatctggataaaatggacaaattcctataaagatgccaagtgctaaaattgactcaggaagaaatagaaaatataaatagatctattaaaagtacagacattgagttaataatttgaaaacttctcacaaaggaaattctaggcccaggtggcttcactggcaaattctaccaattatgcaaaaaagaatactcgtctcctacatactctttcaaaaagtagaatactcatctcccccactctttcaaagtggtaaggaatttacccacttagtctataaggacaatattacccccagtgctaaaaccagacaaagacagcataagaaaactacagactgatatccattgtgaatattgacacaaaaattctgaattactagcaattcacatccagaatatgtaaaaaggatgagaatgaccatgaccacatgggaatttccccaggataaatgttggcttaacattaaaaaatcaatcaacttagtacaccatattaataaaataaagaacaaaaatcacatgataatttgaatagacacagaaaaagcattggacaaaatccaacagcctttctttaaaaaaaaaacactcaacaaacagaatacaaattcctcttccaaataaagaagcctatgaaaaattcagaagtcatattgtacttaatggtaaaagactgaatactttccacataagatcgtgaacaaaacaaggatgtttacttctatttaacattgtactggaaattctagcctgggcaatcaagcaagaaagagaaataaaatgctttcagagtagatagaaagaagtaaaactatttctattctagatgacatgaaaatgctagaaataatatatttttaaaactattagaactagcaaacaagttctcctactttgcaggataccaggtcaatatacaaaaatcagttgtatttctaggcactaacaatgaacaatgtgaaaatgaaattaagaaaaacaattctattctaatagaattaaaaagaaaataatttaggataaatttaatcaaagaattatacaagttcaagacttgtacactgaaaactaaaaattgtcactgaaaggaattaaggcaaacttaaatagatgaagaagcaccccatgttcacagattgaaagacttaatattgctaagacagcaatatttcccaaatggatttataggttcaatgtagtctccatcaaaatcctagctacctcttttgggcagaaattgacaagcttatcctaaagtcataagaaaatacaagagagccagaagagccaaaataatcttgaaaaagaagaacaaatttggaggacttacacttcccagtttcaaaatgttctacaaagctgtggtaatcaagacagcatggcacggtcataaagatagacatatgaatcactgggacagaattgatcatctaaaaataaattttcgtatttatggtcaaatgatttttaatcatgatgccaagaaaatttattgggtaaaataaaagtcttttcaataaatggtgttgggaaaactggatgtccacagcaaaaattaaaagtttaatgtgttcaacatgccatatacaaaacctaattcaaaattgatcatagacataaatgtaagagctaaaattataaaattcagaagaaatagagaagtaaatatttatgactttaagttaggtagtgattttttaggtatgaccccaaaaagcataagcaaccaaagaaactaaattgaactttctcaaaatataatattttgtgcttccagggataccatcgagaaaatgaaaagactacctacagaataggagaaaatatttgaaatgatatatctgataaaaggcttgtgtcaagaatatataaagaactcttacagctcaactaatagacaacccattttttcaatggggaaaagatctgtatatacattttttccaaagaagatatatgattaccaataaacatattaaatgattttcaatgttattcatttttcattagggaaacacaaatcaaattttcaatgagaaaactgcccactaggttggctgaaatttagaaagtaaacattaacaagtattggcaaggatgtggaggaactggaatcctcatatattgctggcatgattttaaatggtggagagaacagtttggtagaatctcagatgttaattatagagttttcatatgacccatcaattctactctcatgtatgtacaccagaaaaatgaaaaataaaaacatatgtccacacaaaacttgcatatcaatgtaaaaagcaacatgatttataatagtcaaaaacggaaacaactcaaatatccatcaagtgatgaatggataaacaaaatgaggtacagccatacagtggaatattatttggtatttaaaaaggaatgaagtactaatacatgatctttcctctctgcctctgcctccacccagataacaagaatgaccccttcaatgactatgtaggtcatgaaaactggaagaaacttccagtagtttctgtctgccaaccaggaaaatttttgatgattaagagaccctctgcctcctgaaacagaaagggaataccataaggtgactaagcacaaatgaatatttaaattaaatgtcctgccactttgtggttgagttgaaggtgaccaaatccaacagactgcatggtgacatcactaggatgttgttctgacctcctcctctatccctttctcggctgaagctgtctgatctgggaggagaaacagagcagacagagcctagacttttgtgagaccaagagactccactctatagtctttttgtagtttcctggacctctcttgaatcccaagattccttagactccctgttattcattgcagttctcttcttggctgtagtctcccatgacacatctgtcctctctgcagacacagccaaaagaaaggcatatgtagtcccttaccctaggggctgtttttgacatgtatcctctcccagcttggtggtgctttcttgtttccttccagatctagttttctcttccaggaaacagtctttttgcttgttcctgggtgtggtttatttaatgctgaatccttagttggcaaaatttgaggatactactctcattgactttaccgcaattcatgctccctggagtgctgagatgtggctactctggcttccctggccttggcagctggctcttccttgttgactgggctctaggtaaaattctggaccttggtgccaccctggtgacaaattactttccaggagctcaggagatatggaaatgtggtattcatccccaccagagtttatggacagattcactctcactgagtttgacttattgatggcaaagagaaagagacattttcttggggaacctaagtggaaaagaggagtctattaaaaggatgcacggctagagaccaggcttgtgactttacccaggaacagaaaaatcatcctggctctctgtcttgcatctcttttctttctgattcattctttttttctctctggagattaacttctgttttttgatcttcacgaggaggtggaagatgatctactggggaaaatggactctctgacccaattctcagggtagattttccaagttgctgaagtttggtcagtgcccatcctatgtgtggactgggctgtctgaagactactcctgcacatgtagggcaatttgaggcaggggaaatttgtgaacggggtcaactctcattaagttgttcttattagagtgtgccagtgtttaaaagggaacataggatttccagttttcacttcagtgcaaaaggagccttgaagctgccactgtatcctaaaaacaattcaaaaaactgtcaaactgaaaaatcaacagttcttcttagatctatcagaaaagtgaggacacagggtaagctgctgtccccaaattggagagacagacatgtggatgcaatgaatctacttttatcacagcagaaactcttgagcagaaacctccacgggcgccagtgccagcatgggaaaagctgaattgtaactggcaaattgccggaggttgagtgtggaaaagatggagttaaaaactccaggaagacccaggtatagaagggctcttatacttctatgaggtgtaactacaggcactctcccagcttctcaaagcaaggatcagagaaaaattcccttatgcttctctcacagggaggagaaaagcaaccactttgaaacgtgccagagcattcttcttattacaaggcctaccctgaggaggaactattttatcagagcctaaatgctggggttttatcagaacctaacctacccaggggaagggaaatacctaacaccagttacctgtaaccatcctgtcctatctaagggatggggggcaactgagaagctcctatgaagttcacagtccactttaggaaactagcaaaagaggagcaaattaaatccaaagaaagcagaagataagaaataacaaaattacagtagaaatcaataaaattggaaagaaaatcagtagagaaaatcgacaaaattataagctggttctttgaaaagatcgataaaattgataagcctctgtagctaggctaagaaaaaaaaattaccagtatcagaaatgaaagagagaacatcactacaaatcccatgaacattaaaagaataacaaaggaatattatgaacgactgtgtgcccacaaatttgataacctagatgaaatgaaccatttccttgaaagacacaatctgccaaatctcttttaagaagaaacagacaattgtaataggcctatatctattaaagaaattgaatcgataattaataaccatccaaaacaaagcatcaggcccagtgggtttgctggtgagtcctaccaaatttttaaataagaaattataccagagggaagactttgcaattcattctacgaagccagcattaccctaattccaaaaccagacaaagatattccaggaaaaaactacaacaaatacctgtcataaacataaatgcaaaaatccttaacaaaattttagcaaatcaaattaacaatgtgtaaaaataagtatacatcattaccaactaggatttatcccagttatgcaaagctggttcaacattcaaaaatccattcatataatctatcgcatcaacaggctaaagaagaaaaaaattatgtgatcatataaataggcgcaggaaaagtattggacaaaatccaatacccattcatgataaaaactctcaccagactatgaatgggggaaacttgctcaccctgataaagaaaagcacatctatctaaaaacctacaatgaatattatacgtaatggtgagaaactcaaagcttcctcgcaaaatcaggaatcagatgtccccctcatcattccttttcagtgttatactagaagtcctaggtaatgaaatcaggcaagaaaaggaaataaaaggtatacaattaggaaggaaaaagtaaaattgtctttatttgcagatgtctactagataatccaaaagagtccactgaagaactcttggaactaataagcaattataacaaggttgcaggatacaacacagaaaaacttaattgctttcctgtaccagcaatgaacagatggaatctgaaattaagaacacattaccactaacattaccatgccagaaatgaaatacttagatataaatctaacaaaatatgtacaagatctctataaggaaagctacaaaactcaaaactgatgaaaggtatcaaagaagaactaaataaattgagatagtccatattcatagacaggaagactccatattgtcaaaatgtcagtccttcccaacttgatccatagattcattgaaatcccaatcaaaatctcagggagttattttgtggagatcaacaaactgattctaaagtttatatggagaggcaagagacccagatttagccatattggtattgagagggaagaacaaagtgagagggctgacagtctacctgacttcaagacttactataaaactacagtaagcaagacagtgtggtattgataaaagaatagacaaatagatcaatgaaacagaacatggaaccagaaataagcccaaataaattcagacaactgatttttgacagaggagcaaaggcaatacaatggagcagagatagtcttttcaacatgtggtactggaaccattggatatccccatgcaaacaaatccatccagattcagaccttaaacccttaacaaaaattaactcaaaatgggtcacagactacctgtggaacacaaattataaagtgcttagaacataatacaggagaaaaacctagatgaccttgggtatggtgatgactttttaggtacaacaccagagacacagttcatgacagaaataattaataagccggacttcattaaaattaaaaacttctgttctgcagaagataatttcaagaaaataagaagataagctacagactggaagaaaatatttgcaaaagacacatatgataaagaactgttaccaaaaatatacaaaggacacttaaaactcaacaataagaaaacaaactactcgattaaacaatgggccaaagaccttaacagatacttgaccgaagaagatacacagatgtcagttaagcatatgaaaagatgctccacaagatgccatcagggaaatgcagattaaaaaacaatgagatatcactacatacctattagaacggccaaattccacagctctgacaacatcaaatgctagtgaggatgtggaacaacagggactctcattcattattggtgacaatgcaaaatagtacagccactttggaagacagtttgggcattcctttaaaaactaaacatacccttaccataatatccagcagttgtgctctttgatgtttatccaaaggagctgcaaacttatgtccacacaaaaacctgcagcttcattcataattgccaacacttggaagcaaccaagatgcccttcaataggtgaatggataaatgaactgtgggacattcatacagtggaacgttatttagctctaaaaataaatgagctatcaagctatgaaaagatatgcaggaaacttaaacgcatattgctaagtgaaagaagccaatttgaaagcctttatattatatgattccaagtatgtgacattctggaaaaggataaactatggagatagcaaaaagatcagttaatactagggatttgggggagagagagatgaatagagcacagaggatttttagggcaatgaaactattctatctgatattataacagtagaaacttgtcattatacacctatcaaaacccatatacaacaccaagagtgaatcttaatgtaaactgtggattttgagtgatgatgtgtcaataccatttcaacagtagtaacaaatgtaccatcctggtggggaatgttggtagtgggggagtctgtgcatgtgtggggtcagagggtatataggaactgtctgtactttctgcttcactttactgtgaacctaaaactgttccaaaaataaagcttattcatatgaaaaaccgtaaacgaaaacgaaatacacacacacacacaggatgaacacacccacttgtgcgatgtcctcttagtttctttagtatgccctctatagagattacctggcatgctttcagtctaccactcacagcctttacagcctggagattatggtagtaagaggctaacaactatatagccataccaccctcccatcaattatttagtcaacaggtatctgttgagcatctaatatgtgccagcggtgcctagaggctgtggggtggaaaatgagtcagcactctttacagccccttgcccacaaagatgcgatcatctgtgatatcatttggatgttttttccaatctcatgttgaaatgtgattcccagtgtagtaggtggggccaggtgggaagtgattggatcatggcggcaaatccctcatgaatggtttaataccatcctcctggtgataagtgagttcttgctcagttagttcatgcacgatctggttgtttaaaagagtctggggagacctaccccttctctctctcttgctcccactcttgccatgtgatgcgactgctcccttttcccttctgccacaaatagaagcttcctgaggtcctcaccagaatcagatgctggcatcactcttcctgcacaacctacagaactgtgagccagttaaacctcttctctttataaattacccagccattaagcattcctctatagtaacacaaacagactaacacagtccacttgggaaatagaatgtcaccatgcagctagtagtgaatatgatgatattacatattgctacagttgactggggaccaggataatggtgagctactaattatttggcacaggtgataagagtataaagattcggtgcagaaagattcatttgagctggaaaaccctgagaaaattggcaagagcaggggcagcttcacgtagcttcacagctgatcagctctgttgagaccatcttgaaattcttactaatttttgaacaaaaatcctcatatttttattttgcactggactccccaaattaagacccctcctttccaggaaggaaatgtttgtatgggtcatgtctgatttagaaatcataattgataccacttattgtgcatttttaagtaccaggaaggatcttaggtgctgagaccttatctcctctaacccacacaaaggagaggaaaaccaagtttcagataggtcacctgatctcacccagtttgtggggcaggcaagattcaaacccaagctcttttcttttatttctgattcattctttccagatttttatatcagttatttaaattcatggttcatactttgaaatgatttttaattaattaattaattttttttgaggcagagtctcactctgtggcccaggctagagtacagtggtgcaatctcatggctcattgcagcctcaacatctttggctcaagcaatcttcctgcctcagctccccaagtagctaggactacgggtgtgcaccaccacacccagctaatttttactttttttgtgtggagaatgtggcctcactatgtttctcaggctggtctcgaactcctggcctcaagcaatcctctgacctcagcttcccaaagtgctgggattacagttgtgagctatcatgcccagccttgaaatgactaagatgtttgagaggaataaaccagctcacctctgtgaatagtttagttcagcagttcctaaacattttcagttcacagcacccttaatgtcttagtaatcttattcacagggccctgaggccacatgaaatacctaacagttctatttatgaccttgttgggtccaactaccttaataagtatttatgtcctaacaacttaggagctgggtaaaaaataatatgtacaaattggaagaaaataaatcatattttattgtaatattaaataaccacaattatttactaatgatatgtaggtgcatcagttgggcactagcaatatgtaaaaccttggaattagataggacatatcactttttcccccacaactatcacaacagtcaccaaaaaccaagctttgcaaagatatgacatcatggaaggaaatttagcaacctaatgttaaaaccaatttacctggagctagcagttcctgagatgtccgacaggcatccttgtgttctcctcaagtatttaaaaatacccaggcacttctgcgagtcccttgaggtgcctgcccctctgcctgtttatgcaaagcaatgtccgcttgctggtggacaggtccaggcagtgctttttcctctgcgcgatattagatatgcagaaaatcatggataggaagtgccaaggaaaaaacgggggataaaaatagaatgaaccaaaaaaggagctcaagaaatgtatttttaatgcagtgccacaaaaataagctcatattttactatgtatttgacatcagaatacaattacaactgacatcaattatgttctctattagacttttctctaccttatacatttaagtgtaatcccaaatggggagagaaccagtgctttttaatataggtgctttctcaatttgaaaactagaatggaagtcatgttcagaagtgtaaagaattctaagaattaggtggtggataaaagattgttagcaaccaagaggttccgttattttttacttcaagaatgctggtatgtggaaaatggaaaccatattcaaccactcacttaagttagctaaacccaacatattacagcaattattaaccctctttcatctttctaataacaagacacaaaaatagttataatttgtaatcagtaacatgtcattagagggctgttagttgattttatctaccagtgcttaggtagatgggttttgttgttgtttgaatttcatgttaattcaaacggaatgaaaacttggtttttgatgaggacagaaagattttacatctcatttcactggttcttttttcttctgaacgttggacttctatgtgcttatttaaaaaaatatgtggctactgccatctgttggatggaatgtgagtcctgctcagacacgtgtgccctttaaacaatgtctgtcccttctaacttcacaagtgtctcctcaaggtaaggagacacttaccttgagtgtctcctcaaggtaaggcctttgctgtagctgcatgcatcccagcttccagccccagaactgagttcattttgggaacgttttctattgttgtggggcactttctcttcagacatgtaaatgctctctactgaagagtgtgtatatggttttttatctttccagtaaaacttacagcataaggaggcatgtcggggtagggagggatgtggctgggagcatgtttaggaacaagcatatttttagcatgggtagtagagtctacattggactaatataggcagaggaatcaaagttcagctctaaattgtggtgcatactgaggccactgattttatttctctgagctggcatttcgtcagctgtaaggcaagagcaggactaggactgagaaaatcttctgagctgaagacccacgcagctctaaggagtcatagtcaagaacagcagacataacagcaaatacgaatttaagaaatgccagtctaaaagcacataagaaccaatctacaggttatgggaaacccattttatctgactcccttctctcccgctcctgggttcttatttttctgcttttcttgggctctgattgtcagcatcctctctcctcacccctcccactctttctttgtggagggactgttccctctccactcccattgggcttttttcttagtcctcccctcctcctccagccctcagtctcggatgtctctgcgcacctgccgattccgcattacaaaattccaagaaccggtcttagaaaaaccatctcttctctgaggtaggaaacacatgaagctgaactaggcagcacacactttgtgtgtgtcctagaccaatacacacacacacacacacacacacacacacacacacacacacagagccaagcacttctggcagcaaaagccttaaaccctgtgcatgaattactgtgtccaagcattggttccttccggtgggttcttgatgtcgctgacttttaagaacgaagccccctaccctcatggtgagtgttacagttcttaaacatggtgtgtcaagagtttgtaccaccacatgctcagatgtgtccaaagtttcttccttctgctgggttcgtcgtctcactgacttcaggagcgatgccacaaaccttcacagtgagtgttaacgctcttaaaggtggcgcctacggagtcgttcattctggtggactcgtggtctcaccggcttcaagagcaaagccagctgcagaccttccaagggaatgttacagctcttaacgtattgtggacccacaaagcgagcaacagcaaaatctattgcaaatagcgaaaaatcaaagcttccacactgtggaaactaacccaacccacttgctgctgctggctcgggttgccaacttttattcccttatttggccccacccacatcctgctgattgttccatgttacagagagctgattggtccattttacagaaagctgattggtctgttttacagagtgctgattggtccgtttttacagcatgctgattggtgcgtttataaacctttagctagacacagactgctgattggtgcatttacaatcctttagctagacagaaaagttctccaagtcccgactgactcagaagcccagccggcttcacctatcaatatgactgcagtgcctatagctgaattcactggttagggagtgtacaatggaattttgtcccttgaattggggatgtttgaagatggaggctatttcactccttcctcctgccttgctaaagaatgactgggatcattactgaactcagttctcatttgctttcttaaaatttgatgtccacaaaacctggagtttatttacttctcccttccctccttttttcatttttctgtcataccatttgttaataccagattagagaaggggagcatgtcaaggaattcctttatgacttcctctctgaggatgaagtcttggtcagtcttgactggacatggtcaggatggatcctgggagtgggactgggctccacggtgtgtgtactctccagggcagttatcctgctggggctgggccagccctcctgccctagcagcccccatctttctctgccccaccctgtctcctaggtgtgctgggattgctgtgtggggagggagtacggccagcctgcctgggcccacaccttcaaggaaatgaaaaataatttctccttgcaagaggttaggggagcttcccaggcttgtctgttgctatttctgtcagtgaagaagcagtttcgaggtccccaggcggctgggaggaaaggaagtgtgccccaggcccacctagggggaggtctacaggagaaaggctctctttgtcattgctggagggtaacagcgagtttgcagttggtgataatgattcatttcctcagttgaggtttgggaggattatagctggaatttgaaaagtcgtttctatatctggcaacgaaggaactctgagtgatcagcatgtactgtttggtgttttgccatcattggtaatatcactgtcttagtcagctcgggctgctgtaacagaacactgtagactggggggctcacaaacaacagacatccacttcccacagttctggaggctggaaggccacgatcgggggccagctggcttgggttccggtgagggccctcttccggctgcagatggttgccttctgattgtatcctcacgaggtggaaagagagccagagagctctcttggtctctgtcacaagggcattaatcccattcatgagatctccaccctgatgacttaatcacccccccaaaggcccatcttctaaaaccatcacatggaggattaggatttgaacatatgaatttcatgagaatgcaaacattcagtcaatagccatcaccaacaacactaaaatgtaaattggaggcgtcatgtgaaaaaagaaatgatctaaatgaaactccatgctatcataacggagttctgcagccaccaatgtatgtcctctggttgagtgtacaggcggtatatgtatatgttaagtgtatatatatcttatgattgttctgagtattcatgatttaaagtacataatcaagcaatgagcagtgttcacatccccagctgattagagccagcgtgtttctctaatcattctccactggctggttgtggaggcagaatgttatcaggatgccctgatagatcagcaatgtcctctcctgctttgtttcaggaaggggcgaacgtttgtttacggatctgacagcataaaaagtgaacctgctgagaatggagtccatgcactcaaagtcacttcacctccactggtgttgaaggatccccgtggctcatggtccacaagccagagagcttattgctagtgcaaatgcttacccagttccttccactgggatggacagttccagttcctaactcagcccagaggagcacagctcttttgtttctagtatcttctagtgtagaggagctgttgttgaggataggtccgtggaggtgatcgcctcccttagctcctgcacagtaagcagatgctgaggcggtcttgaacattagagcataaggcaccgggatgtgtccccagggctgtgctgcccttgagtgccttcctggtctgtaaagttgcatggcatgcaggaagagagagaggtctggcaactggcagcacaccatgactgagtggacctgactctccaggcaccttgagggtgcagagccaccacttcactctcacagagctacaccattatggggtatctttgcaggacataggagacaatctgaagtgttcagaaactccaatgccctgaaaacactatcaggggatgaattataatgtaacatactaataatactaaaaaggcaaagggaggtaaggttttaagagattcactatgaactttgacctcaagtctatggaatcctcttttagctcatacctcattgtagatttttttaaaaactgcagtgaattatgtttttttctattaaaattgcctataagttgacagtgagtttatcagaagtctgtcttttcccattttgacaaggtctagtgacaactggtaagaacttagaagtatagtcagcaccagctactttcaactaactacaggagggataactctgcattgctgttggttgatacataagctgagacatgaatgatattcactgcataactggcaatgtggacactaatgggacccttcccacaggtcatgcccgctgttgagtgcactgtatagatgatcacatttattccccagtgcaactcatgggacagggattatcatccctatattcagggaggaaattgagactcaagagaggctcaagtagcagaaccaggcttggatccagagactctgaccccaaagccgtgacttatggtggggagctctgtttcttcccagaggttctagtgagcagcctgaggtagtgatttcctcctatggtgactgagagctcctactttatggcatcagatcagggagggactccagcttgatctggcagctgcagctgtagacattattcctgccctcgtgaaacataaagacttgttagtctaatggtagagatacgacatcagtgtaacataatagatacttattaatcagttgctgttattccaaacacaacattgctttgttatactatatgtagtcgcttcttctgtatgtctataaatcaaatatatttccttgcatcctgagaggtaacaacctagataaatactttatttatttataatccatccacctattcatctatccaacacatatttggtgattttgattacattccaggtgcctttgctaaggatggaaggacatacaaagatgtgaaaatccaggcacaggctcttcctccgaggtggctcagtctagcagggggagaccctctctgtacataactctgaggaaagtgcgctggaagagcaggggtttagcagagaatgtgttctcacggcagggggtcacagaagtattgatgagtgagcaggacttggaaagggcagatgggctggtagtaaggacattgcagatgagcaaagggacactcctggggagtcttgagtgtgggggggacttgaggatgttcatggaggggaaaagctgggcaaggctgaagagtagggcagggcagggcacggagggcttggcccctggattggcagctaagactgaattcagtaggcagtggggccatcaaagcttcgagagctggggaaagccatgacatgggtttagtgggaaacacatattacttaaagtcaggcagatcctggctggaatcctggctccatctttttagctgtgtctgcttggtcagttgctctcagcctgagttcccatgtcagtcacctgaaggaaatgggcctgctttgtggtctcatttagaggtcttgctcaatcatgtgtgtagagtgcccatggggcctggccagtgagtcctccgaggcacctcaggctgaaccacgggtggcaatagaaatggtatgaaaagatggacagctctcagagacaaggaagaatgactagaactcggaacctgacaggaggtgtccttgtccggtgagggggctgcagagtgagatgtgaccattctgggctaccttcccggcagttccctgcccaggcatgtggtcgctgtggggccctgagcctgggacagtccttttttggggtcaggcttttctttgggttattcctttcaagccatagtaaaacctagtagtctctgttttcacacaagtttctgacatctgatgccagatttacaacctgaagtggccaaagattttaggttttccttggggcttaaatcaatggtgttgcttggcttcctcctgtgcagtaggttggccaagaaaaccaccctttgttctgtcttgaagggaaggcatgctgctgtgtggctcttgacatttaccttatcccggagctgagctttgtctatggctgtgcaggtggggcgggaatgggaaagacagtcctctggcacgctttccacatttggatggaagacccagcttcagcttcaaacacttttattcctgatggcattgtttacaaacatgctagaaaaacagaattagggaacaaaattatctcatgattgctgaactatgatgagattgatgcttttaagcacttcccctagggaaaccaggcaggaatctttcaaggggaaaatgtatcataagggaagacaattaaaagttaaaactggctaatgaaactgataaagggagaattgttttaattatcgatgctcgtcttaaataaattgtatgatttcccagaataacacatccatcatcatcaagtatgaggacatgacccgatcctggggtctcacaaggggcttttgggtgtctctgagaggaccatgatgaagactcaatgacattcatgcttctgaaccctgaatccacttcaagatgccatgtaaatgctgtgcatcttcaccagcagatgtcactgtttacatataaaatgcaaacagcccccaaagcttccccccacccccacctttattctaaagcaacacacacttgtccatgttttttcataaagccttatttatcatgtggtcatttttgttctggaaaataatgatattgtttatccctttaaatagctgtacatgtaaagggaactggtttatgagagatacccatttcacatactaagctatgcaatgacacctcttttaaaagataattgttgaacacttactatttgcctgaaaccagcttcccatgatgaaaggtatccaaaaacagctaaagagctgtccttctttaagggtcttaaaacctcttttgagagatgacaaataataaagcaacttacaatgttggaagttaaatactaaaactaaaaatgagtgtcatattgtttcagggagatgaaggtctgtgggggctggagcagatggaaggctttagggaaggaagccccaagataatgagggtgaattcatctggttgagagtggaaaggtactgtgggtttttggttttttttgtttgtttgttttgctttatgtgttttggggtacttttgctgagagaataaagagcaattatgtttggaggatctatttgttggagtcatgaagagcaaaatggaggaggacaatgttattacaaaatccagctgcgagaacagcgactcctgcaatggtaactagaaataagatcagattgggaggcataaggaaggaagacaagaccgccatgccagcttattgacaggtacagtcactatgtcttcttgtcttctcagtccaaaatcaaaatacaagcattgacacatggtcagacactaaaacagaaggtttgaaatcagggctgtttccagaaactccaggacatatggatgctgcaaatatacggaggagagagtgactctcatgaacatgtagggtatcaatggtgctgccactgagagaaatggaagacctggggaggaaggttggcttggacagaaagatgtttttagtctgatccatgtggttgaaactgatgtgggccacagcatgatctagcaaggctggaagctattcaggagccactgacctagaagtggaaacgacaatagggaggggagagagaagggccagggtgtagtcgtcaaggtttgtgttttaaggagccagctcattttattaaattgcatacatcaataagtaatatccaggaaagaagagaactagaaacctctccctggtgtggtgtactattaagcatgcaagtttctgctgactttgcatcctctctgccttcacatcatgggaattcgtgaccagaagccttcagcctgcacccctccacccatcccagggtttcaccataattactcgggactctcaaacatctgtgcatcaatcagctgcccatcatacttgctcaccccttccagtctctgggaaagcaacttattatccaatgtggaaggtcttgttcttgataaggttcactttttgaatcctatgagggagggagggaaacgtggctggaagttcaaagcagccagagccatttccaaaacacattctccttcattttccgctgactcactgtgggatcttgacaaactcctaactagagctgtgccttagtttgctcaactatagaatcggaaaaatgacgcattcttcttagagttacctctcagattgtgcttctgatgcatgtcaagcccagtgggggcacaccgttagtaatgagacatcttagcaccaatatgtgcttttcacattgggcaggtgtcaggagaggcctggggtcataggaccagactgcaaacaacacaatcccagaataaatcctattaatttggcataattgatgaaaatgaagattagatatttgaccagagatgagaaattcatgggcatgaatgctgcagctctgattactttgcatgtgaatgtgtggtaagaggcaacatttcttttgtttaaaaccctgtgcacctaattcacattcagagaaaggttgtagaatcattcaggctcattgaaaacaaggaaccaggatgccagcaaggccaatgttgttgtgagaatgttgagctattaattataaaatagcaaaacagggtgattttatttatagcaaactgttgctaggcagataataaagacccctttcagagcttgcatttatatatacatatatatatatatatatatatgtatttttttctcacaaaaaagtgctagcttgtgtaatgatttttcagatgaaatgaaagcaggacgaggctgtcagccctgaatacttgtgacttttagactaaagtccttggcatcagccagcactgcaggatggagcaggtgaggttcagcaaccctgtgaagggaggctagggtattacccgcaccctttaacagcagactgagtatataaactctcactagactggaagtgagtgagcagccccaggaaagcccagatgagctattgtgccttccttggcttccctaccttctgttgtgccaggaagggtcggggagcctgtctgtggccttactcagtcagatatcccttccctggcccctctagagatggttgctacctccttttaggaagtgtgtgggaaggggccaatttgcaaaggttcacttgtgctcagtccctgctaagatgatcaagctcttttcaaaactcaggggttgggcttttgcagtttctggatagaagaggcccttaaatatttgtggaattcatgaatgacttcatgcatgcatttggtcctgtattttggtccaagtagaagatatggtaggtagaaaaataccacctcccccgacaaagacatttctatcccaatccctggaacctgtacatgctacttgatttggaaaaagggtctttatagatgtgattaagttaaggatcttgagatggggagatcatgccgcattatctggtagatcctaaatgcaatcacatgtatccctttaagaaagaaacagacatttaactacatacagaagaggagaaggtgatgtaaaggtagaggcagagtgctatagactgaatgtttgtgcacccttccccacccacccaaccctgcaaattcatatattgaaacctaaccctaatgtgatggttttaggaggtggggcttttgggaagtgattaggttatgagggcagggtcctcatgaatgggattagtgcctttttcaacaggccccagaaagcgcccttgccccttccaccatgtgaggatgaccatctatgaactaggaaacaggccctcaccagagactgaatctgctggcatttttgatctaggacttctcagcctccagactgtgagaaataaatttctgttgtttattagctactcagtctgtggtattttcttatagcagcccaaacacactaagacacagagattggagtggtgcagccaagagccacaattgccaaaggtgccagcgacttgaagagccaaggcatggattctcccctctggagggagtatggcctgtggacaccttggttttagcccagggaagttgattgtatacttctggcctccagaactttgaagaatagcttttggtgttgtaaggcaccaatgtgtggtagtttgtagagcaaccacaggaaacaaatacagaaaacaaccatttcctcctgaatcaaactccaaacaaccaaattccaccttggtcatcaaatttcagaataagtagcatgagacatttttgtcccacacaggtattactggggcgatgttatgaaggtgacgggaattttttaaaatagtttttaaaattatgaaagtgaaatgcagtcatggtagaacaaagaagccaaatagtatgacaaagtctaaaattcagtgtgccctccactcctgattcccggaggtcagtcctctgtttctgtgtactcttctttcaattatgatgaatacaaatatacttatatctccttatttttatacaaactgaatcattcattcacaccacacagcacattttttgttcatttaaaagtgtattttgggagatctttcggtatttgtatatagataattcctaattatttttcaacaattgtatggacatatcataatttaatctgtctaaactgattacttattaaggaaaatgagatatgcttttgctttgacaaggacactatgcctttaaactgcacttgtaagataataaaatacttttatttccctaagtcacagcaaactattgtcattgctcttaacaggcagcatgattcatgaagaggcttgggttctgcccaggaaccctaagattgtgggagaagtctgggatcttctgagtgataatattcatctgtgtcaaatgcaaactattgggcacagcccaggaaaagagaaggctctgaaacaaattggctgaatgaagaaatcaatcaacacactgctattgtgtttatctgggaccttactcgagatctcagtgctagtaagtggctgatccaggatgttgaccctggccagctgacacccaagcccgtccacactcttagctaatcaaggcaaatactttggctatccatggctgcattgcaagccaccccgaaactcagcagctaatacagcaacaatcatttatttgctcatgattctgccatttgggcagtgcttggtgagaaccacccatcttcactccatgtagtgtctgcctgcactggaatgtccaagacagatcattttactcatgtgtctggtgcttctgctgggtgggtggaacacaggggctgatctggcatttcagtctccatgtggcctccccatgtgaccaacatgggctttcttacagtatggtggtcttaggctattggctttcttccatagcagctgacttctcccagatcacaaaagcagaagttgcattctttcttaatttccaaacttggaaatttaaggacatcacttctgctgccttgattggttaaagcaatcaaaaggtcaggtcagattcaaggggagaggaaacaaacaacactgcctcttgtggagggagagtcaagaccattgcaaaagagcctgtgggatgggagatatcgtggaaatctttggaaacacactccacaaccgacaattaaatgtgaacattagaaagctattgtaggagaagaaagaagagtcacaaaggggaaggagtttgtaagactgacagattacttccagcctgcagaatgaaaaccagggatcatggaggacatgcttgaattggcattggtgggtaggtagaagtagacatttgcatgtgagaagaaagtggcttcaggagcacagtgtaagcaaaggcctgaggtgggaaggtggggtgtgtgtatgtgtgtgtgtgtgttttcatcaaaagatctagcaagaagagggttgaagacctgtggggtgatctatttctaagcaaaaggtcatatgtagcatagaggtggctggtgatactggctttctttggttcctagggtactgcaaatagggtggagatgaagacaagttctcgccctctggctacactggcacgtgggaacagccttctcttggaggactgttgccagacagaggtatgtgggcacctaggcattgccattgacctcaagatgagagtggagtgggtcattatcgctgctcccaccctggagctgagccccctcctgagcccttgttgcggcgcctgtgaggcgggcccagctgcaaatggcagccgcgaggtaattgtgggaaaaatatgctaattagcagatgcccacgattaacttgcctttcctgttgcctgtcaaacccaagctgcctttgttggaaaagataattaaattggaatcagatgtctgcagtaaatattttattcagagccgtagatgacaatagaggaagttgactctcagtccaccttcaaattcccacctttgtcaaagctcagggcctgagcttggagtctactcagtgagcttcttgttaaacaatcaagggacaccactgggtgcttattagcttattaatgctagcatgttgtcaaaatgcatctttgttcctgtaagagtggacgaaacctgtcttggaatgtgtggaatccagatcgactaggtactctagccagcatcctccctgtgtgccttcctcatgcaccccgtttgcttcctgtgtatccggtccctccgaggggatccgaggggaccaagggttctgctcccctccctcactgaggctttccccatgtgccatcgtggtactggagctcggtgcctgcacacaattttctgcctctcgtggatggctctgccctgctccagcaggtgacagtcatgatggtgactttggcgcggtgaatgcccaggaagcttgttagatttcttttcttcatgtgatgcgtcagctctgatacatcttataggatgggaaagtaaagagtgcttagggggcaagtggctctttcttttgagtacaaatggtagttttccttaaggactttatatgaggaaaagatctgtgaggagaaaccagtatgccctgtcctaccttcctcctcatactccaagccctccgtcatcctcacagtatcgttgctctccctccatgcctgggaccctggaaggacgagtaactggcctagcctcttgtttgttagcaatggagaaaggaagccaaagagtgaaacacatgtgggagacccaacctaggagacacaggatcaagacatggctccttgtaattaggtacatcaaactgaaaatcttctgcatggcaagggaaacaagagtgtaaaggcaacctacagaataggagaaaatatttgcaaaccatatacctgacaagcagttaatttccaaaatatctaaggaactcctaagactcaatagcaagaaaacaaatcatctggttaaaatatgggcagaggacttaaatagacatttcttagttttgcctctctccgcagagaaagactttctaaaaaacaaaaaactcaaaaaacaacaacaaaaaaaccctcagtggggtgaatctgctgaagaagcagggagacctggccagaagctgccttggggtgacataagggagctgtgatgccctgctggcctgggacagcacatgtgtgcactgtgacacggggaaacttcaggagcagggcctgggagatggcactcagcacggcgagggagttgtgccttaggatggcctggatagggcagtttgcctgtgaatggggagggtgatgggagtcactggcttgctacaggttgcacgttctgcctgtgaggtcatgcaggagggtggagagccatccacgacatgccagtcaatgggaaaaataccgtctcagtagtacttttgaattgtttgagtacttgcttaaggtgagcaaggaccttaaccttgaccaaactttagtgaggctccttagtgccgtccccccaaccccgtttttttttttttttattttaccttatccttggtcctgtctttggtttgcctagcccagtgctgacaagaaaccctgttgtctgtttaacaagagtccctgtacccttgatgcctaatcaagttcctggtgtgaattttccatttgttccttccctctgctgattatccccacctgtccctgttgtatgcagtcgatgagttcaagctctctcccattgacaatagacttaaatgaagtcttcctttctgttttaaaaagtgtcagaataacttctcttttacatggcctagggcctaacactctagaagccccattagtgtaattcctttctcccttcaaccgcatttatccatttcccctctgccccctacccttcctcacctccaggtgcagttgaaagccatgctccattaagtggagagagatttgaccagagcctgagtagggaatatctctgtgtgccttttttgtccatcttagaggcatctgattgtaacacaagctggaagggttttatggggtgatctcttcttccttgaacatggttcactcttcaatatcaagaactctgtgcaatctcttgaaataattaaaatagagtggatggttaggtgatgttgctgcctgccaaccttctgaatgaggacctggcgttcagaaactagctcaaatgtgtcactcttggtattttttctttgaaattccccaacattgtttgagtccacccttcacatttaatgtattaagaccttatacattgtaagacatagcgagttattggataagaaattgtgaacacatcactttgacttgtaaggattcatgtcataccccaaatggatgagttgactctcagggattgtaattaatgggcttcaccaacgatacctgctaatggacaaagggtcattcagcacagacaataactttgtcccaagtatgtgttttataaggtggtggctgaactttaagtcagaggtaggaatatcatggacaaaagaaaaatattctctaattttctattctgaaatcgatttccagcatgagaatggcatacagtgcatacagcattcccctgccactgaacgctcatgcccagctgcatttaggttttgaaggaggcctactttgaggttcaggatgtgtaacagccctatgttggcgttactgttaaaaagtgaatccagccccagcttcctgcggatagtttgagtttatgcctttgtctcagcatttttattgatagtgccttgttcaccctcaaagatagtcagttttggctgatttttagatcatagggttaccctagttacagcacgttgatgaagatgttgtacagagtccttttcatgaggacttttctcattttcttaatcctcaagaccaaggatgtttgtactacttcttattaacaattttgtcattatgttggagacaaggagtgattcatataacagatcaaatttctgtttttgcactgagtttgtgggaaactcagaactatctctagtaattctacaggtctaccgtctatgcatttttgtttgtttgtttgtttctgagatggagtttcgcttttgttgcccaggctggagtgcaatggcacgatatctgctcaccacaacttccgcctcccgggttcaagcgattctcctgcctcagcctcctgagtagctgggattacaggcatgtgccaccacacccggctaattttgtatttttagtagagatggagtttctccatgttggttagcctggtctcaaactcccgacctcaggtgatccacccgcctcggcctcccaaagtgctgggattacaggcgtgagccaccacgcccggccccctctgtgcatttttatatgatctcagtctatttgctccaaattcttgactttttgcctatagcattgtttttaatttttcagactgccttgaattgactctggacaagacaattataaaacaattataaaggctaaatttaacattcataggcaaaaatgaaccttagcctaagtcttgtacattatctaaaaacaaattcaaaatggagcatagacataaatctatacaacattttttaaaataggggaaaatgtttgtgatctaaggctaggcaagagttcttagactagacaccaaaagcaagatctattttttaaaaagtttgtaaactgggctttattaagtttgaaaatgttttcttttctacgaaacactttgtgaagaaaatggaaatacaagctacagacttgaaaaaaacattttcaaaccacacatctgacaaagtactcctatctaaaatatagaaagaactctgaactcaacagaaaacaacaagaatcgaatatgaaaatgggaaagagacaaacatttcatcagggagtatattcaaatggcaaatagcctatgaaaggtgttcaacatcattagccattaggaaaatgcaaactaaaaccacagtgaaatattgccacacacttaacagaagggctgttagaaagaaggaaagtgccgcatgctggtgaggatgccgggatgcagcgaccagatcgcttacgttttgctggtggtgatgtgaaatagcacagcctctaaagaaaacatttgggcagtttcttcaaaaaccaaacctgtagctaccatgacactcagctgttacactcctgagcatttaaccaggtgaaatgaaaacatgttctatataaaaacctgtgccccaatgtttacagcagctttatttgtagtagtcaaacaaactgaaaacagctcagatgtccttcaacaggtgaatggttcaacaaactggtacacccctgccatgtaatgctacttctgcagtaagaaagaataaactattgctatgctgaaaagcttagctgaatctccagaaaagtatgtggaccaagaaaggccaatcccaaaaggatacatatcatataatgttatatatgtataatattcttgaaaaattacagaaattgagatgacatgaatgtttgccaggagttaaggagaggtataggtgagaggaaagtgttggttgcaggtaaaggtcaccatgatagaaccttgtggtgatagaaatgttctgtatcttcgctgtattgatgccagtattctggtcgtgatactgcactgtagttttgaggaactgtcatgcttttcttcgtagcagcagcactattttttattctcactagcagtgccgaaatgtcccaatatctccacatcctcaccaacatctgtctttgtttgttttgataattggcatcctaatgggtatgaagtggttgtagtgtagctttgcaaaatgctactaccattgggggaaattggggaaatggtacacaggatctctctgtattatttctgaacaagtttcatgtgagtttataattatctcaaaatctgaaattaattaaaaagtgacatgcttattgccaaaattagacagcaatgaaaaatgtaaagatgaaaataaaaaccactaagaggaggcagcatttggtggctttggaggcaaaaatcttaggtgtgatttcttacatcaccatggtttagcttttttggcctctgttttcttatcaataaaatgggaatgatattagtgtgaagaattgttaagaggtctaacaatttaccatagttgcaaactaacaaattagtctgctgcagtttcacgaatgctaggaagaagacccatgattcctgggccagaacacagcaggatccacagcagcaggtgtcactcagttctctaagccccactttcccccgggaagcacaggagggcaaggcagtgactctaccttcagtgtttgagttatagtagagtagcttagggaactcaaaacattcatatcaggcagttagcttgcctgaccttcgcctggagatatttttattatattggacaataaacccaattgccttatctctgccttacaaggctaaacttcccttgaaaggatggatcgttcccaacaaagaaagttggtccctctgcttgaaaacattgccaaaattcaatagacacatgggaaattgtctaccagccattacatatgtcaagatatttctgtgaggttgtttcttcaggggaggaaagagtaaaggcctcacaggtaaaggcttacacagtgcctggtatatggtgactcctgaataaaatttagtttccatcttttaaaaaatttttacaatcacagacagctcttccagtcagctggtcatgtcatatatctttccacctacactttccatcaaatttcaatgatttctggcctacgtctgaaatgccagtgtctttaaccacttttcctttctttatctccttgttcttcaagaaatcaagaagttccagaaaatagctatagaggatggtaggaagctgccagcttcgtttctcaggataaagttgatgaaattatctgtgattctaacagcttttcagattgtgaaagattcaattccatctacttgggccagtaatagcttttaaaactctatattcctgagttgcttcctagtttatttttgtcctaaatcttattttagaagtatagatttaagtatttttaaaaaatggaatgaataaagaggtgggacttgctcatgagaattcaaagtagaaggtttggtgggaaatgagtttgaagtgaaaacttacctttcatacggtcacatttcaatgtttcattatggctaggggaccacaaaggaaagactggaggatattactagaaactttccctcataacaaatatttctctcccaattcagtcttttcaactctgcataagccgagacttaggaccctggacaggaatctaccaagatctcagttcttagaaaagtctagtgaagatttttaaaatttctgtccaaataaatggtctctgatattcttagtgattcttccaacttaaggtgtaggcaaaagagaaggtgaaataatcttcttcactttctattgagatagaacactccagtacccaatttagtttacttttccctttagaaaacattgtccctttagagttaacagaagcatgacaccgcatgtttctctaaactctaaagggacagtatttccaggtggttataattttcttatgatagaactagtagaaatatggaaggaatgcctgttgttttggaaccaagacattttagaggccacctccattagtagttagttcaaacgagactttttaaaagccctctactgaactttctgcctaaaactgcgtgagctgcgggaggagaagtgaacagccacagtctctacattttagtatcaggtattctaactgacagcaaaagaaacatgtggaattcggtcaggtggacaaaggtaagctagggagacaaaggagggttgcaggcaaggggtgctccagaggtggagagatatcatgggaattaaaaccaccctaaatcaaaaatacataaaaaagaaactggacagctcagagccgactgcaggtaagaagtttcaatgtatccaccatttaataggccaggctcttgatttaaagggatagactccgtttagtggagcatgcatgatttaagagacagccttccaaaagcacaacttctggagggagagtaaaggaaaaagagaaggaaaaagcatcttccagcaatcgggcaatgatgaggaaaagaagtaaaggggaagagttaggttcttccagacagaagcaccacaaaccctccaccatcgctgaaacaaagaagcaaagaaacaaaaacaaaagccctattataaattacctgaactttgctagacagaagaatgtaccattaaaccaggaatcatttaaagcacctcaatatcattgaaatgaacaagaaaaaaattaaatccatagagaacttgatttgcagaaagtcacgaaatgaacttttacacaaatttgtcctcaaaaaataatcataaagaagaagaaaactggaaatctacatttcaaacagaattgtgtgtactcaaatattttacgatatgataaaacacattggaatagaaactcaaaaactagaaacagaaatggacaataaacaaggagaaagtttttaaaagttgattgaattcagaaggaaatggaagaaaaagacaaaattatctcagaaataaaaattaaattacagaatgcccaaaggagaatagcgtcaaatgcagattttagtaaagagcatcagagaaaggcaggaagacacccagcagaatgaaattggcataaagagagccagccacagtggctcacacctgtaatcccagcactttgggaggctgaggtgggtggatcatttgaggtcaggagttcaagaccagcctggccaacatggtgaaaccccatctctacaaaaatacaaaaattagcggagcatggtggcaggagcctgtaatcccagctactcaggaggctgaggtgggagaatcacttgaacccaggaggtggaggttgcaatgagctgagatcatgccactgcactccagcctggcatggaagtgccgggaaagtgccaagaggaaagaaggaaggaaggaaggagggaaggaaggaaggaaggaagaagtgggagaaaaagtaggggaaatggaagataggctaagaaggaataatatttctattattgaagtccctgaagaagaaaaccatgtcaacatagcagaactaatatttaaaattgcaatccaagaaatgtttcccaaattagaaaaagacctgaatctacatattgaaaggactgactggctacctgggaaaattaaccaagaatgatcaactctgagaaaatattcagattatgcatctgacaaagaactagtgtccagaatctacgaggaactcgaacaaatcagcaaaaaaaaaaatcccatcaaaaagtgggcaaaggacgtgaatagacgtttctcaaaagaagatatacaaacagccaacaaacatatgaaataatacacaacaacactaattattagggaaatgcaaattaaaaccacaatgaataccaccttactccttcaagaatggccataattaaaaaggcaaaaaagcagaacaattcacaattgcaaggatatgggaccaatttaagtgctcactgatcaatgagtggataaagaaaatgtggtatatatacaccatggaatacaactcagccataaaaaggaacaaaataatgtcttttgcagcaacttggatggagctagaggccattgttctaaatgaagaaactcaggaatggaaaaccaaatacagtatgtacttacttataagtgggagctaagctatgaggatgcaaaaacatacagagcaatataatggactgtgggaaatccaaggtgggaggaggtaggaaagagggtgaagcataaaaaacagcattgggtacagtgtacactgctcgggtgacaggtgaactaaaatttcagaattcaccactaaagaactcatccatgtaaccaaaaaccacctgtacccaaaaaactattgaaaataataatagtgaaaaaataaataaaatatttatccataaaaattactaacattcttttttgtgacctaagccatagaataagataaatattcatgagtccatgccattatatatggacaaataaataaatcggagagaagaggcagctcttcctcacagtagaatttccaaataattaatgtagacagaagaagggaaatagagaatcactgttaggcaaacaccataaaattaaatgtatgcaagaaccaccaataaatgctaaaattagtcaatagaattaaatgtatacaagatccactaatatatgctaaatttagtcgcataagttgagaagaaactttgaggatctgtatagtctcaaagtatctccctcaatacacttaacaattataaaacgaaagatagtaactttacagtggaaaaaaatagcaggcaccaactcaaccaagtgattaaggtaaaccagaaagaactgaggaacggttacagactataatagaacagatgaaatagcaaataaatacagtgtgggatcctggatagaattccggaacaaaaatacaaagtcaaaaaattttaaaacacatgaaaagatgctcaaaataattggtcattaggaattgcagatgaaaccacaataagatataattaagtacatgttagactggattaaaaatactgacaacaccaaatgctggtgaggatacggtaccacagtaacctgctggtgagaatgcaaaatggtatagtctggaaaacagtttggaattttcttaaaaatttaaacacatgcaacatcaagagtatacccttatgtgaattatggactttgggtgactgtgacatgtcaatggaggttcatcaattgtaacaaatgtgctgctctggtaggggatgttgatgatgggggaggctgtgcatggttggggcaggggctctataggatctctgtacattgtactcaattttgctgtgaacctgaaactgctctgaaaaataaagtccaataaatgttttaagttaaacatacacttatgaccccagaaatcctacctctagatatttatcttagagaaataaaaagttgtgtttatagaaaaatttgtttgtggatatttatagctatcttatccataattaccccaaactggaagcaatttaaatgtctttcagtgtgtggccgactaaacaaactgtggtacatccagacaatggaatattattcaccaataaaaaaggagtgaactcctgatattttgaataacacagatgaatcttaaaatgccttatgctaactaaaaaggcagtttcaaaatgctgcaaactatactattctatttatatgatgttgagaaagggaaaaatacagaaatagagaatagattagtggtttcaggggttagaggtaagatgagggtttaaatattgaggatcagtgcaaggagaatcttcaaggtattcgaatttttctgtatctcagcaggggtggtggctcacacctgtaatcccagcattttgggaggctggggcgggcagatcacttgaggtcaggagttcaagaccagcctggccaacatggtgaaacccccatctctacttataaaaattagctgggtgtggtggtaggtgcctgtaatcccagctactcgggaggctgaggcaggagaatcacttgaacccgggaggcagaggttgcagtgagcccacaacttgggcaacagagcaagactctatctcaaaaaaaaaaaaaaaaaagaatttaaaaaatatcttcagtggtagctacaatcatctatgcacttttagaaactcgttgacctggaacccctaaacgtggattttattgtgtgtaaacttaaaaggctaaaataaatcaccccagtagacccaggccaacttcagttctttatttcccatgattcagtcattcctatcccacctgtgtgactgccgggcctgtgtgccacacaatgcccacccattattacttaattatttcatttaaatcattgaatttctttcaaaaaggagtatatactacctttgaattcactggattgatgtgctagctatattttttcaacaaattgtaatatacatatatagctatttaaacagacaacatatgaccagaaaatatgttaggaaaaagtaatagatcattggctcttgacaggatccttaaagataatctggtctaattcagtcatttttcaaatgatgtgtgtgagggctgtgccgtcttggccaagcagtgctatcggaagctgcttctccatgactcagaggcaacattgcttctgcctggacccagcacttcctgaggctggagagcactcctggctcactcctgattacctactgacagctcagtgcctggcactgagtaagtgctcaaaaagtacttcctttgtggaattagatgtgggaaaggcaccggagtgtctttacggagaaggaagtgcattcactgtgggggttcccatggctccttggagtttcagttttgatcctacgtcgactaggttgggagtaactcatcgtcgtttttgtcctttttaagtaggactgttacaggtctgctcaccactacatacatggaaaattgatacaggagattgttaagtggttctagctctggcggaaatatggaaaagaatgtttgttcagaaaaatttaaaaatcaagagaaattaaaaaatgtctttgtaccccccctttatatgttaaatcattttgtccatttaaatgtacttcctttttaaaaagtcttcctctttagaaagtgctgattttccaggaaaataagctaaccgtccatttctaattaaaacattcagtagaactgtaccgtagcttggtgtgtgcatggctgggtgtgaagaattagtataataataactgaacccatatgcaactgccctgatggccatgtaatatgaaagatgtatcctaccacacagcaatacctggggtgcaggttttttctgctgcaggctaaaggccaatgtctacctatcgacccagaaggctggcagtgttttggctgaagtctcactcagcatattcctcctttgagtggtaacttccttcctttatttgaaaatgtataatttaatacctcatattgctatagcatttttatgcagggtggatccaagttttgggaagcctaaagctcctacagtttttgtgatcctcattaacaaaagaatagatgactacaaatacaaaattaagtacaatggagaatatattttagaatgagaaaacaaatctcaacaaattacaaatgtttagaagctgaaaaaaatcacaaaatccaggaaagctacatcatatttttattaactccctgtcacatttcatcatacttctttcttgcattttttgtctatgtactctttgatcaattttgtagtgccatttgcatagagaggttagaaagatccttcagtctttcttctgatagattttcatttttatttattattggtacttgggatgcataaaacatgcaactctatatagagatataccccctatttgcagtattgattggaagaagcctacacatataagaattctgatcaatactattttgtgcaattcttatcaaaaaggaaaaaccaaaccacctggtttatgatcctcaccgcgtgtgtttctaagagacagagacattttgttttgactgttgcctgtggtgattgactcctgggctcacgattctcaagtctgatgatgattaggcctgaacatctcactgcccacacatttctgttgccatgattcatggcttagaggagggtagaggattcctgctggcagaactggtttcaaaatcactcagtaaatccagccttggtgctttacatttcagtttaggttataggggtgtttggcatctattccattttctttagctgaaactatgacaaaagcataacccttgaacaccctattacaaaaacttgtggaaccatgtatcttcatctatttttcttttaatgcaatcaagattatatcaagtattgcaggccttgcacccctgagctgcacccctgaaacaaaagcccctagagagcaccctgatttgcccctggcctcgctgatgtttttgttgtcactgctttggactgtggcccccctgttgtcattggatttccatctgcttctaatctcgcaccaccttcgtggtgacaccctttcccaacaggtatgaagaggtttcctgcatcacacaacttactggatttcaggttttctttgcaatcgcacaagttgaaatatttggatggtggtgacagtggaggtgatagtatcagtggttgagaggttggtgaaggtggtatttgaggtggtggtggtggtaggggtcgtggaggtggacactgtggaggtggaggtggtggagttggtggagggacagggtgggtggaggtggtggagtcagtggaggggcagtgatggcggaggtggtggagtcagtggaaggacagtgatgctggaggtggtggagtcggtggaaggacagtgatggtggaggtggtggagtcggtggagggacagtgatggtggaggtggtggagtcggtggatggacagtgatggtggaggtggtggagtcggtggagggacagtgatggcggaggtggtggagtcggtggagggacagtgatggcggaggtggtggagtcggtggagggacagtgatggtggaggtggtggagtcggtggagggacagtgagggtggaggtggtggagtcggtggagggacagtgatggcggaggtggtggagttggtggagggacagtgatggtggaggtggtggagttggtggagggacagtgcgggtggagtcgttgggtgaccagcaggggtagtggtgtgggtggtggaggtgaaacctgtaaggctgtgccagagcaaacccaaggccctcatctgcatcctctgtgctccagagtatggactttcacagaccacagcctccactgaagacgagctcccagggaaaacaactctgagcagaaaacacaaaagggagtttgcatcccaaggcccagactgaagctctaaaagagaccttggaaagagaggagagagatcatctagagaaacctcccaaaaataaggcataccatccctctgatggttgaaacacacttagttctgggcagaataaatgaaaacaaattcatacctcgatatattgcagtgaattttctgaacttcaaaaacaatgagaaaatcttaaaagtcactgagataaatgacagattgaggaaaggaagcaggcgggcagctggtggtcttccaagcactatagctgatcagcaaccagagattccagagaaacatggaatgataccttaaagtgctgaggctaactaactgctgagcacaaaggatattttttcaggcacacacagggattctgaaagtgtaaacacgagtcccaggccctcatttgaatattaaaaaaaaactaaagcttgatcttcaggaaaaatggaaacgaattcaaaagcagagactgggatacagaaaacaatgaagaaagaagtccgtgaacatgttgacaaatccaaattagtatttcttataaataataacattgataactgatctagatgggtttttaaaaggcagtgaaactaaaagattagaaaacaataaatacagaagataagaatttacaaggatctaagtctgagagtctcatattctacagggccagaacaaagtgatctatcagatttcaaccatgttaaagaatcatgttgaacacttaagaataacttcttaaagaatataagtagaatgtataacttccaaaccagttggaatagtatgggaacaaagaaaacttttcaatgaattagaaatcaggaaaggaggagggaaaggaagcaaagaaaatgaatggtaaagaaaacatatcaatgagatggtagaaatcacttcaggtggactgggaaaagtggcagctcctatgcctgtggcaaggccaggtgtggggttggacacctctcttctacagcacctcttccaaaaatttatttatttattttttaatttttatatatttagggagtacaagtgcatatattgtgtcatggtgaagtctgggtttttagtgtacccattacccaaatagtaaacattgtaaaaaataggtaattttcaaccctctgccacctcccaccctcccacctttcggagtctccagtgcctgttattccactctgtatgtccatgtgtacccattctttagctcccacttataagtgagaatatgcagtatttcactttctgttttgagttatttcacttaggataatggcctccagttccatctgtgttgccgcaatagacatgatttcattctttttcatggctgcatagtattccatggtgtatatgtgacacaattttctttatctagtcctctgttgacggacacttaggttgagtccatgactttgccattgtgaataatgctgtgataatcatacaagtgcaggtatctttttgatataataatttctcaccctttggctagatacccagtagtggggttgctagatcaaatggtagttccatttttagttctttgagaaaacttcctactgttttccataaagctgtactaatttacattcccaccaatagtatataagcattccctttcctccacatcctctccaatacctgttgtttttacactttttaataatagtcattctgactggtgtaagatggtatctcattgtggttttaatttgcatttttctgatgattagtgatgttgagccttttttcatatgcttgttggccatttgtatgtcttcttttgaaaaatatctattcatgtcctttgcccacttttttttttctttttagagatagggtctccttctgttacccaggcagggtgcagtggcatgatcatagctcactgcagcctcgaactcctgggctcaagcgatccttccacctcagcctctcaagtagctgggactacaggcatgtgccaccacacctggcttattttaaaaatttttgtagagataggatctctttgggttcagcattacagggtgatctgggaacttcacaggctggcagaggcagggacatggaagttagcagagtcattggtcttcccatgctggattcgatgcctgcttccactcaacacaactcatcctttctctgagctcttgtcttcatttttaagccagtacattgcacctttgttgcacctttgcagtcccctcaaggtctggtacattgttgggttcagggtcagcttggatggaataatccagcaggtgtgacctgagagtatggtacatgttttcaatttttcagaggaagcaagctacacacaataccaatttattttctgttctccacttatctgtgttgcaggtgcttcctcatgggttgtaccacccctgaagtttcagaaataaatgtatacccttccagttaaatgtggatgaaaagcaaaggatgatagggtctctggtgcttgtgacaaaaatgaattcttttctgctcccattttcaggtggttatagaatttaaaattggccccttaaaacacatgaactctataaaccagatgtggcacaacctactcctattttaggaagctatttgaaacctattccatcaaagggagcaaaacagcttgatggataaaccttctgctttctcccagggcacatttcatcttacccatttgttttcttcttttgaaaagagagtcaaagagaaggcaggaataagcacctctccacctgaccttttcttgctttgcaaaaagatgattcttgctggcctggggttagaagaaaagaaaccagcagtcctttaatagaaataggctaggctcctggggagaacttgggctgaatttaaagagacagccttgacaaccctcctcagtgggttctgagtgatcctggactggccaagttaggaagtgactacgggtgcacagtatttgggagacttggtgtttgtgccctgtcagctcccctcggcgtttccatgggagctccactggcctttcccaagctcctgctggacaagaagcacttcgccagtggctgaggtccagtacattgttgggtacatggtcagcttagatgggtgcaataatgaagccggcatgacctgagcacatggcacacgttttccatctttcacaggtcaaaagctacacacaatgtaaacgtgctgtctgttatcactaatctctcttcacagcttgttcctcttgagtttttccctcttcaatcttaaatgtctttcttgcaggtcctcttctctttctgtattaatcatattttttttttacttttttccataagcaatgccattatactcttgatatttttgtgcacttgagtgtggtgaccgttttctgagctcctacttggtgccttgcacagctgggaggctcctttggaacgcatgcctggggcacctcccgagtccgcgttttcacaagatcattttcaatctgcaggtgctctgctcacacttgaattttcctccaggaaagaaatcctccagatgtaaaatctttggctgctgcacatgaagctaccactggttttccttcatctttatttttaaaaggaggttgagattcctgaacttggttcttttggatttgtggtcttgcttcttgctcttaggaaagagctggcagtaggtattttgctcacatattggccagttagttctccatcctctgcattatgcccctaatttccctaaggtaatcatgccattagccacaacactgccaacaaaaaacaatgccaagccattagatagagagggtgagcaggaagcacctcatgacagggctgtggaagcttcccttgcctctatcccctgcagaaaacagtgttgacatatttaagaagctggctctgcattaaaaagcatgtctgctgagttcagtctgcaataacctcttctcttttttacaacctattgcttagtctgaacatgcagtgtatattaaagaggacttttttcttttcctttaggactagagtgctttaaagagaattcaccagctccattgttggcaagaaaagcacgttcttttatatgtaggtcccagatgatacaatcccaattctcttttgaacaccaaaaatagtacaggccacgccaagataagcagatgtcttacccaaaatcccaaacaaggtacttaaaccctgaaattaaacagcccagaatacagtgaccagaatctcacccgtttggttctttcttcataaagcttggcaggggatagacatgccctattgcatgcaatgtgtgctctactcaaatactgttatttaaaattaaatgtttgcaattgaattattttgcaaatggggtgtttagtattaaaggaatcttatggtgaaattccttcataaagcaataaatcttccttgtttatttaactgtaaaatcaatgtagtagaattatggcaggcgtgaacaataaaaaaaatcaatcatctgtaatcccctaacttgaatatgactctttgcaaatatgctcttctctagcttttgtgtattaggcatatatagcttccttaattgaaactgtggaatagaaataacactaggttcttctttccctgtcaaactaaaagaaagaagctgaggcacaaaatataattaaaagagcttacttgagccaaagtgaagacagctgcctagaagactcaaacgcatgtaaccctggctatgagctccatttggcctttgttacaagcaaatttatttatttatttatttatagacagtctcgctgtgtcacccaggctggagtgcagtggctcgatcttggctcactacaactgccgcctcccagctcaagtgatcctcccacctcagcttcctgagtagctgggaccacaggtgcatgccaccaggcctagctaattttttatattttttgtagagatgaggttttgctatgttacccaggctggtctcaaactcctgagctcaagcaatccacccatcttggcctcccaaagtgctgggattacaggcatgagccactgcacctggccaatttatttatttttaaagttatttatttatttagagacaaggtctcactctgtcgcccaggctggagtacagtgttgcgatcatggctcaacttcctgggctcaggtgatcctctcacctcagacttccaagtagctgggacttcaggcacatgttaccacacctggctaatttttgtgggttttatttatttatttatttatttatttatttatttatttattgtagagacaaggtttagccatgtttcccaggctaatcttgaactcctgagcttaagccatctgcctgtctcagcctcccaaaatattcggattacaggtgtaagccagcacacctgaccacaagcaggttttaaaggcaaaaaagggacaaggagtaggctgatacaaagttgttcgttaggaatgctcattgatttacagaaataacattgattagagattggctatccattgttaaactttacggtgttgtttacagtgtctcgtaaggcgctattaggttaatttatagctacctgtggcaatagcaaacggtttcaggagatgaatacacagctcaaagcagggagtaggaggtgattgtggtttcattttaatgtctctaggcctggtaattcaaaagaactcgtattcctcagttaaaagttatttttcttttctcaccatgccatcttatattattataacttgactattattcatttttaaaagtaattgtacattcaacttgctcttgattgttttagcaagataggaaatgcgatgcaagttttgcacctgcgcactcccacccacatatcactgactcacagcagcagcagtaggatagacacggtcattttgtggatatacgtgaggcccttcagtggagctagggtggttcttggaacaaaactaatagaatatatttatatatgaaagggagtttattagggagaagtggccgcttgcaagctggggaagaaaaaaagccagtagtggctcagtccgagtccaaaagcctcaaaaacagggaagcaggcagtgcggccttcagttggtggatgaaggcccgagagcccctggcaaatcactggtgtaatccaagagtccaaaggccgaagaacctggagtctgaggtccaaggacaggaggaacggaaggaagcatccagcatgggacaaagatgaaaagccagaagactcagcaagccagctcatcccaccttcttctgcctgctttttctagctccactggcagccaagttggatggtacccactcgcattgagggagggtcttcctctcccagtccactgactcaactgtcagtctcccctggcagcagcctcacagacacacccagaaacaatactttaccaggcatctaggtatccttcagtccaatcaaactgacacctaagactatcatacttgactacaagtgaaacgacctgctgccactctccttagtctcctgtagaataattttcttaataaattcccaggaagagtatagtgggccagagaacccttttataattaccagcatcactaatactttaaatctcaattttgaacattttgagtttgctttaataaggcaaatgactgtggcataaccttttctagtttcttttttcctatatggctttctctgattaacaagaatgacttctttttgaacctttcaatttggcattttctacatggaatgtccctaaatcaagtaattttcacaaagcaaagttttcaaaaatcaaggcagtagttgagacaaaatattgtatttgctatgaagtgcaagaagaaacctcttttgttggtaaatcgaggcctaaatgctgattccctgtgtcagctgaagaattgtgaggttcatatatttggaaaggagagctttatttctcataacaggtggccatcctgcaggctgggaagggtagcctccagcgcacgcagagacaaagcacttcgagggaagggtagagggagcaggaatgggaatgtagagggagctgagtcgggggatgaatatgcatattcaataagctattggaggagtcatgaatatttatgaaaggaaagacatgtgtacatgtgcaactgagcttcgtgccccttcatgggtctcatgttcaaaaaatggtggtggtggcatgatccgagggtagacattttggccctctgatgtcaaaaggtgaagcagaggacatgaagcccctcagtgtgcgtcctctgagattcagccaaaaccagaccagaaatggtggtcagttatcaggaagaggtgcattgtgaaactggtgggctgtcatgctgagactaaagagggagggggagtctgatcctgccctcagatgattggctaaaggcgataaaggaataagttgtccacttcctgttttccagtgctggattctgcttcctcctcagagagaattc

SEQ ID NO: 29046 - DNA, 5366 bp, Homo Sapiens
ggtttaaggtgcagaggccctgctctctgtcaccctggctgagcccagtgtgcgggttcctgagggctgggactcccggggccccatgggaaagtgtagcctgcaggcccatacctccccctgtgaatcacgcctggcgggacaagaaagcccaaaacaccccaaacaatgagtttccagtaaaatatgacagacatgatgaggtggaggagaggagggacctggctgggagttggcgctagcctgtgggtgatgaaagccaaggggaatggaaagtgccaggcccgccccctacccatgagtataaagcactcgcatccctttccaatttacctgagcaccttctcttcactcagccaactgctcgctcactcacctccctcctcggcaccatgagcacctgcagccgccagttcacctcctccagctccatgaagggctcctgcggcatcgggggcggcatcgggggcggctccagccacatctcctccgtcctggccggagggtcgtgccgcgcccccagcacctacaggggtggcctgtctgtctcctcctcctgcttctcctctgggggagcctacaggctggggggcggctatggcggtggcttcagcagcagcagcagcttcggtagtggctttggaggaggatatggtggtggccttggtgctggcttcggtggtggcttgggtggtggctttgctggtggtgatggccttctggtgggcagtgagaaggtgaccatgcagaacctcaacgacagcctggtctcctacctggacaaggtgcgtgccctggaggaggccaacgctgacctggaggtgaagatccatgactggtaccagtggcagcggcctgctaagatcaaagactacagtccctacttcaagaccatcgaggatctgaggaacaaggtgggtgaatgggcagcagaaggtgccattccagctagctccttctgggaacaatagatgccccaggacactgacaccttaagatttctccataggacagagcccaccccagatcccttctttcgaggtcttggatgccctaagagctgatcagtgagaggatgctctctccttctccagcctgctcatccccttctgatgtcaaatcctcagatcaagtgagatcagtgattcctgtccttacattttacagaggaagcagttgaagctttgagaggtgctgtgaccagctgcaggtcacatagcaaattaatggcagagccaaggctgggtcccttgtgtcctaccttccagcacaggggaggagcgaggctctaacgggaccaggcaagacatccaaaccgctcattagctcactagtctgggctgtggctgccgccgcccataagccttggtacagtctggtccctccccacagccaggcaggcatggagagcctgcagagacaatcagtgtggccccttgacgtgccctgcacaaagggagcctggcaggcttgtgccctgtctccagccccctcccccctgctcccacatcacctgggagccctccctgcgggagtctgctgggctctaatgccttgcatggattagggaaattcaatgatgatgtggggaactccagtcagactcaggggccaatatatcttcttattcttcccccgagtcctcttttctaatcccctgtgtcagttgggttttatctcttgagaaagttccatttgaagtcccatggcccgtgagcttgaaaaggaatgtgcatctctgcagaggactggcagggctggctgttgcagagagaagagaggccagctcaggaaggagggctagggagcctcagattattctcctcacttggaggtggggaacttgaagccccaagacccattaggttttgcagcaagtcagtggcagaattgcgaccagaactcctgggcttttgattctaagcccggggctgcatctaccccctctgttgaccatgagttagcaaagtcttaggacaggcctggggcatctgttttcctttaggctgctatggtcaagttttgtggggggaaaggggaattcaggcaagaacatgaagcaagagcttaatgtaggttacagtgaagtccagcttgtgaagtccatttgacaaattacctgtgccctttccatcctgcagatcctcacggccacagtggacaatgccaatgtccttctgcagattgacaacgcccgtctggccgcagatgacttccgcaccaagcgagtttgcagtggtgggccagaacatccagtgtccccaaagtagggcattttttgagcagtgtttcccaaatagaactagccagtgccagaatagctgcatgaaaactccctggggtgcttataaaagaataagactcttgggccccacccttggagttttgattcagctatttatagcaggttagctgggagattctggtccacagccaggtttcagaactgctgctttagggagaggcactttccacttccccagctgcccttgaagtataggagggaatcatagttggaggacttatgcattatttgttggctgaagctagaagcgcaaccccctcctgaattctgcagcaagatgaactgcctcatccccaggccccaggaatgttcatatctgagcaatcaatgggcactgtgttcaaccatgccattttcaagattggctccttaaaccacccacaaggcaccagctctgggagaagctgcagggagaagagaacaaagccctcactgtggtcaggatgggtgtatcattccttttctctggggtcattccaggtatgagacagagttgaacctgcgcatgagtgtgggggccgacatcaatggcatgcgccaggtgctggggtgctggacgaactgaccctggccagagctgacctggagatgcagattgagagcctgaaggaggagctggcctaactgaagaagaaccatgaggaggtgagaactatatggaaaagccagcttaaaagaagcgcagggagactgggtacggtggtgcatgcccatagtcccagctacttgggaggctgagatgggaggatcacttgaacacaggagtttgagtccagcctgggcaacaaggctagaccctgtcaaaaaaaaaaaaaaaaagagagagagagagggaagggagagtcaagatagaattgtgattctgggagggcagtattcaggcctgactaaggaaccccaatctgctgccgtggtggaactcctgactgtggactgtccctggcagtgcaggagatgaatgccctgagaggccaggtgggtggagatgtcaatgtggagatggacgatgcacctggtgtggacctgagccacattctgaacgagatgcgtgaccagtacgagaagatggcagagaagaaccacaaggacgcagaggaacggttcttcactaaggtgggtgtcatttgaggtggaaggaacccagaccacctgccttctggggacttctggtgtgaatggtgttctcttttttgcagacagagaagctgaaccacgaggtggccaccaacagcgagctggtgcagagcggcaagagcgagatttcggagctctggcacaccatgcagaacctggagattgagctgcagtcccagctcagcatgttaggaatggtgccaggcccggtggtgcacccagaactggcagggagagaatggccacactcactaatccttgattccctttccctccctcacagaaagcatccctggagaacagcctggaggagaccaaaggccgctactgtgtgcagctggcccaaatccaggagatgattggcagtgtggaggagcagctggcccagctctgctgcgagatggagcagcagaaccaggagtacaagatcctgctggacgtgaagatgcggctggaacaggagatcgccacctaccgccgcctgctggagggcgaggatgcccaatgagtcttggccctccccttaatccgccccaccatggcactctcacggccccaccatgtatctaatgaccctgcccttttctgtcttcacagcctctcctcctcccagttctcctctggatcgcagtcatccagagaccggtaagaccttcatcctctgcaggcctgggctccaggccgccctctgtaccccaagcaggtctaggcattggctaggggctccgtgaggggctgagctctagtgatgtcacccagtttcccttgggaacctccttgggtggaagaagctattttctaaaccctccttagggctaggagaggcagcccccacctcttacttctaccgggtgtctgtggcagatcctattgctgtggtgctcagcaccatgaacagggccctgcagggctcctcccaccgagaccactccattgggtgaatatggacggaaccagctgggtgtgagctcttaggaagctctaatctgaagacaaagactctgtctctgacctttgggagccctagtctgaaagaaatgtgttgacggtatcagtgcttgggcaacagcagggagtgaagcagtaatcaggggagagggcaactgggagacagtttgagtttcctcaccttcttggcctccttactcctgattagtccattgtctgtccacctctggtaatgtcctctttccgcctcttccccagtgacctcctccagccaccaaatccacaccaagatcatggatgtgcacgatggcaaggtggtgtccacccacgagcaggtccttcgcaccaagaactgaggctgcccagccccgctcaggcccaggaggccccctgtgtggacacggatcccactagaagatcccctctcctgccgcctaagcacttcacacctggaccctgcttcaccctcaccccctcctggcaatcaatacagcttcattatctgagttgcataattctcacctctgtctggtcattgttaggagtggggatggggagaaagtgggagaagcatctctttggagcttgtcatagcacctggctatggcccctgggactgggaaaaaggtcctgtgggtgggttgggctcaggtcccaggatatctttcgccatctcagaagacaaagatagatgtgtgtaccaggtcatatgtggcgtctcctagggtacagagagatattcattcatttcctcactcattttcatgtgtgtccattcattcaccagatattgagtgccgctatgtcaggcactatgttaggttaaggattcctaatgtttttgtgatcagggattccttggagaatattgaaagctatagatctttccttctgcccctaccttcaaataagcacacatacattttcatatagtttcatggggttcaggggtctcctagagctcctggaggtccatgaa

SEQ ID NO: 29047 - DNA, 166541 bp, Homo Sapiens
atccctctgcgcaatggacccgggaaagctgcctcccgttaagggcgcccaggcactgtcaaagcgccctccctgcccgggccgggagaagtaaggggtgtgaaggcggagccactgggctggcaacaccctcccgaaggtccagcccttacccgccttcctaccaccttaggggatttggcccggagaacgagatcaccctctcaatgaaaggcagatgtccctttaaggtttgcttctacagcccgtggactttagcctaaacacggacccgcgaagctggctttatttgtccatgtctcggacagagcctgggaagctgccagtgagatttcagagaccaagagcgcgaaggggcgggcgatgtggcaatccgtctgggatgtgaaaagcgtggagcgcatttagaggaattcgacgaaaacacaggaaatcactcctctcccgctcctgggcgccgctgccactggggcagaggactgggaaccgcggcagcgggataagtggcccagccagagagcgcagctcccgcgcccggtcctgccctgcgaaccagcgcggccccctggcgctgaggctgctccggccatggcccctcggccccgcgcccgcccaggggtcgctgtcgcctgctgctggctcctcactggtgagcgactcgcttttctctgagcatctcctgctcgcgggcttggggcttggagcggggagggaggtcctcagagccatgggccagataggaagagagagcgcccatccactttcgggcattccaggtactcaggccaggctacggggcaggcaggagtttcgcgttctggttttgatatgaattagttttcgtgtctctccaaagtccttcaccctaggagtaggagtgaggcagcactgaaaaccttagaaggtagaattcacttttaaaattaaagttgtttttacaatacacattgtatattaggactttgctgaatatttcctcccctccacccttttttatggcatgggatgggagggtgatgcttatagggcgcctgatacatatgcaaaattcctaccctcgggttgttccagagtggacattattgaattttcttgctgtctactatttaggcttttttcccatgcagaacaagaaaaggcagggatgcaagacgaaactgccacttgttccaaaatgatgtttctatgtcagcacccaagaggagggatattttgaaacgtagaaaggaatggtgaacattttctctgtaaatatcacagggcagtctacttttaagatgcaaaatatagtattgttatttgtacataaatgtgtatttttaaggaggggacttaaaaacatagtggaaatgcaaagttgtatccaatttagaaaaagcttgaaatatagcattttgtaagattttcccaataatgaactcatggtcagatcttttttaccagttactgattggggtgggggaaagttgaaatggtgaaaaatggaagaaggtggggggaaagtgtatcgatagaatctctgtgtgaaagaaaatcaccttattaatgggttaattaacagctggctttaacatatcattgatattcaattgttcagtgtttttactgctggcatggttattagtactagttaatttagcatttttaccactaaaaacagggtagagccagctagtttagacctgccttagatggccaagcattgttaagttttatgaagatgatttagaagttgattatcagcaagcagagcttttttcagaagggaggtaatgtaaagagagttaataattagctactggcttttcatccaaacatttcccactactcaggaaatgtccaataatccaaacagtggtaactgctgaacagcattatagccggtgagtggtttaacttaccagctactgccactactttttacacatatttgacctatgattcttctccaactcaaatttttttagattgtattttgttgtttttgtgcaaaatctgaatacagtagtttactatccaagttgtactttttcattctaccaaataagcagtctctagagtagaaatgatgaaatgaggtttgcgtatcctctaaaaagacaagagtgaaacttgaagtaacagagaagtttaacaagttacaatttcatatatatgttggtgaaatatacattggtgaatccaggaagagacttaaaatatttagaaaccttgtgtgcactatatttatgcccatttcgcaacacatgagggatctgaaattggactgctttcccatcagtcattatattctgtaggctcttctttagcaatctctttcagatttggaaacttctcatcaattcagagtccgtttgtaacctggggactcatcaccatacttatccatgcacactactgtagagcttatctttctgtcttcaatttgaacccaacttccagtctaccctcctaatacatcatttttactatatctgtttttagtcaaaaatctttggtggttctttgttgcctttaagataaaatccaaaattctcaactgactgccctaatccaacaccctctctctatctcctactactcctatgtcagtttcttattgctgttgtaacaacttgccatagatcaccagcttaaaacaacataaatttactattgtacagttctgtaggtcagaagtatcactgggctagaatcaagatgtcaccagggctgcatttcttctggaggttctaggggaaaatcagtttccctgttttcaccagcctctggccaccacctgcattcttggcctgtggcccctttctccatcttcaaccgagcagggtagaatcttcagatcttcccccatgactctgctttatcatcacatctccttctcagactctgaccctactaccttcctaaggatccttgtaattacaatgtgcctaccagaataatctcctcatctcaagatctttaatttaattacatcttccaagtcccttttaccatctaagataacatattcacaggttccaggcattaggtcatggatatctttgggagaccattattctgcctaccacaacccataagcataaactgtccattatagccaatcacttttctttactttctccataatcctcatgttcattttgccactgaagatatgaccttgttttatacatcgagaaaagaattccacctttccatcctaccaccctctgacatctaaataaactctctacagccttccaaactgggtttacatcagaacaacaagccaccagcatcccaataaacttcctatttgatttagactgtcttatattagctccttacaacgtttactaaaatgattcatcaaaaagatgtccttatgtccaaaggattgttattttatgtatgtcaaagtctcagcataaactgatgtcacatataaaggatttaactgaagacagtttcataaagtgacagtttagagaggccttaaaggaacaagaaaagagggtggagcatctagcgcaagcaacagtagggaaaaaagaacctgaagcaaggtgagaagaaaaaccatgaccattcctaggcctgaggaggtggcagtgttagtttgattatgaactctagttatgggagggtggccattagactggagttgtggtcataaaaaggaatgcagctagtgacaaaattgaagcccagcagagaaggagtaaggaaaataaatatacctcctttcctcccaccctctgatgtcttgctcagccttcccattggccatccccaaatggcaagatccaaccttccagagaacaaagggcaagacaatcaataacagaatagctagcacaacttaaccccgaaatgtattatgtgcaaggcactgtgccaagggctttgcatgtattatttcattttaatctaaaaaattaagtttactaattgatcacaagcagtcacagatttctttgttcttttttcactccctcagcttgttgattagccttgaaaaaaagaaaagaaaaaattaaaactttataactattatcaatattttagagatgaggaaatcaaaatatagtattaagaagttaatttcatttgtccaaagttgaagaactaatgacaaatctactcaattcatatctctgacctcaaattaaatgctctaaaataatatgctatattggctgcctaaagataagttcattctctcttgctcactcctctaaatgtgaaatccaaacatagttgtctaaaatacttggataaagacctaattaatgatacaagtcaatcttttatttccatgatttttaggtgtacagcattaagtgtaactcaagtaagactactatttctcgttattaagaatataaatatagaattagccctaattaaactatatgtctctcttccctagaaacattttggttggcctagaagcaagggtcttcttttcacaggcaagatttcctattcaaaatgaaatccagtgaggagatgggagatggctgaatatggggaggaagtcagccacttattcaaaacaaagaatgactcccaatggcagacaatgtattgtcaggaattgctgaagatggtgaaaattgtcttactcattgtgatgtttgtaaaggcagcaatgaattcacgggatttttgtttgtttagtaaacaggcaatgagagtaaccatgagacacatatatatgctatactagtttaactatttctcttccctcctgtcataacacttacccagctattttgaagcatgagctcttgggccacagcttatcactgatgttctgacttcagtagatagatgctcctctaacatgttcctccacttccaacccaataaacttcccactagatttagaacttgctgaatttccacatcttaacatattttagtagaataaagtagctcatgtttaaaatatatttagaaaagttggggactaaaatgctattctttacctacacttctcttctgttgtgtgaaatacaaaatagtgtactcaaattcatgttaagaaactgagatgaaagatattttgaaactgttgccacagtgctaaagtcagaatagattgcctattcagagcagtctgtgactggagaattgtattcgccctcaaagcaagtacagtagagtatcaagagatgcaaatgactgcatatatttctatcttcaagattattgagcttctttcagctcctttattatgccagctactctaaagtctccttggggactttgcataagtagttactcccactgctactgatctcaatccctgaataaacgtcatttccaagagataccctgaagtagattggaccctaccttaggacatgtgtatcccagcacctttgcttctattatataatgcaccacggtattataattaactatctaattgcctgtctttccagcttgctgtatgctctgtgagggtaggatctttaaccataacacctagaaataataggcactttttaattgaatgaatcgcaaaagaattgactattgacaaactcagaaaatacttaagggatcagattgtccctttattatatacctctgccttattttattatacctctgcctgaaatatttctgtctatccaaatttataaataatggaatggaagacaccatcagttgaaagatgcaccattattttatgtaccactaaaaaagacaagccactcccaatccaattataattgctagattgttagatagttcctagtttcagagatgtcaaaattgggaaaatgtgcgtctgaaaattacaatcaataatatacagtgtatggtactttttaccatggtacttttctatttgtttggacacttaaaaattgtgtcataagattttgaagaggctagtatgtgaaccccatctagatacagagatataacattgttcctctcagttctcttcaagtgccaagtttatatctgatttaggggataattgctcctctggcaccaacagcctcaccagatcccaaaaacagagctccctccaaatgctctatctttagaagagagcttcaggagaaaggtgacaataaagtaatcatataatgttccagttgcacaggattaatgactctagctttggcaaactcttaactttttgtcatgttggtggtaagctccagggttgtgtatataggaagaagactaattttaatcaaaactttcctatgatttaaaaggaagataaaaaagtcaactaagttttaaaaggaaattaaaatgcatatgctggttggtgttaggaattcactttatgtgttaaaaaaaatcaattttatccaaacaggagatccctattaacaagataagtaagagatctgaaatgagaaatcattgtaattcaaatatgcaaaggagtggatacacatactctttttgtatgaattatatgagatctcctaaaataaatgcaaattcttaaatttaaatatagcacctaagtcactttaaaacatcaatagttaagatggtttatatattttgttacaaatcatatatccttactacaaattaaatgtactttcaaaattattttattaattagacttttattttaccaaatactaaagtctagaaatacatgggtactggccaatccttaaaaatatctgtgtaacacattttacttataatatttttggtgaaatgatcttatgccgtataagaatacatgcaaatagaaatacacacacacacacacacacacacacacacacacacttctgttcataggattttgtttatttggtaggaggttttgtattattttgtgacaactgcaagtaagcactttccatcatgagaaatttagatagtgagtgagtacaagttccttaaaaaaaaaaacaaataaaacaaacaaaaaaaaccactttcccttttacccttttgtctatattagctaactaatcctcccagtcatccacttagctttgctggtggaggtcacatgggaacctttgcacaatctgaggtttgcacattctctctaaataaacaattgcgtttatcactagatattcataattggagctctggcttcttattttgtaaagttcactttccaaaccatgtataataaaactaattgccattatgtgttattctaaaatattttaagaacttttcctggggaagatgtattttaaattaccattttcttacctaagcacggctatctcaaatattgaaataggcttatacaaacttaccttaagagtaaccttctttttaagtttttagtaacattataaaacagaatgtgatttcctaattttagaatgtcagttacagacaagttaaaaactctgaattaaagaaaaattaataaccattaatttttgcatactaaaaatatgagtatgtgccacttgttatgctgtgttccaggagaacaaagacaaataaaaggtagtaagtctctgcctttactggtggaagaggtagtagacatggaaagacacaatggtgggagaggctcccaaggtgctttataaggaataacaaaaagattaggtttgtgttgcaggaaagtaagccttccaaaataaaatacaagatgaaaacaagaaaatttatacagccccgactgtttaagggtcacaagctaagcagagggtattaaaacaagatttccatctttcaggagcccataattccatttcatgtcatacaaaccatttcttttatattattataataggaaagatagtaattcaactcaccaatgaggtccatgaaccattttattcagtagagctgaataacataaataacataaataaatgtaccccaaagattatccatcagtcaactctaccaaaccagttatttttccaaggctgaataattatgatcatgttaaaatgagctcttgtcccttgttttgtctgatccagttttctagcttcaagccaggcatttttagagctctataatttattaatatcaagtatcataatatcactaggacctcataaggatggtcaaatgagagagcaggacaaataatcttatttatcatttagaatgaaaaataattagctttattgcggtctgggacttatttcaagttggtagaatccatccaggaaagaccatatttgaggtctgccaattcttggtccacaaacaagaaactttgaatcagtctttcacctctgaaatgggtcttagaaaaatcagatttgaaagatagcacgcaaaattgaaaacaaatatgttaggatgagattataggtgttgtttaaacacttaaaaaatattactgcagcataatttttagttagaaatttaattattgaattcaattccctcaattcttcagtgaaataaattgggttccagagagactgagtactgccaaaagttacagtaaaaacaattgaagagtaagagctacaatccaggatgcttgacttctagcccagttctcttcttgagacactggaagtgtctcaagagcaacaaattaaaaacttttggaggtaacaatacttttttccccttctggagagattaatataaataagacattgtagggaaaatagatataattaaagttactgatataaagatttatactgatataaagttactgatataaagttttctattttaaacagccaatacataagtataaaattagtatttaaagcaaaagagctaaaagccctggtatttttctcaatactttgctcatttggaaaaaaatgaaaataaatatataactacagcagtttctgaactaccattattaagtgaaatacagtcaataacaatataagtaagtgccttaagaaatgtcttgaaatgtctgtaataatgttaaaatagctgccatactttacatttgactcacctagcttatcattaatatatgagtgcctactatgtgcaaaggacctttaaaaggacaaaggagtataaagataaatccttccagagttcaacaaaaaagatacatgtttaaattaacatggattcaagtttacatggtttcaagtttgagataacatttaagctggactttaaagataggcagcactaaaggaagcagggatgaaaggaagtgacattttaaacagagaagttagtatgagttaaggtagcaaacgagaaagttcctagcatatgtagggaacaaaggttactttcaaggtggaatatagggtgccctgaggggaaaagtgggaagtaaatttgtaaggccagtgcaaattgggattgtagacgttaattcatagggaatgggaatccaaaatgaatcaaaataaaaatataatgattggtctagaaatactaagccataaacaaaatctgggtgaaaacatctaatagtcaactacaggcttaaattactaaggaaaaaaaaaagttcccaactattgcagttgtttcacatacaacagtaattctatgaaagattttatagtatactgaattatggaggcacactgatattttttaaaatggcccaaagtggtttgcctcataacttaaaaaaaaatttttttaaccatggatttaagagtcaataagggtttttcacaggtttctaatgtacagataaatatatgtatatttttctaaagtagaacattagatctttctctaagagtatgatgatgacctaggctggacagaaggaaaaaaaaaaactatgtagaagagaaaagtataataattttaagaggtgataaaagagcaggaaagggactagtgcctttcaaatcctctaggttggttcccaagctgtgagtttttgtttagctggtaaaggtgacagttgaggggaagtgacagtggataatagcacataatttgcagtgaaggagatgattacaaacattcataatataggatggtggtagtagaaagagagggtatggagttatgcaggcctgaatttcaatgctagtcatgtgatcttgaaaacatttcttaacttccccatagttgattttcttctataaaattaggataacaaatatttaccttacaggggagaattagagcataggaaagaacttgataaacattcaatacgtgatagctcttcaataaaaaccttttgttaagatcccactgtgtgcttaccactgtgattctgtggcttttaatctttggcagactatgggaaagataaattgtacttagaaagatgatcaaggagcacttcaaagccccagttcaaaattatctcctcattctctctctctttctctctcacaaatacacacacaagcacactttcaccctaccaattaggaattttaagttaacaagatactttttttaaaatacagtgtcctttggataggcaaatcaccttcacacttgagtgtgattagttctttgcttagtgaaaagttgctgggttctcctggaattggaagaaggcaatgtgaattaggaacttcttgagggtactcagtatgataggaaggtgggaagaaggaggaagtaaggggagacatagagagcgagaaacaaagagaaaagaggccacaaatattaataagtagtggttcttatttggactttccccttggaggggacctttccgtcccctgataatctcttaggaagataatgacacttaagtttaaattgtgaagcctgtcagttgagaaaaatgttgagacaagtctcaatcattttaggacgtttatttgccaaaattaaggacgtgcgcggggaagacaggtctatgcctttctgggaagatgattttgagggctccaaatttaaaggggaaagggtgggatactgagaaatacagttttcatgtgagagggtagcagggggaaaatagtcattcatgcctctgtctggcttagtcaatctgaatctgcatttttacgtaagataacatagacaaatggggcaggggaacaatcagatatgcatttgtgtcaggagggcagaggggtgactgtacctgaaaacagaagctatctatttacattgccatggtaaattttcatagaaacactttatggtaaagatcttggcgctcactgagaatttccttgtgggcaaaatatgagcgaggtgtgtagcttttcatctggtagccatctcatttaaaaaccaagaggcaaggcagttttgcgtgacccagttcccagcttaacttttccctttggcttaatgagtttggggatccgagatttattttccttccacacgcctatgccaaactcagattccttcctttcatccctgtttcatctgttcaggctggttagttcccctttccaatccacacagagaaagacagaaaagacagtgagaagctatgtgtgcaggacttctctgccctccactccatctaagctctcaagaaacttttagattcttttgttttttctattcatcggtctcttaaagaggcaatcccacttctccatttccacttcctaataaagaatgctaagtaacttaaggattttctttaaattatgtagctattcaatcagggtcagtcctagttaatagtttttccccacttcccatagcctcggcttttagcttagctttggcagtgaagatctggccctaagctcttgcgacccaacccccaacctaaacatttcacaggctactgggctgcggaaagctgaggctgccaactttggagcctaggattcccaggacatcaggtcaagcaactgagaggtccacccaggggtaaattccacacatagtttcttctctcttgggaccagcgctttaacatctgggtgaatcagatcgtgcagacacggtaactaggcgcagaaaacagctggacacgttgctgggagcccagacagaacgtgaccagtagttctcagaaaccgcttctaaataccagctccaacaggcttgtagcgtccgagtgcggataaggcaagagcaaaaacgagcatagtttgggccgttggggccaaatctgcacttctgagagctacttttactgctaagctttgaaattggatttacccagagggaagcgttgcagtggcagccgcaggcaggtaaaactagtatttgcactcacacactccccggattcttcacagacagggatggaagagaaaacttaggaagttgaagtttggcattaaaataaaggactcgccaccactctgtgcaccttcttgagggagttcattcgtccggagcgcctcacagcttagtgcgcctgcgcacgcgcgaactgcggccccgcctctcctttggggacgggagacgtgcgtcgggtcgcgggacgggggctgcgcatgcgccttcatttcgtcagcccgctgttgcgtgctgccagcgggaactgtgtaggggtagattttcgctgcagtgttccccgagcctgttagacgcagcgcgccgggagactgagagaggaaaggatagaggaagtgctgccctaggctgcatgagtcgaagcaagcgtgtttccttcccgccaggcaagtgcccttagaaaccgggccccgcccccttcctggcctgcattcccatcccctctcccggggcggaggtgaggacctccttggttcctttggttctgtcagtgagccccttccttggccatgaagctcgtgaggaagaacatcgagaaggacaatgcgggccaggtgaccctggtccccgaggagcctgaggacatgtggcacacttacaacctcgtgcaggtgggcgacagcctgcgcgcctccaccatccgcaaggtacagacagagtcctccacgggcagcgtgggcagcaaccgggtccgcactaccctcactctctgcgtggaggccatcgacttcgactctcaagcctgccagctgcgggttaaggggaccaacatccaagagaatgagtatgtcaagatgggggcttaccacaccatcgagctggagcccaaccgccagttcaccctggccaagaagcagtgggatagtgtggtactggagcgcatcgagcaggcctgtgacccagcctggagcgctgatgtggcggctgtggtcatgcaggaaggcctcgcccatatctgcttagtcactcccagcatgaccctcactcgggccaaggtggaggtgaacatccctaggaaaaggaaaggcaattgctctcagcatgaccgggccttggagcggttctatgaacaggtggtccaggctatccagcgccacatacactttgatgttgtaaagtgcatcctggtggccagcccaggatttgtgagggagcagttctgcgactacctgtttcaacaagcagtgaagaccgacaacaaactgctcctggaaaaccggtccaaatttcttcaggtaaaacaatcttacccagggataattaagaatgggcagagggattggtataaactactcctaaagttttagaactgggaaaaataagaagagaaagtctttacttagctgggattttcatgagataatgaaataaaaagagaatgttaaatgtctagcaaatttatggagtaaacttcgctgaaacatatgaagccttactagcgcttttggctttaagcctttgtgagctgattaatgggtgttctaggagattattttgcctaacttttgtaattgtgattctaggtacatgcctcctccggacacaagtactccctgaaagaggccctttgtgaccctactgtggctagccgcctttcagacactaaagctgctggggaagtcaaagccttggatgacttctataaaatgttacagcatgaaccggatcgagctttctatggactcaagcaggtggagaaggccaatgaagccatggcaattgacacattgctcatcagcgatgagctcttcaggcatcaggatgtagccacacggagccggtatgtgaggctggtggacagtgtgaaagagaatgcaggcaccgttaggatattctctagtcttcacgtttctggggaacagctcagccagttgactggggtagctgccattctccgcttccctgttcccgaactttctgaccaagagggtgattccagttctgaagaggattaatgattgaaacttaaaattgagacaatcttgtgtttcctaaactgttacagtacatttctcagcatccttgtgacagaaagctgcaagaatggcactttttgattcatacagggatttcttatgtctttggctacactagatattttgtgattggcaagacatgtatttaaacaataaactaaaaggaaataatctccacgtactaccatcttgattaaattgtgtaattttttataggaattatgagttatctgtagtacttggaaacagaaaatgtgtgtatttaaagacgatgcctatgcagtatattgtttgggatagattgcaaaatttcacactgcatgctttgaaacagttttccttagaaaaagcttttgctatcttatcctgtttacattatttctttattttaattctgcttggtgttcttgcattgcatttaatgatcccttttctccccacctccacacactacattttttttagatttaaatagttttactattttaaatgattgccgtacaattagtagacttgaagacaagttttaaatatttttcttcaaaggcttgttaaaccaatcatgttaaaaggaaattcttggttttggtttgttgttgttagcattagtcatatttgatttagagggtaacttaaatcagttatttttagctttttagaactttgatctgctagggattgtcaaaataatctccttgaggcatctttatttttaaaatgagattaaagtatgtgatttgcttgttatgtggctaattagtggcaaagctggaagtcattcccagtctggactttagttctttgcgccaaaacatgctatattatttatttatttttttgcttgtcaaagttatacttaattctgttttatatttgtatgtggcattaatttgggtttgcacatttttattggactattttagttgtgaagaagcctgttctaaagtttaagtcacatgactagtatgtggcagttgacttaaactccaatactctttactatcattgacttaaactctgatactctttactataattatggaattgtgcaaatacctctgagtttaaaatattatttttattatttttggtgcacattcctaaaagttaaggaaggagcctcagtaatggaattgcttcttgaccttttgcaaacctcaatttagcaaaataattaggaacgatctaatagtgatgatacagtttttaactgctggatcagcgacgcctatttcaagtagtgatactaactaaactttcgccggtctttcctgtgtctgtgggccttcctcctggtgtgacagacttggggatttcttgtaaacttcctaactagtctgaacctttttatttcttattgggaactgacacttccctatactttaaaactcacatatgtatatttttgtacatctatctcctaattcaaaagtaattgagattgtcatttcattataattccgtgagtatctttaaattactatcaaatatgttactaaataatttaataagaatatagaaatgaagccactgagatccttaaagttgaaacctgattgttattatattttcagtaaggatttggagatttttggacatttttactctcataatctatgcagtactgaaatgaggtctaataaatataaccaatacatgttaggccataggttcttaaatttagctacctgttcacctcaacttgagagctcttaaaaccctcagtgtccaggttgcagctcagactagttaaataacgttttatccctagaaatgttttttttaaagctacccagatgattccaataggcgtcaaggctaatagccactgattcaggccttgctattcaaaagtatggtccgtaaaccagcagcatccctgagagcttgttggaaactagaattcagggatcttttgtagacctactgagacaggcgctacctgtaccaacatctctagatgattcctgtgcataataaaatctgataaacaaaggcaataggttattcttcctgtgctggtaaatctctggcaggggtccccagtcaggaaaaagatttgagtattaaggtctttcaaaaaagttaactggccatactcaactgtctataaaacctctataaatttctgtttttatgtctatgaattattaaataaaatttaactcatttttaagaaattacattttctgttatcaagaatacaattcttactagatcataggtgaaaatgtcaataatgataggagcaaattaaaaattcagataattatttttgacttttctagaagacataattatctctggaaagcatatacagtagtctaattccaactgctactcattaagtattggatatgtgataaaaactctatcgataactccaatgtaccttctctaatgtactgtaaatttccatttcctatcatgtgcttgcaaacaaagatttcctatgccactaaactcaataagtgagaagcttgcacattatttcattttgctatagctacgatacatatcaaatgacagctactcctggtccctcatttgtatgttaaattccttgttaattttatgacaagattgttgatcttggatttcactttcattaccgtcttagaaacaaattggatttttctgctcccagatgccactagagtagctttgtaaagctcatttttcttatctttacttagtttctgtctctaactttagtttcctttttcagcttccctgactaattctcttaacctccaattatctttaacagaagttactaattctgcaattcatatattctggaactggaattatctttgttcctaagcaaccaagtatacatatgaaacggtctgtacattaatgcctcataatagcagctcttatttgggaaagggttatagtacatttaaaccatgtggttttccaagcaagttaagactggctatttgtgtttagtgtcagaatatgttgaattagaagttgaagagtttctaaagtgattttaagggcttgaggagagatgaacccttttgcttagagccagaacttagatatggggtgtaaatatttatattacactaatcattaagagtaatatatttaattttatccatttttttagtgccttttttgaaccaatcactgggctagatgtggggaggacaaacatgtaagcaaatcactgttagaagtaacttgtacaaagtgtgtaaaaggacacagtggtgaaaggggtgacttttaggagaaactttatagagcaaggaccagtaagtttacctaaaaggggaagaagaaatatggagaaattaagtgggaagatggggaggggaagtgtgctaatcacctaagaacctccgtgctacaagaaggagtttgggtttgaccattaggagaaacaattacaaagctgaagcagcatgctaaactgcatttcacaaataccactttggcagcatcaaggatcgattggaggaggcaagactggaggcaggaagactggttaaaaaaatgcatattaggaagatatgagagaaaaatgataatggccttatcaaaggcagcaataatgttccttgcaataggaatgaacagaagtcaacaggaaatattaagagatgggatcaaaaggacatgactgcagattgctgtttagagttatggaaaaaagtagaatccaaaggtaaatctcagatttcttgagtggtgggagagatgatgacacaaaatgtaactttaaaaatggtaattaaaaaaaaatgttttatgcagtggtggttaaatttactaaaagattttttcaggattcccatagtgcaggaattagcaagctatatctcattcaggccaatcagttactgctagcggaccccatggccttgtgctccccatcttaacatagtatctctgatttgtctcaccagacaaatcagagatacacttccccttttattccgtgaggaaccacaagagtctgaactgtggcatcaattttgcagttggatttacatctttcttaatgatttgaaaataatttgtttcaaaaattgattttgaccagcacacaattttgctggtatatcatgtttaagtaaatgaattctccagcagtgaagcacaactaaagtgaagagctgaagagcaacttaagaaagaacaattaattccaataaagttggtaaaatgctcagtaaaataattttcttccaatggatgtcagcatatttaaactttgtggtgtgattcagtttatatactctaagagattcagtattttagaaaagtgctcttcaagattttcctaatgtattatatgtatctctcatgaattgaattgatttagaaatttagtgtaaaagtgttacacacagccaacatgatttataaaggatctaggatgcaattataatatttttgtgaatcaattatgcctttttaggaaaagatttagaagttaaaaatgcagctaatgaagctgttagaaaataaaacctgtattagtagtcttggatttaacaaggagaacaatcaggagttgctaaatatggtcatcaagtagtaaacttcacgtagaaataaaaaaattgaccaagttcagtaaagagatatttatttaggttaaaaataccattcaaaaacattgggagaaggtatttattaatggagataccttcttcagtggcgatgataaagtctcattcattgtttttctttatatagtaagaattagtcctttttaggaagtgtgtgatatatatcaccatctgtattctcatccacatgttacactattatttctaaatttccaagaataatctgtaaaataactattttgcagtatttaatatctctattttcagtaacatgttattatattgtgttgagataaataacactgattaataaattggaatattatgaatgttttaatttaaattgagaaatgaatgagtttctgtaaggacaaacacctttgtgtgtagtattatagttgcatacaaatttgaggctacagtgtttgctttttacaatgaatattttaactctataataattgacattgatatgggaaggtcttaaattttcagatttcagtgctaaggatgataacatttatgataaattgtggagacttggatatcagtcttcttttaaatttcctttctttatttcctaaaattgcctacattaaaaccccattctttagaatgttagttcaatggaagtgcctgttttctataatgtcagagatttaaggaatttaaagcttatttctatttgggtgccacatttgttttcaaaacacccaatactgaggcaagagcagtatttgccaagtagcaaattcaagagcaaaatgttttggcagtcatattgcctggctttgcccagggttggtaccactgtccccactccaggaatggacaacctgttataacaaaagtaactgtgtgcttattaagtgtcaggtcttatggtaagtgctttaaaatgcattagtctttcaagaacccagtcagaagggttttgtcattactattttctgatgcaaaaaaaatgaaattaaagaagattaaataatttatccaaaataacagttagtgggtgtgatgaggtgctccctcagctatcaccctaaaaaatctaagaatgccagttcttctcagctttcagtttggagtaggcaaacatgtatctaaaaataaaaataaattatttgatgacactaaattttatataatcagccaaagtttatgcaatcatttttaatgtttttattctattattttgtcatcttatgaaaaatcaggaactcaattctgtggtcctctaatctacctggatcatagtggagaattagaaagcagagaaaatgtggcaaatctatgtattaaagcaatcccctcaagcactatccagcattcatttattgttatttcacacctagtttcagcaagctttttttgttgcttaattttaaacctacaattaagtcatgcactattacaataaacttttttttaatgactcaccttaagtagctagaactatgctacccctgggtatgcaaggatgaattaagacagttttccctgcctttaatctagaaattagatatcagcaggagatgaccacaagtggccaagttgacagaattgacagcagttaaaagtgacagctgatagtgggagtggattctgaaacactgtcaaaagaaaaaaagcctagagtattatagagtatttcactgggacttgaggatgttactgaggacaataccagtacctggtattcacactgaggaaaagattaaattacattcagtgtattctgttaaagaagtcaaataaatgtaatgtctttcaatgattttcatccaaaaatagtggtactttaaaaaatctttagctgtcatacctagaatgactgttccagataaccagagttttactatgccttaatagtctcagtaataaaactcaaataattgttgaaggatgaatttttgttaaggaaaaaaatcccaatagattttagttgtacaatttattcagagataggaggtccttctgagttcaagtctacgttccagaagttttatgtctggaatttttcatcaagtcctagtgtaaacattgactagaactttttgtttgacaccattgtgaaaaattgctctgtggatagaaaacattttaatcttgtgtttcagctcatttgatctgatgaccataatttatagtttatttttcctccccaagtgtgttgttgactatggtataattctttttttctttttctttctttctttctttttttttttttttttttttgtttgatgagtttgaagaggaagcttaaaatacatttcagtacatggctctgaatcacttaaaatcataagaggttaaagctgtaaggaactttatatatcatcggacctagttccttcatgttacagatttaagccagcccagagagggttggtaacttgctcaaacacaataggagtttttcacagggtccacattcctgtttgatatatctgattccaatgtcacctactttttgtcacctattcatattgagtcatttggggtagaggaacaaggaacaatgcaggattcaaaaatgccttaaaccctccttatttatcaaattatcatcttgtggcaaggcagtttttctctgagcagcattgctgagactcaaactcagttttgaagtcttgttcattccttggaggagtatttatatttccctatagggaactcttcctgcctttcttcttctgagaaccatttcatttttctgaaaatcatgtactaagtacctactatgtgacagggactctaatagcccccagtgatcagaagtaaagaaagatcacagtctcttccttgcaaaaaaacacagtctacaatggggaacgaatggtaaagcagtagtaatagcagtgcaatctggcacaggaacatgggagctcagagggctaactcagcctggctttagtgaggaggtattcccagagtttaaactggcaagttccagaagcccacactgatcttccattagtttctagagagatcaggtgaagggacctgagattattcctcttttaaggcctctcaactttactttttttttttttttttttggagacaagagtcttgctctataccccaggctggagtgcagtggcctgatcttggctcactgcccctctgcctcctgggttcaagcaattctcgtgcctcaccctccccagtagctggggattacaggtgcgtgccaccacacccagctaattgtcatatttttagtagagacggggtttcaccatgttggccaggttggtctcaaactcctgacctcaagtgatctgcccatcttgtcctccccaagtgggattacaggcgtgagtcactgcacctggcctcaacttcactttggtaatatttttcttctacagagtggtctctgtaatccctgatctctctaaatgttaaatatttactgtggagtcaacaaacctgagaggagacatcatggagaaggagattccattacctcctaccctcataagaaaatgaaaatcaaatacagaccagggaccatgactgaaaggactctgaaagattgtggaacctttgtataatagtatccatgtttttgttgtctcctctgcatttcttacatgactaagcactgactggttaaaccagaaaaggaagcttagcttctttcgtttttaggacagcaaagatggggatggtgacaggggagtttgagacattctgtccctttccatagccattcctggaagaaagaatgtccaggattaactggttggtggcacagccacctcagggaaagggaaactgacccctggggactgaagtcaggaataaagaagtgacaaggagctagctggggcctggggaaggccctggggctggacactagaaagacccaccggggtcttttctatttttatattcaacattttatctttcgttgtaaaactcaggaaaacacctttaacaaacaaaaataacttctctcttaagttgttcattttactaaatggccaacatggattggatatggtagaaggaaagaacattttctgcagaagggagaaaaaaaccacaatctattttatgaggaggaatgaactctgggaatagttctctgaccctttgtgtgtcagtgtgttctcagcctgaactggaagaaaatgggatagcatgtggaatgtgggaaagtgcgaagactgatgcaaaattcactatctgcctcattaaatacactagtaggttttcaagagaatgagtctgttatcaccacagtaaatttctcactctgggcctaactccttatctaaaacttaatagagcttaataagttcaaatttttcctgtctttctgggaatcattttcacctttatctctgatcctgtactttccctaggtcagagtaaaatataatgggaaacgggcaagtaggtaggaaatgtggagaaggtcaaggcctttttataatggttcattgtaaatttaaaattcttagatatgtatttcatacagattcacatatgttcttctggatgaattagaaattttaattgtgaggatcaataaagtagcgcaaccagctttcacatctgtatgaaatttaggactttgcaaaggatgttgcacaccaaaaattacaaaataattcaacgattatttgctacagttaccaaagattataatattaacatttgcaagaacattgcatttgtgaataaccaagtatgatacaaggaagaaatcatccatgtcattctcagaggatatggtgtaagaactggcccatgactcatgacaccaggccctgccactaggttgtgtgacttgaggaaataatttcatctttttgagagttggtttcttcatctgcagaatgagcaaagaagggtggctcttgacttcataatctctcttgcagatatctgattctacttggtgcagtaacaataattgcttgttatttttgcgatcatgtctttccagtaaaataaatctttagtgactctcaggtttaaaaagaatcttttttgcaccctattttaaaagctgccagatttggggtttggctgactactaaggagagcagcctgctagaaggagcaaattccagagctgagggtcatttatttggaatgctttgccaaacactcccctatttttaaagttgttgggggactttaaacttgaatatagggtggtaggacaattgtttgaaccactctgtaaatacgtgcatgaaaatcttgaggtttacaaatattttttaatagtttgccacatttcaatggcatgtcaagttgcagggtcctgccacttttcttcttgttattttcctcttctatcaactttgctcactctcccaaagaaataggcaatgagaaaaaacaggtcttaatttttactggaatgctctttccatttggctagaggtttctcaaaccaggcggcaccaatcacctagggagttttaaaatcatggtgatgcctgagccctacctcaactaagtcagaatatttgggaaaggagcccaggcatctgtacattttaaaagctcctcaggtgcttcttatctgcagccaggttaaaccaggagtgtcatcactgagtaggactattagctttaatgtgtcctgtgaccacaataccaatcagctctctggttaagaaaagagatgaacatagacattctgaaaaggcaactttataaagttgaggggaatgtatttctttagctttaatgcctcactgtgggatttgtctatacatttatgtatttttaaattactatcataaattcacaattagtaccaaaaccgatcaatttgtgaatatttattgatgccatttacatgcatatgtgttgctaaatacaatgggagggggcctacagaaaggtagagaacccagatcccacccacttcttgaagcttataatcattttggggtgcaaggattgtgtaaaacaagacacaaaaatcacacatgttacagaaattaaaagctaatatcactgagaacaggaagacattacaattggctagaatcacctcaggagatggtacttggatctgggcaccctttgaatgtttttcacttatccggtaggtaaggacattagctctggactagaaaatcttggatctcccacaggtgagctctgtgaccttgagcaagtaatgttacctttatgattctcaaacttagctttgtgagcttcaatttgtaaaatggaaaaaatgataaaactgctctcatagagttgcaaggaataaatgatatgatgtaagcaaaatatctgaaaattcctaagagcgcaatttaagttcattttgttccttcttatcgcttttttttttttttttttttttttttttgccaaatacaccacttgggcaacagatcagccatggaaatatgatgcagaagatctgcctcatgcctgttcctaacataaatctctctctaccaaagctgtctgtcagagattgtgttcaaaccagaacaagtggacccactcagtccagagttaccctcaacatgagacaggctacccagctggttctctgtctttataatatttttatttctttaaatttgatgaaagacccacttttgtgagttttacacacaaatgaagaggagtacagaagagcacatttcaattgtaatgttcatgccaggaatagtaacctcttcaaggataccactgagtgcacacagaatgctgggaggtcctgactctgcttatggaaaccacagaaactcatccctgaaactggttctatagcagccatgaccctcattaaacttccaatcaagtaaaattaatattagctattaggttagatgttaggtattgtctttgcctccatttaatcatcttacttcctatggtacctgttaattatgatttgaatctccttaactgctcagcctgggtgtttcagccatatataagtcataaacagactacaattatcttactatttctcagttacttgcaaacaacaggaaccaagtctgataatacaagaaatgaagaaattttctggaagaaggcaaagaggctcagataggaacaaagaggggaggcacagtcagaaccctgctatagaaatcacctgtgtaaggcaatgcagctgatggaatagccacccccagacaaccatcaccaatacactggggcttctgagagactcaaccagagcttctgagaataatctctgagtgtgaaaatcagattggctattgaaaggtcacatgcccacattctatgaaccaggagcaggataacggactattctatatgcctacatctcctcctctcattcacatctcctatgtaccttccccaaccaggaggaatttgtggattctaggtagccaaaacaaaagaaaatattcactaaccattttaaagaagttgaagtaagagaactaacatttaccaaataccttgcaaagccagccattgcattggtattaggggaactggtagactgtgctgttattagtaccttgcagtcagactggcattgttcaaatcccagctcagccacttgctggaagaaacaatggtcatgctgagcctggactggcaggactccagatcctgatgacatatcactgttttatgtagccctgttggactgatttcacttctttttagtctcaggatttaattcacaatgagttgttttttggtttgtttgtttgattttgagacagagtctcgctctgtcacccaggctggagtgcagtggcgcgatctcagctcactgcaacctcagcatcctgggttcaagcgattcttgttccttagcctcccaagtggctgggaccacaggcatgcaacccctcacccagctaatttttgtataggcgggttttcgccatgttgaccaggctggtctcaaacttctaacctcaggtgatctgcctaccccaggctcccaaagtgctgggattacaggtgtgagcactgtgcgagcccacaatgagtttttaacacttactgttcctcatcagagatgccaatttgttaggaaaacaaagtgcatccctttcaggcttcatatctgcttagaaaaaagcacaatcctataaattacgtaatcatataaattagttgagtaatacaaaattatttttccttttatctgacttttttttctgaataaattaccttaaacctggcttcagtttgctcataagctcctgatatttgaacaggtatctgcccaacaatcagagagaattagtcctctgcaccttctgagaggtattaaaaaaaaagggggggaaagaaaaagaatcagtccaattggtagattttaaatggctcatttaaatactacaagtttatcagtctctaaattttcagcctaggaaaatttcagccaggaatttgatattagtcctgatgcatcacgaaagtacggaaactcagtttctacagacccagggcttcctggggttacctcaggccacttatatctcttatctgtgcttttccttagctgacatttggttctagaatgaaatggaagtcaggaaagaggaaaatgatgatgtacttccccactcccaacacacacttgtctttagcctaaacattgttttccaatccagctgtcaaacttcaagtatggaagaggaggagaaaaatcagctagcaaatatatccagatttcctgctgggcaccaaatgctaagcagggtaggccaaaaacatttaatcaaaaaaacaagatccaccacggtttttactctcctaaagtaaaatataaatttggaggtgagccaaagttaaaaatataaaaatatagccagtgtttctctcctactttcctagggttgctaggttttgggagcctgggatgggggaaaacagtagaggagacatacttattataaaacattcaaaatagtgaatgggacatacttattctaaaaatttacttgctgtttatctgaaattcaaatgtaactgagtatctagcaaccctacatcctgatattcaactttcctactcccctggtcatgactggcttgggcaggagagatctttgcctgggtagatgttgggaggagcctggtgaatgtattccttcccaggattggtcttggctctagttctggagcctctgttggaagaatggagaagggctccattccaaaaaatggaatagggatctccttccctatgtttggaaaacactggtctaaggctttcaacaatagccttgaatatcaatgaatgtctacttagcaatcatcttttccagatgattcttatgtcttaaaataatgttacttcaagaaggtgcctaattgtaagacatacttacagtaatagtagttgggttgtgatgcaatttgataatgtgagattctcttagaaaataaaattagtaataaataactacagctgagtttataatcttaataaattaaggtagcttaatttaaaatgtataactaaacaaaaactaagtcacaaaaactccttgatgacatgaataacatacagcagggagacagtagtaagtagtggctaaggggaaaggctgtggaattacaccacctgagtctaatatctaacactgattattgaggtgacttactgaagtttcctcacctgcaaactaagttacaacctattgtgtttttttaattgattgagattattaacactttttataatgcctggtccagagtaatgctccaaacattttacctattttatatgctaaatttaaacttaatctttttgggacttaatatatatccatgcacatcgagcatattttaaattcagaaaggaaaccaatatgccagcagaaataaaacaaatattcttgttttcaaataaagatcatttctttatgagaaagatgaaaattaacgatcttttagagatagttcaatgttagccactcacagtcacaggtttaaaccgtgaagttagtgtttatttttatgaatctaaaaacaattgttcccagccatggcatgaagtcttcctattgccccaacccacataaacacactagaaattttcattcttagggagggatagggaggctgggggctactgaatggacattttgttagttaagagctcactcacaggctgaaggagtgtggaataggtccaccattagctattctggccatacctctcttagagattggggtcctggttaccaacgaaggaccatgtggccatatccagagggttggagcaggtctcagggcccattgcctggcacacctcctcccagaattcctgaggtataaccttctcaggaagatagcagagctcttttctaacactccgctatttctggagagtagtgagtatattcccctccaggccttttcacttttattcagaaacacagggaaaataataaaagtctgtctgtattatgactagctacaacaggtgggggttttctttgcagtaatattttcaagtggtatcacctagcagctggattcctttgccttaacagaattggcaccctaaaagcaaaagagatggaagcactgggagtgataaactttgtcagtttagaatcaatttagatcagtttaaaaccattcaaacttgacacattcaaaagctttcaatgctatccactaagaaatcatatttgaggaatttttttccattaaacatttagtctggcttaaatatagtaagatgctaatcttttcgaaacttgtttttctttctttttgtaaaagtcagttgagtttaatataacaaaagggctgaataccagaggtagagaaggaagtgtcccaggcttggtttcaagacaactaggtcctggattctacaactaagtgattttgtgaccttgagcattactagccattgtgagcctcatttataaaggagggataaagattaaaattatgaaatctttctgtaagtaattggcacacagaatagacgttcaataaatgttaactctgtagcctaggagtgatctggttacaagctttgttaaaactccttctttaaggaaatgtaaaaataaattggtactgtcaaagcttttatgcccaggccatgtagagattatcttccttccaaagaaactaaaatggattgagaagacaaatatcattccaaggaaaggctagaagtctgcaaaattatacaattgtactttagtgcaccaaagattaaaaataatgcagtcagaataacatttatttcatctaccagaatgttaccctatttcttgcctttgattagtttaagaataggaaactaagatagtacagacttataaagatataacgtatttataaatatgtatctttgcatatgcaaattataatatacatattttaaaagtttgcttcagtgaaatttagagcatgagcagacaacctatttttggtgaagagtcagagataataaagtttttagcttttgctggccacacaagctctgtagtgactacttgactctatcatggtatggcaaaagcaggtctcagggccacagacaatagtaaataataggatatgattgcgttcccataaaactttatttacataagcaggtagtgggcaggatttggtctgtaggacacagtttgttgaaccctggcctagagcatgatatagagtatgcttacaaactgggcataattaagataactattctagaggaaaaagaatgtatatgcttagattaactcagcaattacataaacacaactgtagtacatacatctattcttttagcatcaaggcttgctgagttgaaaaaaaaatggtatggttctctaactatattctgttgagttgctggtgtgtaaatcacattgtaactggccactattactttttggagttctaacatatgcttatttgcacattagggtttactgtttttctgtgatagacaaatactgaaatttgattcagatccattacacaaatggccaagacaggatattctgtgaatttcctgggaagtatattcaagtatcacttacctgacagcatctgagccattgtgttataaggaatttcctgcagggattgaattagttaggcttagccctcagtggttttgtaactatttcccgcattcaccttaaacaatgccttttagaagtggtttttgggtgattctttttctccaggaagagattataaataatgaaatgattagaccattagagaatttaaatcagtagagaatgctaatttctttttttgtcatagtaacagagcaagccaacttaatcagtgccctgacaaagcatccagcaccaacacatacattagaaaggtatctaattcctcaccattttggtattctaattttataaattttaattctattccattttgagagtatctagggatcagaacctttatggaagactaataactaggtaaacactattacctagcttaagagaccctaaaatgtcagtgacttcataccacaatggtttattttgctcatgtatctcattcctgtgtgagttagatgaccccaatccctcctgtactatgcccttgggaacacacatctctatggttacagtcaaaggagagagttgtagatagaaaacggcacacttccaagtctttgctattgtgaatagtgccgcaataaacacacgtgtgcatgtgtctttatagcagcatgatttataatcctttgggtatatacccagtaatgggatggtggggtcaaatggtatttctagttctagatccctgaggaatcaccacactgacttccacaatggttgaactagtttacagtcccaccaacagtgtaaaagtgttcctatttctccacatcctctccagcacctgttgtttcctgactttttaatgatcgccattctaactggtgtcagatggtatctcattgtggttttgatttgcatttctctgatggccagtgatgatgagcattttttcatgtgtcttttggctgcataaatgtcttcttttgagaagtgtctgttcatatcctctgcccactttttgatggagttgtttgcttttttcttgtaaatttgtttgtgttcattatagattctggatattagccctttgtcagatgagtagattgcaaatattttctcccattctgtaggttgcctattcactctgatggtagtttcttttgctgtgcagaagttctttagtttaattagatcccatttgtcaatgttggcttttgttgccattgctttcggtgttttagacatgaagtccttgcccatgcctatgtcctgaatggtattgcctaggttttcttctagggtttttatggttttagatctgacatttaagtctttaatccatcttgaattaatttttgtataaggtgtaaggaagggatccggtttcagctttctacatatggctagccagttttcccagcaccatttattaaatagggaatcctttccccattgcttgtttttctcaggtttgtcaaagatcagatggttagatatgtggcattatttctgaggcctctgttctgttccattggtctatatctctgttttggtaccagtaccatgctgttttggttactgtagccttgtagtataatttgaagtcaggtagcatgatgcctccagctttgttcttttggcttaggattgacttggcaatgcaggctcatttttggttccatatgaactttaatgtggcacatatacaccatggaatactatgcagtcataaaaaatgatgagttcatgtcctttgtagggacatggatgaagctggaaaccatcattctcagcaaactatcgcaaggacaaaaaaccaaacaccacatgttctcactcataggtgggaattaaacaatgagaacacttggacacaggaaggggaacatcacacatcagggcctgttgtgggtggggggaggggggagggatagcattaggagatacacctaatgctaaatgacgagttaatgggtgcagcacaccaacatggcacatgtatacatatgtaacaaacctgcacgttgtgcacatgtaccctaaaacttaaagtataataaaaaaaaaaaagaaaaagaaaatggcacacttgctcttgactcccttggccggaggtggaggtaatacattgttagttctgatccttgttcattgatgagaaccagcccacatggcttccacctactgctagggactctgggacatacagacaagcacataattatttggtgatatttggtgagccctaactgccgcagaaaaacttttgaagcatttagttctctcccgagaccagaaatcaatcaggtaaacatgaataagaaatttatagtattatctcagtttttttttattggctttaacaagagcatatgctgggaggatatttgctatattctgctagtttccccaatttaaggttgtctgttttgattaaaaccccttagcccagtggaaagatgaaactctcatctatttagtccttaatatctctatcactaaatggataggtttcatgtactcttcagtattgatagcctactttctaagtgtgtgtgtgtatgtgcatgtgtttctgccattacagtcattgtatgaaacaattatgtattctgacaacagctagcacagatttatctatttaataaatgttggttgattaatagataaaggcacgtttatatataccagcaaatacgaagacttggattcagtaaagtttgataccattcaatagcattaagattaaggatgactgtgacggcctttagtttgcatttttagactgcttaatttgggtcaatgtttctcaaagttatctccagtggtctaaactgttaaatctgttccgaagtctaggaacctatgtcagtcaaaaaagtatgtttttagacagctctcctcaccccattccgtgtgaagatggccccactgatattcataaaaaataagaatattccctcccaatgaatgttgctataaggaaatttgctcatacagaattggtaaatggaaaaatgatgtcactataatacataagtcactataattcagttttccctagcaccttaatgtttatactaccaatgccaccacttgaatgccaaatacactaagagttggacacagtaagcatatactcatacagtattgtaaggaattcccattctccttgtattcttcctctttgcctagttttgctgtgtgtgatttcttggaagggcttatataattggccccaaacttagttcattttgcccttgtccccacaactattcagccttaacattttcttacttcattccactgtaatcatttatttagtatagaatttattaggaatctaaatgcctttaaaattatgctagtatttttatttgagttgtttcgactttatgttttagctaaaaaggtgtatggactttgagttgactgccccaactctgtttttatcataagctgtatgatttttatgtgtgattttgtagaaaacacaagattgcttttaggaatgaatatatcacattataatagaaatatctgttttcttgcaacttaaattgcatatattttatgaatggaagaatgtcaacaacaaaattggcaatgggactatttgagaatttgccatgtggaggccgtttcctgaccttttatcctttatatgctagagtgctttagagtttccaaatggtgttcatatgtggaattttatgtcaatccttgaacaatactacaaggatcattattaacatttctacttgatagacttggaaatcaaggctcagaggagacaaatgttttgcctacagtagattggtgacaacattctggctataattagttactctattcaaataaacatatttgagcttcgattttacttagggcactggggatacaaagataattaaaatgaaactcagtcctcatccaaccagttgcctctcttcttcctcccactgattcagggacacttccgtttggactgggcagagctagacaatctcaaactcatagaggcatctgcattgctagtttcctagaagagctggaggctgagtatccggactgctctgcataggggatatgggacacttaggtggctcctggccaagtggcccaagcctgttgctgactggaagtctgtcacttggctctcctccctcgccagttcgtattgtagcctctacccttgacactgtctcacccagtggaaacacagctgcaagagctgcagaaggcctattacttctaatctttctgcttcgtatgatcggtaattacaccccagggacacataatgaagatggttcatcactgctttttatgtgcttcatagtgtgagatagtggactgggaacttgaatcagagcaagaaaattgttttctgctctaggtttggtcacttaaactagccacagtatattaggcaaaatatttcaactgcttgggcatcagtgttctcatcatttgaggacactgtctcattagatggtcgaatagggacttttccagctatagccttctgagattcctcaaggacacatcgagtttgtattgcatggtcaaaagagggctccaaggaaccaggtctaacaagctttaaggtgagtgagttctctcaatggtgccccgactttcctgacatccttctgaatcttagacaagcctcggagagagatactcatggaatgaccaaaatggtagcaccagatctgtatgaggtatttaatcattttattttattttaatttttagacagagttttgctctgttgcccaggctggagtgcagtggtacgatattggctcactgcaacctccgcctcccgggttcaagcaattctcctgcctcagcctcccgagtagctgggattataggcttgcgccaccatgcccagctaatttttgtattttttagtagagatggggttttgctctgttgaccaggctggtctcaaactcctggccttaagtgatccacccacctcagtctcccaaagtgctgggattgcaggtgtgagccatggcacctatccaaatcattttaaatggtgatgattatgtccaataagtccatcttattctcttgggcatctcaaccttttcctgccttaggaaaatggaggtcctctaactcctaagatcttgtcacatgatcctgctgtaggcagaacccacaccagttaaatgtttatttacttgatcaatgtttagcctgtggttggcttttaaatatcccaacggagactgagaaagcagtgcagagagtgctaaaatacagacaaaggaaaagaaagaattggaaactaggagaaaacaaggaaaaaagaaggggaaagtgctttcagcatttcttttcaacttcctctacatgcttagaaaacagaattgacttttgtatgtctgtggtagctttacaaataaattaaacatattatcaacgtttgccaatttattttacaagtatacggaatatcattagcacattctggtgatagtatgtcagatatttaaagagctctagcttgaagaaaatgggccttactttaagagtgctatatttgttttatgttctcatacttaatgatctgggacctaattttcttcagccctgattatgctttgtttcatgacctttaatatatatatatagtaatcattaaatcaaataattataagtcacttaccaaaggaattaaatatggaaaatgcatttgaatatgtacatgattcatccacattttaatatctatccttacttctgtttccttttgtctcccattaatgataaaatagctgagaagattgttctctcttttctttctttttttttttttttttagacggaatcttgctctgttgcccaggctggagcggaatggcatgatcccagcctatggtgacctctgcctcccgagttcaagagattctcctgcctcagggtcccgagtagctaggattaaaagcatgtgccaccacgccctgctaatttttgtatttttagtagagatggggtttcacatgttgctcaggctggtcttgaacttctgacctaaagtgatccgcctgccttggcctcccaaagtgctaggattacaagcatgagccactgtgcccggccagattgttctctcttaatgggctgataagtaaccaagtaaaacatattgtacttttaccccatgctagaggcagcaagcccaagctgcagaatgcccaattacacaatcctctattagccaccaaagagaagatacttttaaatttgtattacattatttaaatagaaaaaataaagacagaagatcctttaaaaagcaaactggataaatagtacttcagaattctatatattatttgttacaactgcatgtaaacctataattacctcaaaatgaaaagtttagtttttaaacaaagcctattattgtatgattaaggtggataattgagctgcttcttatttttattatagtaaaatatacataaaataaaatgtattattttaactgctttaaaattgtaattcagtggcattaagtacatttacaaggttgtgcaatattgtgaaccactgtctgtttcagaacttttgttactacatccagtggaaattctgtatctgttactcttattcctcccttccctctgctcctgggaactacagatctgttttctgttcctattaacatgccgctttaaataatatttcatataaatgaaatcagacaataaaaaggtattttgtgtctggcttctttcacttagtgtgatgttttcaagattcattcatgtcatagtatgtatcagtataggcccatcttgttttaatgcacttcactttattgtgcttcatagatactgcgtttttcacagattgaaggtttgtggcccactcttcacttgaacaagtaacagcaagtgctcattttgtgtctctatgtcacattttggtaattctcgcaatttcaaaatttttccttattattatatctgttatggggccttgtgatcagtggtgccaggaactgtgcctatataagatggaaattttgataagtgtgtgtgttctgacagctccactgaccagctgtttccttctctctctcccttttcttgggcctctctattgcctgaggcacaaaagtattgaaattagtctaaaataggcagggcacagtggctcatgcccgtaatcccagcactttggaaggccaacacaggcagatcacaaggtcaggagatcgagaccattctggtcaacatggtgaaaccccgtctctactgaaaatgcaaaaattagctgggcgtggtggcgcctgcctgtaatcccagctacttgggaggctgaggcaggagaatcgcttgaaccagggagtcagaggttgcagtcagctgagatcatgctactgcactccagcctgggtaacagagtgagactctgtcaaagaaaaaaaaaaaaaaaaggaaagaagttagtctaaaataaccttacagtggcctctaagtgttcaagtgaaaggaagtcacacatctctcactttaaatgaaaagctagaaatgactgcgcttagtgaggaaagcatattgaaagccaagataggccaaagctaggcctcttggtccagttagctgagtcatgaatgtaaaggagaagttcttgaagaaaattaagtgctactccagtgaacacatgaatgataagaaagcaaagcagccttattgctgatatatagaaagttgagtggtctgggaaggtcaaactagccacaacagtcacttaagccaaagcctaatccaaagcaagatcctaactctcttcagttctatgaaggctgagagaggggtggaagctgcagaagaaaagttggaagctagcagaggttggttcatgaggtttaaggaaataaaccatctgcataacataaaagtgcaaggtgaagcagcaagtgctgatgtagaagctgcagcaagttatccagaagatctagctaagataatttggtaaaagtagctacactgaacaacagatttttagtgtaaatgaaacagccttctagtgcaagaaggtgccatctaggactttcatagctagagagaagtcagtctggattcaaagcttcaaaggacaggctaactcttcttaggggctaatgtagctggtaactttaaggtgaagccaaagcttattccaaaaatcctagggcccttaagcactatgctaaatctacctacactctataaatggaacaacaaaacctgaatgacagcatatctgtttacagcatagttaactgcatattttaagcccattgttgagatttactgctgagaaaaagagattcctttcaaaatattactgctcattggtgatatacccagtcacccaagagctccagtggagatgtacagagataaatgttgtttcaatgacttctgatacaagattcattctgtacccatctatcaaaaagtaattttgactttcacgtctcattatttaagaaatacatttcataagactatagctgtcatagatagtgattcctctgatggatctaggaaaagtaaattgaaaacctcctggaaaggatttaccattatagatgccattaagaacttttttttttttttttttttggtttatgggaggaggtcaaaagatcaacattaacaggagtttagtagaaactgatttccaaccctcatggatgactttaaggaattcaagacttcagtggagatagtaactgcagatacggtgggaatagcaagagaactggaattagaaatagagcctgaaaatgtgactgaattgctgtgatctcatgataaaactttagtggatgagttgtttctcatgggtgagtagagaaagtggtgtcttgagatgaaatcaattcctgaaatcaactcctggtgaagatgctgtcaacattgttaaaatgacaacaaagaatttagaatattccataaacttagacgataaagcaatgtcaggatttgaggattgactctaattttgaaagaagtttttctgtgggtaaagtgtgatacaaaagatgctcaacagcattaatcattagatattcaaccgtgggtaaaattgcatgctacagagaaatattttgtaaaatgaagagtcaattgatgtggcaaacttcatggttttattctattctgagaaattgccagagccactgcagccttcagcaaccaccaccctgcccagtcagcaaccatcaccattgaggcaaaccctccacctgcaaaaagattatgactcactgaaggctcagatgattgttagcgtttttaatcaataaattattttaagactaaggtatgcatattgtttttgtagaaataatgctttgtgtacttaatagattacattgtagttcaaacacaacttttatatgcactggaagaccaaaaaatttgcatcacttgctttattgcagtggtctggaaccaaacccgcagtatctctgtgatgtgcctgtacttcattcctttttcatagctgaataatattctattgtatggatataccacatttcatgtatctatttagcagttgatggacatttgagtcatttccacctttttggctattgtgaatattactgctatgaacaattgtgaacaagttttctctgaacatatgttttcaattctttgggggtgatatacctaggaatagaattgttgacttgtagggcaactctatgtgtaactttttgaagaactgccaaactgttttccatagcaacattaccactttacattcccaccaacaatatatgagagttccaattactacacatccttgtcaatccttattttctgtttttgtgttttttttattatggccattctactggctgtgaagtgatatcccattggggttttaatttacctttccctaataattaatgctgttgagcatcttattatgtgcttattggccatttgtgtaacttatttggagaaatctctattaatatttactcattttttaattgggttgcttgcctttttgttgttgagttgcttcttattttaaaagaaatcagactcaagaggactttagttgcatgggaaatattctaggtctgggtgatggtttcatggatgtgttcactttgtgataatttgtgcacttatatatttctcaaaaatgagcatgtgtttcctttcttgaatgtattagtttcctagagctactgtaccaaattagtacaaacattagtggcttaaaacaatatattgtctcacatttctggaggccagaagtccaaaaccaagatgttggcagagccatactccttctgaagcctctatgggagaatcattccctgccttttccagtttctgatggttcctggcaatccttagcattgcatggcttcttgacacttgatactaatctctaactttgtcttcacatggtcttctttctccctcatgtttctgtttttgtatataggtatcttaaatactcctctcctttctcttataagattaccagtcattgaattttggccccaccataaaaaacaggatgatctcatttagacatccttaacttaaatacttctgtaaagaacctatttccaaataaggtcacatttacagataccgataccggggattaggacttagacaaatttgtgtgggggaacacaattcagcccactataatgaacatatattaggcttcagtttttaaaagatggctttaaaaaacaaaatggaaaacaattttactggtcagatgtggtggctcatgcctataatcccagcactttgggaggccgaggtgggtagatcactttaggccaggagttcaagatgagtttggtcaacatagtgaaacctgtctttaccaaaaaaaagtaataatgataataaacatttaacaaaaagaaaaaagaaaactactttagaaaaatgtggtagtctaggtttctgagtcaaaatatctgtaggttaaggaggaaaaaaaattcacgggatgctcaccaccataaaagttagaaattcttaatttttgaaaaatgatctcactgtttaaaaagcacagttagatggaaaaggggacttatataaaaaagactttcaaaggatatttatctgttgtgggtttttttttcattttttggagaggaagctaatgaaaacagttcaatactcatttatgtagagaatatctttcaagacattaaaaagcatatttttagtattgccaaatacagagatttctattaaaatttccagaagacatttttttgtgtgtgttcacactgttacccatggcacattcctggttttttgtttttgtttctgtccttaagtgatcaataatattggtatttggtcattttgaacattgtgatccttacctttggacttgttaacaactggctgaggattcaaggcataaaaggaatattatgcttactattgagcctcagcacctttgtattttaatatgacatgtggctgatgatcaaccttgctgggtctcatttcatatatcagttaaataaatatatgaatgaagtaatattttcttcccaagagtgatatttgattcaatagattaaaagttatttgagtccctaaacataaaaaagccagtagggtatagtagctctgtggcaagcaattttagtatcagaacacatgaatttaaaactttggacaatggccttattcagaacactaaaagcttagaagcctactctttagattgtagtgctattttggaggcatatcttttttctttttttctctcagtttttcttttttggatagtattccctgttaagaaacagatgatgaggctttaattcagtacattctcaaattgttcccactacaaaacttatttcaaagataaactttggaagttttcataggtaggactgtaagaatgttttaaataaatcctaatcattttaccagagagtataccttaaaacaaatttttctggctttatttgacaggttttttaaaaaaaataacttagtcatttttaagttgattgtagttcatccagaaagttactccatgttggtaaaaggttaaaaattaagagagtccaatttttgaaaattttcacaaagttctttttatacttttaaattagtcaaaggccaagtatttcataaagtgttgatgtaaattgtgttactgatctttgatcataatgtggaatagtagttgcactcaagatatgaaggaaaaatatgttacagggtttggctttgaaataactgacatacagcagaggcactcaccctaacatactttccatctatacgccaggcagggctgtcagtttgtggaaaggcaaactgggacctccctcagctctgccctcctaataagaccatcctgacacaaagcagcaattattctttgatgacatcaccaccgtcttgcccttatttttatgtgcataatggaagatttcaactttaaatctgacctagccatgaaagtcagtgtgagtcctgcatcatgttttcatcctgctatgtttttactttctggtagtgcttttaacacagagagtttccaacttgaaatatagagaccttttaggaagttttttacataggaatcacctgtctaatcaactacaagaggtcacacttttttttttcctttgagatggagtctcctctgttgcctagactgatgggcaataacgaaatcttggctcactgcaacctctgcctcctgggttcaagcgattctcatgcctcagtctcccgagtagctgggattacagacgtgcaccaccacacctcggctaatttttgtatttttagtagagatggggtttcaccatgttggccaggctggtctcgaactcctgacctcaagtgatctgcccacctcagcctcccaaagtgctgggattacaggagtgagccactgcacccagccagaaagtcacacagagggttacccaaactaagtctcaagatacctgtttctaatgacttttagatagcatagacctctttattgattaaataggaaagagaaaagaaaaaaaaactctagaatttttaggattcataaaattggcatcacaataacagtaatcacttatggctcctaagaattttttcttttttttttttaaccttaaagattagttaatttaattacatcttaaatacatctcgcaagtgactacaaattctttgagggcagagacaatatattttttttaccttttaatcccttaaagaccttctacctttcctttcacatgggacttttattaatgtccgctgaatgaatataacatattcataatatagtcatgtctatacattgattaacatatttgttatcaactgcagagtaggcccagtctttctcttttactctctgtccttttaagaattttaagagctttttggggaaaataaagtaagaagaaaacaatgagtcatgtctttgtagccatctagatttcttagctctgttgcctcattcttcctcctcattcttcccccagccacggtggagaaataaagttgtctgggggctcattactggactacccaatctcagttcccttctgtactttagaactctctccttccctcatcttgatttcactaggccacactataaccctgcttcctggagagaatcagacccatgtaagctcttgagcctcctgttccatggatctctccaccaagacaagagcctactccaggctgccaacctgagattagagagttcatactctgattggtccccatagaattaatcaacggtggccaagagtgtaggtaactagatggctcattcagatctgatactcattcctggacttgtcagctgtggcctgggtggcagagtcacttaaaaacattgcagcatcttcagaaatctttggttggagtagaatagatgccaaaaaaggtagttgttggcttctgatgaaatggaagggtcaaattaaataatagctgaggtctcatcccttctacccataagattctatgatttatcactaaaacaatcacatattaggaggtcataaataattctacacaagttcttctaatctccatattttcttacacctatggtcaaatacatctctcttgcaagaattatataaccaaatattacatacactatgttagaataaagaatgaacactatcactagaacttggaagcagatttaaatactgaaaaatattataggtatcgaaaagaccctttttattctggcagaaatatataaatctgtgtgtgtgtgtgtgtgtgtgtgtgtgtgtgtgtgtgtgtgtgtgtcttctggtgctatttctcaaaagagtttttttttggtagattttttttggttacttttttatttcattttgttaagccatcaaaagctttgagattgggctgggcatgatggctcatacctgtaatcccagcactttgggaagccaaggtgtgtagatcatttgagttcaagagctcgagaccagcctggccaacatggtgaaaacccatctctactaaaaatacaaaaattagctgggcatggtggtacacacttttaatcccagctacttgggaggctgatgtgggaggatcacttgaacccaggatgtggaggctgcagtgagccaagatagtgccactgcactccaacctgagtgacggaccgagactctgtctcaaaaaaaaaaaaatgctttgaaattagcctttacctgtgtgtactacaatttaaaaggccatctttgaaaagacagtaaaacagacttttactatgaaaagctaccatctggaacccttagtaaactgactgttgtctcataaagagtacaaccaagcctaatgcaacttaattgttcacacagttatgtaagatgtacttcttctataactctacaggacttaaaagaactcataatactatatgattgtattatgggttccataaaacattatgacaatgtattttctggaaaaatgtttcctagtgaacatgcataccccagacattttacctttctcttaaattattccatctgattttactaccttgctcttgctagagttaagagttttctgaaagcttattcagtgttaactaatgttacttttcctgggccatttttgttggtattgagttttttctttatgtgatcataaagttatagtttagaacaaggttattttgttgcaagagtctatttaggtgtaatattttttaagcaaattgaagttgttctgataaatgtttatctaaattaaaatataactccataaactatgatgtggccatttaaaggggaggtatattaactttgtggaattgtgccattaaagacaaagaaaaagaaaaaagaaaagcagttggctggatgaagtagtatagaattgcaaacttacatgagataataattagaatcaataagacacctaatggaaaaagaatattcatatgatatattcattcattcaacaaattttattaaacacatcatctaccaatgaatctatgaagatcaggtactttagcaatatagaacaatgtacaataacacataacataagacagtccatgtgaaggcagttcattcctggtgtggtggctctattgtcagcataaccctgtgttactttcatctttctgcttcagcacctagcacatcacttctgttcaagttcacttcatagtccaacagggcagttgaagcctgtcttagtctgcttagttgccatagcagaataccatagactgggtggctaatataacagaaatgtattctccctctgctctagaagctagaaggccaaaatcaagttgctttcagcttgatttttgatgaggcttcccttcctgtcttgtaaatggccatcttcttgccgtatcctcacacggccttatctctgtgtacatagtggagagagacagagagaaagggggtggagagagagagagggagagagagacagagagagaaaaagaaggaaggaaggaaaaagagagagaaagaagaaagggagaggaagaaagagaaagaaagagaaagagagagagaaagagagaagaaagaaagaaagagagagagagaagaaagagagagaaagaagaaagaaagggagagaaagaaagacagaaagaaagaaaaagaaagagaaagaaagaaagaaagagaaagaaagaaggggaaggaaggaaggggaaggaaggaaggagagaaagagagagagagatctggtatccctttcttttattataaggacaatggtcctatcagattagggccccagtggttgtgatttcatttaaccttaattacttccctaaaggccctatttccaaatgctgtcactttagcggttagggcttcaacatatgaatctcaggggacacaattcactctattgagtgaacgctaactattatacaagagttcataactgagagaaggacaaagaagaaaggtagaagaaggataaaagagaaagtagaaggacgtaaaaggcattctgagttgaatcagttctgcacaggggatttctgggatatcccatacaatacttccacttactttttttgggccagtatttagtcgtacagctatgctatctacctgttgtcttctggctgtgtacactgctgccccaagtaaagattttattactaatgaaaaaaacggatattaagagctaataagccttcttaatcatatccagaactgtgctaggcgttgagaatgagaatataagttcttatttttaagtactctaaggaattcccagtctaacaggagactagtacatgtaaaccagttacctttaatataaagcgatacatcctatgggataaatgtgtacaagttctgcaaaaacagaggaagaatgattatcaacgggggagttggggagagttcaccaggctaagaattgaagaaaggaatttccagaagtggggaaaactttagcagaagttcgattgagaatacaagatgtttcagggaactgcgcatattgaagggtggccattacttgacattctgagccagagtagtaatgagattggaaaggtcaaatgagccctcattttaatgggtctaaaatggtgcttaaaaagtgggacagcatttattgggtgatgaatttatagatgtgtgtgtgtatatattttgatacaagaaacccttctgaagaaattagttattagattccattgatgtcacaaggtgttctttttgttgttgttattggttcgtttgttctaatttctgcccttttcaagattcaaatcacaacttaaaagcaaggagttgcaagaatatatggaatggtgagaaatgattgatgttagaaagctttcgaaaattgcaatacataaggaaaattgtccaatgcacattcttatttatctgcatttatctttctatatcctgttgaactttgccgataattgtagaaacaccttggcatttctttcttccatctttatattttcttgatatcattagaaatagatgttcagtctacctcttgcatgctgaccaatcctaaattgggcgatgacctatttattttgcatcttccctgaatgcttaatcttcatgaactagaaatggccagtagaaagtcagtaagtgttacttaatttacttccgtatttattaaatttctcccagagtaaggaattatgagttcctggagcagcacatgtgtctctttcttacagaaaatttcagttccatggtgaggattatttgcacatctctgaagaggcaatggtccatccagacaaaatagcacagagccagtacataaaataagaaagtggactgtggacaagtcctgacaaaattatggaaagaggaactagtgaaaattctagcaagtcagtatcttttctggccagtacatttgtgtaagcaaattgaactttaatcataatatagtgccaatttgatttccaaaatctttgtctttttttggtcccgccttggaagttgaatctcagtcatgtacaccagaatatgaatgcgagatgacagctcccataacaaatcacccttggccagatttccgccacttggttgttcattttgcctacctctgaaattagcaaatctctgcctttgtctacttgtgccttctcagatctgctgctcctggcccattccttgatctcaatgtggctgaaagtattaagattttagagcatgtataaagataataaaggtcattcaatcaagctcttctattttgtgcattttttgcttctctaagaagcaagaatggcactgtgatttcattgttgaaatagttaagaaaataggggacaattttgataaaattagaaaatcttagagaagtatcctgttactacgtcttcaaatgtataatgataattatacaggaaaatttaaaggcatttttatcataaaatgcttcaagcaaacgagaaaattatgaggaataatatatcaaatagcaatgtgccctctacccagctttgcaaaatctaaacatttttctgtaattgtttatttttcataagaaataaaactttattaggatttttgagaaagtccagtaaagaccaaacctcttcctcacttgagatcagaaccaattgggaaatgacaaagaatcagactgatgaatcagcatggctgatgaattaaattcccactactgaaccgtagaggaggctgtctacactccagcgccagccgagagcctgacactggacgaacaaagcaaagcattttcttaacgtaggcaggctcagttctaaaagaaaatgagaaagagaggatggggctggccacacagtgtctccttccagactcaccaatcaattagtgtgaaggaagggcaggttgagaaatagccgagaagtattacaaccggtgaggcactcaccccatggaaggaaatgtcagaagtggaaagttagcatttccctctaaaaacatataaagttaaagccatgtttttattcccttttagaccctattttttcctccccttctcccatgcaaatgtaacctctaccctgaattttaagatccttatatataacaaatacttagtcactagtgttgtgattctaagtatcagaatgcttccatttaagggaaatattggctgccggttcttggggatattgactataacatctgcagttacttcagtttcaagatactcttgtagactaatggaaagaatgtaaaagatgatgctactagatagaaatagagtttggatcgaaggatgttactgcccaactaatgttctaagtgctgaaagatcatcctggtcttagcaacagcaattataactaagaaaacaaagtttagagttatctcaaaacagaaaagaaagcatcaaaaagttatctctttcctctgaaacaaaaataagcattctagtgacccttgccttctgaaatatttcaacattccaagctactgagacttttcttattttcttataaacaaactttaatgccctttaaaatactttctgatttcttttctaagcgttttcaggtgaataacaagttacattcgtttggcttattttctcttcataaaatggacaagtttttagttgagcagaggaaccgaaaaacttctgaatgaaggaaatatttggtagtgaatgatataatggaaaattgctataataagtagctgggaagaagcaaggaagggagagaaattatacagaatcattttagtttaagtggcagtgtatgattagaagcagtactgagacattgagaaaaatagtctattacataccataggaaaatcaacaatggcatctctgaatatggaattgctagttaaagctactaggtgactctaggatggacaattttttttaataggtttttggttttggttgaggtacactgtcagagtgtgcacagtatttcattttgttagttagcttcatgaagaccttaatttattaatgttaatgattgaccacttgtgtgttaaaccagaaagtatttagtcagttgaattccatcacaaaagaaatgttatgaatccgtatattttgcctcctgtttctgagaaatatggcaaataaaaaaagagaggtcaaactaaatctaatacctctttaagtcccacagcaaaataaaacataggtaggcctcattttatgttttgattatgtcttgaaaaccttgtatacaagttaaaacatttgtaaaagtctaggcatgcttcatttttgaaataatgtggtagataacttaaaatgccagtaattattttccagtctaaataatcacaacattgagtcaggtgtggtgactcacgcctgtaatcccagcacttcaggaggccgaggcaggcggatcactcgagcccaggagttcaaaaccagtctgggcaacgtgacgagcacttttctatacaaaaaatacaaaaattaaccaggcatggtggcatgtgcctctggtcttagctacttgggaggctgaggtggaagaatcacttgagctggcgaggccgaggctgcagtgagccatgattgcaccactgcatcctaggctgggtgactgagtgagaccctgcctcaaaacaaaaacaacaactacaacaacaacaacaaagtcacaacataatttaatagattttttcatatgttggaatttcactaagtgaagaatacctgttatatgttatatgttataggtgataccgtaaggcatatgaatgatcatatttctaaaaaactttttactttggctcctaaatttcaataatctaaataaatactttgaggtatatttgaatatgttttttgttttcattcatttctattttatttttatttacatctgaatgtgttttcacgaaacaattttagctccaaactccaaattgcactattagggaaagggagaatagcttttggctcttcttgtactatttgaacattaggtaactggttactgtcttctgcacacttttaggatgtcattggttcaatctcagggtcaagtcttacccaactgtcctatgtactctgtccattcatgccttaaaagaaagaacctgaagaaaaagttgtacctttattagcaggttcttttaaatgaattttattaattaacatataatttcttctcagtaagatatgtgagctggcaacacattgccaatcctatggttatttttgttagtatgcacaataggtagtttcatgggtcaggaaagcagaaatagtatacaaggttaaagaaatgattttcagttctctaatttccactggaattattaaacatataaataaacaaaaaagaagtaagataactcactgtccctaggtgaagcaatgaaagtaagtgaagtagtaactgtgtctcctgtttcaccctcatgcttggaacatgtgtatgccttcaaaagctcacatccaagtcatccagaaaaattagcctgttaaatagtataggagaatcaacaatggaatctcttagtgcctggaatttgcaattgccagttaaagctagtaggtaaattaaaaataatttattttacagtgtatactacctctttgctttactgaccctcaaaaacgcctgctgtgtatactaacaaaaatacctttataactggcaatatcttactgagaaaaagttataagtaaatgaataaaattcatggaaaatattccactaacgaaagtaccacttttattcagattcttatacatgcaaaggcttacaatatcatatttctgggtaaatacttaaataggatgccaccctgctttgttttgaagcgtagtacgcctttccgtatgcagtgctccatgctgtgcagtcacggaaattaatgagttcagcgttcaggatgccagggcagctggagaacagagttctgtgctcatgtggcttacacaaacacacgagttgtgtttcccacagtgggatccagggacccctgaggttctgcagcttttttatttggtgaaacatagatccgaaagatgatgctgatgtggtgaagggggttggtttctgaaactgtttaagaattttagagatcaagagtaggtctgagaggagctggcaaagcaggcatttatttgtggtgggaggatatggggaaagagcagatgtctgtagatactacaaaggaaaataaacaccatgaaagaacaaacttatgtagaaaaattttaaaggaagattttttaagaaaggatgtttgggaaacactctaggagttattctgggtagcacttataaaatgggacaacttcttacagccagaatgacctttatactgaaagtcttcatttcttttgatttattccatcctgtcccatttaacaaacttgtattaaacagctactttgtatcaagaactatacttccttgcctcctttccaccagacacagatatacacatatacacacactcactttgaagttcaaataccatttgtaataactggagacccacaggactttagcactaaaagtcaaaacaattcgcttgctatggcaagatgaagttaaaaagcagcttcccaggatgaaacttggaaaatgcttaaatactgaggtgtttatttggatttgcttttctaaacttgttgatggaggtaggtatcttgctgacatattacatcatttctgatgaaagaattttagtaagatttcttgagccagattttcttcttaacattaattgtattgggaagttccaattgtttgaaggagacactgagttggatatattattttttacatcaaatataaattttctgtatttgagattatgatgtcatttccaaatggttgtgttgcttctgtactcattggccaaggccctataattatttgtcatattttaattctctttgttccccatatctttaccactagaggtctgtggctcctccttctcaaggttatggtgctataaaaatactcatttcagatttcaaaccaactagaatgatgtagtactatagagtttttggattcagttatactttgagtcaaattttatcttttacagcaaccatatacatccacactgagatcaaactcacttaacctattaagagtaataaaactgattaaaatttccaacccataagactaatattataaagttgttatacattaaggaaaagggcttccaactttcacaaactcttattactaaaatgtttttcttccaacctcctgtattgcctcaaaatggaatatatttcatctgaatttagtaggtaaaagtaaatttggagttatagaaaatacttaatatatcaccttttagttacagtgagaatatatgactttaggagtttataccatgtgaatggggtgaattaactctttccaccaggaggctttggcaagaggtaagagctaccaagaatgtaccagggctcaggcttggggaagagaggggcctctccagctcttcattatagagctcatactttctagatatgctgtctgattctcaggtggttcaggtcggtgaattccttagtagaatattaatatactagaaagagtcactgcagggtcaccctgtccttgtaatagacttgcaacccttaaaataggttagaggggagtaaattttcattagagtgaaagaaggcccaacttgtgattggctcagatcctaggtggtatcacagatatgcatcatgttttgagcaactgagatgagaatccaaggactctaactgaatggaatggtgtcatctgtactcctcctccctggctagctcttccacttagaaggcctgacaccctcatcttagattttcttcatgtatgtcattgcagccaagtttagaaacaggagatttgctatgaaaataagtccatgaatctgctgtctcatccccactgatgtaacatacctgtattgtgtttcaagatacagtcatcaaaattagggaaaagtcctcttttgaaagaaaaatcaactgccaaatggtatactgattctttggattctacctacgaaatcagttagctcattttttgattattctcttttgctaaatgcataatttgtatttcttgcagcaattaatacctgaaagttatttgtaagctcatttcaaatgtgataaactgaggttcatagaggtgaaatcacttgcttttttttttcaggagcatcatcttttttttttttttttgagatgaagtctcactctgtcacccaggctggagtgcagtggcacgatctcggcttactgcaacttctgcctcccaggttcaagcaattctcctgcctcagcctcctgagtagctgggactacaggtgtgcacctctatgcccagctaattttttttaatgtacttttagtagagatggggtttcaccatattggccaggctgctcttgaactcctgaattgaggtgatccgcctgacttggcctcccaaagtgctgggatttcaagtgtgagccaccgtgcctggcttagcatcatctttttatgactgtatttccaggccctaccatatattcaattcagagtaaacacttggttatatttgtggagtagtggaatatatgaatgattgaataaataatatagatgaaaagattagttcctgtatctccagggatcactatctttctataccaccaaagaatttgccctaaaaccattcactgtaaaaacataattatgattatatcttgtcttaatcttatgtcattatttcattccttatgttaaaaataataaaaataatgttaattctatgatttctcctatttctaaattgcataaacatatgtaagaagctactgaaataaagcaatagcattttaatacattcccttgtcaccatttatttgataccctcttgccttggcttggaatttgcaatattcagaattgcatttgttgttgaatattcctatctggatattactagattgggatttctgacccacctagtccaaagacagaatttctttattaagaagccaacaactaaacaggctacagtaatactccttggaactcaaggatgcgtacaagagggtggcttccttcaatctgtcaacagcctctgtcacctccatttatcctttttctgccagtcctattctcaaatactccagagctacaagatgattaagagccatcatgagacttttgaggattgttgtgagctgggttgttatttttatttttatttttattaatcagaccaactcaatagcaccctagttacagaaatcctatgatttggcctcataagatcaatgttgaaatcttgcttctgtcattaatgcaacctggcttttggcaaatcactcaacctctctgagcttcagtttcttaatacacaaaaagaggggaatgtctgctgtcctgcctcacctcctcaaattattgaatagctcaatatcattactgttattattattattatattttaaaatgtttgtaagcagaaagcactgcagagctgtaggttgcttctccctctttctcacttagttttcttacatatcaaattccatcctggggtaaagtaattgctcacaatttctttttataagagatatccttcaacaccagcaatttcatctttctctttttttaactcttgcatatatagcatatataaccatatttgaatgggagcaagtcttttcatttcttttctacttggacctataagttctagctgaagtccttcaagaagttagatctggagctctgtggccaggacttttctccttactcagactttccagtcattccccaaatcctttccagcccattgctattgtagaaaagtcttctccccaaatttgcctctcaggagatgcagttatgcagactaatatgtggctgtcttctaagctcatcctcatatcactttgtactagccctttctagttttaggactaagatgtaaaaattgaattaatatgaatagtggttactactttggatttggaagcctgtggaaatgtgggcacatttctctgccttcccaagctttcttctccttattttcagaatgatgatagtaatggtatttaattatagagttgctggcaaattaaatgagagtaacacatggttagtacacaatatagttattatttataaggggaaaaattactggttttcaattgctggtacatgtgaaatcagaatttcttttgacatctgtcttatctatgtttatttcccattattttttgtattttttctatattgtctctgaagccacctctgtgttttgcttttctgggagtggaagtggaggctcggttgtgaataagtacaattttgctttacttctggtacataaaattccaagacaacttagtataacaaaattcacattgaactaaaagttatgaaaagctgcttttactgtttactcactcctttaaatcaaaagaactggatgtaaactatttttttatgtcatctcctgttcttcaggctcttcggtgcctcagaaaacataaaagagtctgatttacaatcattttgggcaaattgcctgtagaattctaaggacaggaaatgaaaaaagaagtacagcacacacccccagacattccacacaacatgtagaataaataaacagccccaaaaaggaaaccaaaactgcttggtcttatgttgaggagggggtaccacaaatggcttttggagaaaatgtattaaagatgatgacatgctagaaaaatccttcaggggggtgaaattgaccctgattaaagatgatccttttccccttttctctacagcatagtgagtattttttatttagataacttccattacctgtattgacattatgaaaaagaaataccacgttacagagctgtgctttccaaaccttaataggcagggctgccctggggatctcgtggaagcgtaggtagtgattcagggaatgtggatagggcctgaggttctgcattattcacaagctcccaggtgatacagatgctgctggtttatgagccgtggttggttttcggtcatcttcttcaacaaaataattggtggtgatgttcttgtcttcatctgttcaagagtggttttcaactggggacaattttggcctcatgggaatttggctgtgtctggagatttttgattatgacaactcatgaagtgctattggcttcatgtgggtaggggacaaggatgctgctaaacactctatagtataaaggatagccccttataacaagaattttctgacccaaatgtgaatagttccaaagttgagaaaccctgctgcagaagtattattttatgcatttcttgtatcaaaaaatactttcttgaaattgttcaaaaaataaatacacaaaacctgtgagagcaaagaataggagcatctactacagtcatgcatcacctagcactagggatgtgttctgcaaactgtgtccttaggtgattttatcattgtgcgaatatcatagagtatatttacacaaatctagatggtagagctacacatctaggctgtatatcgcctatgtcttctaggctacagacctctacaagtggttactatactgtatactgtaggtcacggaagcacaatggcggccgggcgcagtgactcacacctgtaatcccagcacttctggaggccaaggcaggtagatcatttaaggccagcagtttgagaccagcctggccaacatggcgaaactcagtctccactaaaaatataaaaaaattagccaaacgtggtgtcaggcacctgtaatctcagctactcaagaggctgaggcatgagaatagcttgaagccgggagacagaggttgcagtgaacagagattgtaccactgcacaccagcctgcacaacagagtgaggctcagccttaaaaaagaaaaaaaaagtaaagcattagtgtgtctaaacatatctaaacatagaaaaggtacactaaagctattgtattataatcttatgacaccaccattgtatatgcagtttgtcattaaccgaaacatcattatgcagtgcatgactatttagtttagagagtaagcagcatttaaaactgtcttcaaatatgtgaaagactattatgcagaagatggtaaccagctgttctctatcacgctggaagaatgaacaggaaatgtacataaaaggacccgtgcaattcacccattctttttctgcttccttcatgccagctagacaaatctcttcatgatcttgcaaccatatttgtcctggcctgtgtcttaatacttgcagagaccctcccaaatcctgggtacacattttcttttcactgccaaatctcatctctttctccctttaaaaatcttaattgaaaatttctatctccataaaatcttccttaactaagatgaaatagttgccagttcatctttaactagagctggcatacttcttccttcaacatgttatctgtcagtctgaaaatatgttactgcccatctgtgtacaaggagttgtgctagattttgataaaggattaaaaaaaggtaagtaagagagtcattgtttttaggaattttccaatttggggggaaaaatctgacacagataactatatagtatttaataattatctccatgagaggtttcttaaaaaataagaaaggaggttttagaagtttaaagattacttctaggtagggaggtcaagaaagactttacaaatagatatatgggtgtatctttttttttgtttctttgatgaatttattcttcaaggaaaaagcagttactattgtcgccaaaatttaaagattataaattagagtagtgtggatttaaagtatatttatgaaaaaagttcatagtgagcaagggttaaaatattagagtgatttaatccactcacaatttataagactaggaaagataatttttcaggatctatgtggctatatggtggttttaacaaagaagactgaatttagccacctctgaatgtacctgatgaggctctgtaattttataagacagtgctctttggaaataattttgtttgtttgtttgtttggtttgtttgagacagtctttctctgttgcccaggctggagtgcagtggcacaatcttggctcactgcaacctctgtctcccaggttcaagcggtgcccctgcctcagcctcccgattagctgggactacaggggcatgccaccacacctggctaatatttgtatatttttagtagagatgggatttcatcctgttgaccaggttagcctcaaactcctgacctcaggtgatccacccacctctcaaagtgctgggattacaggcatgagccatcatggccccctggaaagaattcttagttacatctaggagaagaatattttggaacttcacaagcatactttaaaaaccagtaccaaagcaggaatttggcaccatccatttgagatggtgattctagaacttctttaggagacagtcttacttactaagagtttccacaacctgtactatgagaaaattaaaaagaattaaccctcatcaaatatgtagtatgtgccaggcactgggtagaccctttagatatatcatgtgatttaatctggataacaactggtgaatttatcaacaccaacattataaggaggcttcagagaattagtataaatttccatccaattaaggaagggaaacagagcaaatctcaggcctgcataggaagccatctctgagtggagaccatcagcttgccttttccttttgaagcagcaaggacaacatctatttttataaagctttacatggtgatatgtgcattctctgtagttgaaatgggaaaatgagctgttcagagttcattgatggccatggttttctgcagggctcactgctggaaaactatctgcaactgtattagtcatatatgaatctgagtttctgcctgctcttttccacacattctgaaaacctcagctctaggaatggtacagatattaaattagtatggaatttttttgaatgttaatatttgtgttctttaaagtcattatggttttttattttttattgtattattattatttttttattacactttaagttctagggtacatgtgcacaatgtgcaagtttgttacatatgtatacatgtgccatgttggtgtgcggcacccattaactagtcatttacattaggtatatctcctaatgctttccctcccccctccccccaccacacaacaggctgcggtgtgtgatgttccccttcctgtgtccaggtgttctcattgttcaattcccacctatgagtgagaacatgcggtgtttggttttttgtccttgagatagtttgctgagaacgatggtttccagcttcatccatgtccctacaaaggacatgaactcatccttttttatggctgcatagtattccatggtgtatatgtactacattttcttaatccagtctatcgttgatggacatttgggttggttccaagtctttgctattgtgaacagtgccacaatagacatacgtgtgcatgtgtctttatagcagcatgatttataatcctttgcatatatacccagtaatgggatggctgggtcaaatggtatttctagttctagatccttgaggaatcgccacactgtcttccacaatggttgaactagtttatttggtttacagttagtaatacagttaagagtggagaccttccttgagttttcattctttgagcttctttttttttaatagaaacagctttcgatggtaaccttaaccatgccttccataactcaaaacatgatggactcttagttaactctatgtaactggattttgtttttctcctaaagttgttctacgctgctgcgtatcattcaatgttgatgtgaaaaattcaatgactttcagcggcccggtggaagacatgtttggatatactgttcaacaatatgaaaatgaagaaggaaaatggtaagccagtgggttttgttgttgttatttacttatttcacaaggtaatgagaaatattatttgactacagtttcttttatgaatgaaactttaacagaatgaattatttatggtagaaaatgcagtctagtcatttggcaatggaagctaacttaaagtaaaaaaaaaaaaattccttggcaatattagaggaagcgattagtgatttctgttgatgcctggattgacctcaaggaaggtctgtatccaaaaaagctattgttccataattatgttttttggcaagaattctttaattgttctcatttcagagtagcttaaatgcacttgtttgaaattcagtaggaaggattcggaggcaaatgagatggtgctctgaaagggtttaacacacttccgtgagtttggtctttactgatctactgagcttggtctaatgtttataatgaactttattgggtttctggtatctaccttcaaaccctttaatattggttaagttcattgtagataggattttttttttttttttctgagatggagtcttgctctgtcacccaggctggagtacagtggagcgatctcagctcactgcaacctccgcctcctgggttcaagtgattctcctgcctcagcctcctagtagctgggattacaggcgtgtaccaccatgcccggctaatttttgtatttctagtagagacacggtttcaccatgttggtcaggctggtcttgaatttttgacctcgtgatccacccacctcagcctccgaaagtgctgggattacaggcgtgagccatagcacctggccgtagatatgatttttaaagtatatttaacttgttgaaaattatataaactgaatattagagttcttttgcttaatatttaatagaatttttagtaaatgcaatttttgtttaattggacattctaggaaagaagagcagtagctaaactttagtttaataacttaaactaaacaagcctacatttttagtagctgtaataataagcaaaaagagatttatatctacttggataataaagatctatgaatcactataattatttcattaataaaaatatgtggattttctgcattttgttttatcttttagacttggttaatttgataataatgccctaaagactataaaaagtaatgagttctcacattttttaagtacattattttatgctaggtataaactagaatttgttgagatacttcactcttttattctccttacaaatatctcagatgacaaacccaatgctacatgctaaatttttaagttccctttccctccctcctatactctccacccatcccattccccaatttttaaggttaaatgagtacagccctccctctagacaccagctttattcttttaggaattataccttcaattcaggtacctctgggagaataatggtgagtagaccaactggtcagactttgtgcgtaagctataataaacagaaatgcagtacatgttattcttaaaaagcttaactttacataaacacatataaaagttaattttcactaattactaatagttacacaaattttaaagaggagtatagcaaatagcaagctttaagacttaaaccacctacttaaaatgaagtatctcttttaaggatggttaaatattgctaaaatattttatgaaattctcattttcaatttctgatatcagaaaaacctgtatgttttctttcttatccagtcctgtctctgtgattttagaaaaatctgatgtcagaagtccttaattatatgaatgaaccttagtagagtgaaaaggggttcatatttctttttagaagccttagtgcccccatttgatctctttagtcactgtttctcatgataagaacctatcctattgtgagatttccaccctctaaattctacagtccctcctttcaaggcaccagaagtcaaagcaatggaaaattgaaaaatcaggcctgaatgaagccttgatgtcatgaggaatgtccttcctaaggttattctatctttgtagaaagttaaggtatggatgaggaaaaagaaagacagccaacactggttaaggaacaaaagagtgcatagattggatagtaagaataaggttgcaagaacgatgttgctaatggtctgtctgaatgaatctacactggactgaaccatcacaattctacatacatttgtgaggtaatgttaataagagatcggggactatgccttatatcttggtttacccatgaagctgagttgaattgtctctgaaaatatttgttggtgggttaggttttttttatttagccatagcataaatgtgggtcagtcaatcaacatgtatttatgtaatacattttatgtgtctggcattatgctaaattccatgggaaatatttatacataaaacaaatataaaagctttaacctagtcaaggacatacatgaaatgtttaggaatagagaatagtgccaacaaccagtgcagaatagactataaattcaatgggaattcaaaacaggaggagatgattcttggttcttgacctaagtcttgaaagatgacttaactttcaatatgagaagaaaaatgtcactccaagcttgggaagccacaagagcaagggcccagacttgagaataagtgaggtgagtgtgttggtaagtaaacaggtctcatattgggatgaaaaaagagaaaaggatgatggcagatcttgaaagacaaacacaggagcttggacctaagatgaggacgttgagaagccatcataagttgtcattttatgaaacttaatttgggaatttacatataaattggattggagaatggagttcctgaaaactaggaaatatatagactcaagaactataatctggtacttaagggatgagccttcaggctgtattaggggcaactggaagaaaaaagaaaggtgtattcaagacaaatcaagatgaatcagtaaatcttggtggaagtttggaaatggtcaatgaaggtgtaggagaggtcagatagattccaaaatttctgtactggctcattgggaaatgggttgtcattgacagagaaagggaaattcacttatcaggaagtgggtaagtctatttttaaatagctccagttcaaggtgatttctaggtagttggaaacctcagactggaatgcaggtaagagggagaagttaatgtgttagtggaaatgcctagaaaacaaagactgattttgcagcccacttgcaaccctgggcactaccccacatctagcatgaggccttatacataatatgcactcaatcattatttgttggctgaacaactaaatctagtttaacactctgttatcatcaattaaaaaaaagctgcataaaaaataaagttaaatgtgactctcctagggaaatgcaactacttaggaccagagctgtaatagatttcatctctacactcagtcttgtgcctttttcttcattagaactatatttaaaagtaaatgttgttaaaaactatctttgtggtaggtaccagactttacatattaatatgtgtgtaagtttgtaagcatttgaatgtagatgatatcagaaacctaaatctcacgttgacatttattatttacaatgattttatggaaaagttgtgaaaaatcagagcaaccaaaaagatgtgggcaattgaatttaaaagtaagcaaattacaaatacctaaatttccaaacttttaaggatagcatggtagcagcatattgttctaaagaaatctgggatctggtagtgcaaaataacctgtagaaacatgtttggatgttctgtaagtgtctataaaaacagatagattgcagacttacttcgagaaatgtgctacagaataattgacatatttggaggaacatggattttgttatttaattatctctagaggtaggcaccttcataagtcatatttactgctcatgctttcgaatttcataaactcatatttaaaaaaatcatcctgacccatcttacgtcgtgactatagtacgcctatagaaggagcacttgttagcccatgacaagtacagtctgtgtatttgaaaaacatagctttaattctttcgaaagaaatataagttgacagaaaaggtagccttatgtcctctttactgttcagaagtttgctctgaagtgtaatttatatcttttgctcagaagccacatgctttctcagtagcagaacacatcatacatctgattaagatcagctgttgttcattatgtttagcatgagctggagcatccaagtaattgcaatgtggttcagaagaattcagaaagaatataattgccttcataattttgctttgaggaaaagaaattcaaacatgctcagcacagcacaagccttccagatttccagatttagtggtaaacatcagcatggccaggtctcagccgaacgggaaaatgtgagatgtctgtttggggctttccactctaatctgttgctgctttgcttcattccttccagcatgtgtgcctacccttttaactgcccttcaagcaacctttcttgggggtttcagtgacttcactggacctgtctgatctcaaagtagattttcaggatccacccttgccaaccttcaagccaatgtttatcaattatcttgacttcatgccttttctctagaggatcctgctttatgccaggtcagggtaccaatgggctcatgtgattgatgccctatttccaataagtctgtgttgtaaaagaaaaaagaatccctgctaatgtagagctattccagactggggaggagagacattttaagggtttacacaattttctgtaacagattttaatatgcttattttacattgcttctaacgccttttgaagttgaaatttcctcattgccaaacttgtcatttctttggctcccctcatttccacccctccaccttttatgagcaaatcactgcagttaatgggtcactgtgtaagtttcattctctaagatgaaaaaatgcttattccatttatttaaaaagaaattggcgagcagaatttgcttggcactctgagagtgactttggcttgaactatgtattagacatcaaggcagagttagttgaaaaggatgttaatgaaataatgtaaatataagacactcttttccaagaaactatcttttgcagggaagaaaacataaatatgaaacagagacatcagacaccacctactcttcaaataaatataataatgggcataataacaagataactattgtgaatagcaaatatttctgcttactaaatattattataattgtagcttattcatggagaaaagtgtttctctcactttgatgatccttgagttgatcagatgtttctccagaaatgagtaacgatatccagaacatgttttgatcttctcagtctgcatacaggtcattacaaaaatgccatataaaaagcaagatctaataggaataaaacgtaataagttaaaactaacttgcattaaattttaaaataatgattctcacagtttataaaacaatgtgcctgggccttcaccttgaccctgtgggtttgggcggatatcattgttatcatctgtattttctagacaggaaactgagacagagaatgaatgtccaaaggtttaatatagcaagtatgtcacagggtcaggatatggaacaccagccttctgactttttagccaattctccccctttagcaacaaggattctctagctgtttgacctggagaaatgcctctggtgtcactcaaaggcatgtatagcatcccacttaagctgaatatatattctctaaaatggaaaaaaaaagattttacaatccagacctcttggctggtcacataagtataaattctcaggtctgccttattcagatttttaagtacttgacacagtcgttaattcattcattcaatagatatttattgaatgcctattttgtgcttggtactagtatgagcactaaggatgtgtttgtgaacaaaatagaaaaaccaatccctactattgtggagcttatattctactggggaatagagaacaaaaattaaataatgaagttaataaacaggtaggttacatcaaatgccagaataggatcagtgttgtgagaaaaaactgagcaagagagtggattgagaatgctggagattcctgaaattctgtaaaccctatgctaatacttttctaggatcttgttattttgatgcagttggagaaaagtgaggcttccttaggattcaagtggtaagatacacgtactttcaagcttgttattaaaagtttcatgtttgttttcaaagaaaacagatactaggaaaatacagaaaattagcagtcctatgatctgctaacctggtctttactattggtcccaactcccaaactccctgtctcaatcctgggctcctacactctaccactttctaagttctcactccgcaatcttcacttatctcagaatatgcaataggccgtggttgagattgctgtatcaggtcagtttccaattatcaccatatcctaagtgctttctcttgccctagagatcaaacataaactccagaccttttcctccagagccaaatgcttgccaaatctcaagctctctgttcctgtctataagcaagctttattctgagttctagccacccatactttctcattatcttcccttttccatcttcattctcctgtctccacacttttccctgggctatccatatctccctttccttctgccttacaattcacaatagctctcctattagcatgctgtacaagactcacttttcatcagttatcctagattttcccccacttgatattacatgttttccaactagtgagtcagttcttctctacaaacttatatttgttctattcagatgatggaatcttagaactggaaaggactttgagggcctaactcccatccactataaaaacaccttccgaaacatccctggccagctgcaacccacctcatcttgaccagaggagctgcctgacagacctacgtatgccttatcagtttaaatcttcatcgctctctacaagcccaccacccttctacctcctctgtaaatctcactagacaactgcagctattattttccaaagaagaaaaagagacagagagagagagagagagagagagagagagagaagccactaggtcaaaatttaatcctcacttcctgtttcagttaactattgctgcataataagtcattccaatacttagtcacttaaagcagcaatggtctataaattctcaagatttttgaggattgaataggtattcccctattgcctgggctcatcatctggtccctcaactggggctggagtgtccaagctggctttcctcacacgagtggaagttcatgctgtcagctaaagcaccaattctgttccacgtggcctcttatcctctgttaagcaacactgggcttcttcacatcctgatgttctcagctttcaaaaacaggtaaaatggaatctgcaaaggccttttaaggcctagccttagaagtcatagtatcatttgtgctgcattctattcatcaaaacaaatcctagattcaatgggtggaaaaacagattctacctcatgaaataataaaagtcaaagtcgtgttgcaaaagtgtacacaattccaaaccatcgaccacccttgcaaactgctcaatactgggctgctcagcgtgctgcctagggaatggtcgctcttcctcatttttaagacaaacctctccttctggatccaccctgtctacctgctcagagattctactccctctcctgtgaaatcaggatttctcttgttactgtttctttcttgccatcatttagccatatgcagattgcctccatgataaatttggacacatctcaagcccttaatggtttgtcattgccctgaaaaaaaaaagccacatttattaacactgcccatctccctcatttttagccaagttacttgaaatgaaatctgccacaaacatgtacctctcattcttgcctcctattctttatattgtttccttctttggtttctgtgacactgctgttttctgattcttgctccctttctgattacccttgcctagttttcttcctttgctcattgaaaccttaagtgttatttcaccttcagatgtcaacatttagtgctcttctcactatatttcgaggtggtaatatttacttttagggcctcaaccatgctcatatcatgctcatacatgttccacatggtttctgagatgttccccagcaagactgagcccacttgcctacagaagtaactcattatcagtgcatcctttcttggcctttcttccttcccactcttcttttccccatctctatacttatgcatacttggaattgcctccaaaaaacttacctgaaccaaagtttttgtcttggatctacttttggagaaacccgaactaagacagcttatatcctaaatatttatagagttagtccttccatcctctgtacttcctgaatccaaatcctcatctggattactttaggaatccatatcttgtcatttgactctaattttgttcctcttcaatttacttatgacacttcaagcaaataagctttgtaaatcaaaaaggtgatcatgttacacccctctttaatagcttcattggttcccaacttccccctacatagaataaagccaaagttcttaaagctgactatgagaacattcatgatctggactctttttacctctctagcctcaacttctactgcagttatactgagctacttggcatttatcaaaggagtggtattcttacttctaagactttgctgaagttgcatcaagttcagacctattcaatattgcaatagtacatgtatagttgtgcttctctctctaagttataagcaaactaaaaattgtgttttattcacttttgtatcattttatatcctcaggacctggcataaatgcccagcatgtaaaatattgttaataaacattaattactccagcctcaaattaaatactttctaaaatcgtaggctcatttttttctctaaactgtttttaactgtaaaaccaatttattccattacgtattttacaactgaaaatattaggaaaaaataatcgtaacctcattaatataatttgttatattcttgatgtattcctgattaatctttcaacatcgatgttagttgtttattcatctgaaataaatacctaataataataagaactaacatttagatagcacatactataagccaaatactgttctaagcattttatatacattaacttatttatttttttgatgatcctctgaaatggatctccattttatagataaaaaaactaaatcacagatggagtaattgacttgtcctaaccatatagctaagtgaatggtaaagccataatttgaactcatataggctggcaccaaagttcatgctatatttcatggagaagattaaattatttaatacacagaaagcacttagaacagggcctagcacatggtataaattcaataaagcctagctgccattatcagtggtagtataatgaacatagtaatttggtgtctttcatgttaaattagggcacagattttcactaaattagataaattttcactttgagttcgatcataaataatttttcatcctaccatacaatgaatgtacaatatgctatagaatgatcctgaaataattagtttttatttaccatatttcttttactctttcataattatatataacactatgagcattatctttgtgcattaagcttttccctcttactttaggtcattttatttaggatagattcccagaagtaaaaattatgtattaaagggtttgagcatttttgtagttctttatacaaatcagaaattgctttccaaaggcattatattaaaaccatgttttagagtctcaatagcttaatatttacaattgttttataaaatttattttcattaatactagcatgcctatagggcctacacaaaataaatcccatttcttttcaatatgacagactttcaaatatttaaattttcaaaatgtgtgcctaatcaatttgtacttcaatgcaacttctcagttctcctgcagacattctttctccatgccgaacatccccaactttcccagcatcttttgtctgacaaatttaccagactcctaactatctgagtcatagtctcctaaatacattccattgtgcatatgtccctcttaatttagatatttcagacatggcctgaccagcacagaacacagggggactatcactgcttgaccagggcatctatttccagcactgcagactaaagtcacattagcatttttggcactaaaatacgctgttgctcatgtttatgtgctatcatctaaatcccccatgcctttttcacatgaactcccattaagtgagggctcccacatcctgcactgatataaataatagtatgcagctgagcgaagttatttatgtaggttctaagtaaactttagtttatttatgtttattgttccagaatgttgagattcatctgaattcctaagtatgtatattgatatacttgataagtatttttttcttgctctgtcttatggtgctgattgataactatatttatactttttatatcttgactaaagtcattaataaagttgtcatctggctgggcgtggtggctcatgcctgtaatcccagcactttgggaggccaaggtgggcggatcacgtggtcaagagaccgagactatcctggccaacatggtgaaaccctgtctttactaaaaatacaaaaattagtcgggcgtggtggcgtgcacctgtagtcccagctacttgggaggctgaggcaggagaatcgcttggacccaggaggcggaggttgcagtgggccaaggtcatgccactgcactccagtctggcaacagagcgagactccgtctcaaaaaataaaaataaaaaaataaaataaaaaaataaagttgtaatctaacacaatcccaagtacaaaatctcatactatgtaattaagtcctttgattgctagcagccagagtttttggatatggctactcagccagcaataaatcagcaactgtggatccacccaagtatcttactatttactttagttcatccgattcctgaagatatcatgggagacttaaatgacttgttggaactaaaatcagttgtgattatatgttttttccattaattactgttagaatggttttataattctgtctaaaaggaaagtaagtgattttaacctggatctcataaactatccttattttctaagcacttataaactagcacatgctaatattaaatcttatgatgttccaatgtttatatttcctgacttctctataaaattagcagttcatcataggaaaaagtcacttatacttccacatgtgttttataagttaatacagtagcagacttagccaataattattgattatttcagtaccccaataaaaaatatgataaagtaatataaacaaaataataaagcaaaatctctgaaatatctatcctacatatacacacacatatacatgtatatacacacatatatatgtatatacacacatgtatatgctatatatgtatattgtatatgtatgtgtgtgtgtgtatatatactttttaatccacatcaatatgcaagaggtaggctctctgcttagtttacataacattaaattactaatagcatgattattatctgattatgagtgttattgtcaattatcttaaaatcagtcataaaacaactcatataaactgtttctcaatgttcaaaaatgtttactgatttatttaacttccagggtgcttattggttctccgttagttggccaacccaaaaacagaactggagatgtctataagtgtccagttgggagaggtgaatcattaccttgtgtaaagttggatctaccaggtatgtaaaattaaaaaaatctggttttaggccaggtgcggtgagtcacgcctgtaatccccacactttaagaggtcaagacaggcatatcgtttgagcccaggagtttgagaccagcctgggcaacctgacgaaacctcatctctacaaaatatacaaaaatagctggatggggtggtgcactactgtagtcccagctactcaagaggatgaagtgtgaggatcgcttgagctcaggagtttgagactgcagtgaatggtaattgcgccactgcactccagcctgggtgacagagtgagaccctgtctcaaaaaaaaaaaaaaaaaaaatcaggtcttaaattatgcccagtattctcactgaaaacagattttgggctgggcgcagtgtctcacacctgtaatcccagcactttgggaggccgaggcaggcggatcacctgaggtcgggagttcgagaccagcctgaccaacatggagaaaccctgcctctactaaaaatacaaaattaagctgggcatagtggtacatgcctgtaatcccagctacttaggaggctgaggcaggagacctgcttgaacctgggaggcagaggttgtgttaaggcaacatcacgccattgcactccagcctgaggaacaagagcaaaactccatctcaaaaaaaaaaaaaaaaagaaaagaaaaaaaacagattttaatcaactcaagaaaatattagaagtaatctgtgtgtcagaatggtcgagcggtctaaggcgctgagttcaagaagtaatctataatcatttttcatataatcatttataatctataatcatttttctataatcatttatcttccagattgacatagaatgccattttgattccctctgtccttaatttgctttagaaagtcatcaaggagcatacataaattagaataccgtactaattttataacttttaactctctgcatttttcagaattctttctaattcagtggtaatgtgaaagaacttctccaaataaacctgcccaccacattccctccacaaaatttaacttagtgcctggttttcaagaggaaatagaatcagaggaattgtaatagataaatttaattttaaaaatagaatcacacaagataaatttatattgaaatagatgtatttgacataaatagtaggaatgtgaccggaaaattcctactaaaattatctagaaattagaaccctgtcaatgttctatacaatattacatactatggaaattatttatagccccacaagtttatttcacatattgtatttttcagttctcctttttttgaattttctatttgtttgtttttatgaactttttttctttacatgcataagcatacttataatagctgctttaatatccttgcctgataattccaacatctggaatatctcaacatcactttccatttattacctttccttgaggttgcatcacattttcctgtcttgtcttgtaattttggatcataacctggattatatttttgaattacaggtgtggagattctagattctgttatatgcctgtgaatagtcttaactttttttattagcaggaaatttacttggctcaactcaatttccaagcattgactttcttgcaatgacaagtagttaaaatctctattcaggttttatttcagctgggctatttgaaatatactctgcgcatttactattcaagtcatctagttatttggataaaatatatatgcatattatagaactgttgttttgtggctctttttctaagatatactactctcctcctcattttgcagctgctgtcattgccctcaatctctgttctctttttattcagtacagtaagactaggagttctatttgagttttagccactgaccagggccttccctaggttgggggtgggttaggggtgggggacaaaaacaaaacaaaacacaaaagcacaaaactcatttagtgccagtatcttcttccaagtatggattcccctccattttctgccacctttctagtgccttcaggtgattgtttcatgtattttttttaattcttcctagaatttatagttgtgatttgcagaggagctgttttgttaggagttactcctcccttactggaaattggaatagttttaaaattaggctagagattttagccacatcaagtacagtagggaagtttccactgtagtccctaattgtcccaggaatgctttttctgggtcaagctttgtatataaaactctaatccagattatacaagatcaatgcatacaatcgcccagctctaggtgctttcaaagcaaaccagactaaactcttggacaaaggccattgcgcagatcaggaagtctaactgaccattccagaatctctgcttccattccccactttaaatccacatacagtcttaacatgaaaacaacctctggaacaaacagtgagacaaatctttctcaacctgaattttgcctctttctaatattccactctactaagcagatttagaagttcttgtttttcctgtccagtctttttttcttttttagtgtgagaaagtgaaacttcttgccaatattgttaggctggcatgcttcatgcttcaggacccaacattcccttcagaatgtcaaatgcagtctctttactgtgtttcctttatcaaaactttctggacactgctctaatattcctctagtttcctttgtcacccaaaggatgtcctcatgattttggaagtcatggtcaaaaaactggtgtttgagttttcttttctgatcttctacccatttccccttttcttgccaaaaatcgtgtttcatcactggtcatttataacaaagttataagattacattatatctacagtattatgagattaaaaactttgctttaattagcaagaacgtgcaaaaagcaatcccacattctcattgccctgctagttctgcattctttcacagttcagcaaaactatctgaaatagtttctgggacatgagccaactcttcagccttagcttgttcattatattccttaagaagacttggaagactaattagttgaaccaaaagaagaatgtgctatgatatgagcaaaacaaatagaatgtcttaatgagagatgcttaaaatttcactttgtgaaacttttcctccctcataaaattttgttctatttttagttaatacatcaattcccaatgtcacagaagtaaaggagaacatgacatttggatcaactttagtcaccaacccaaatggaggatttctggtaagaatggagagaatgatatttattgacaacagatatgctatcattttaagtctttgtaagatctgttatataattttcagtctaatgatttctaattttaaaacaattttttaaaggcttgtgggcccttatatgcctatagatgtggacatttgcattacacaactggaatctgttctgacgtcagccccacatttcaagtcgtgaattccattgcccctgtacaaggtacagattttatgcaatgttcttgcatgtttgaaaagcctatgcaatgaatgagacgtatgtatacaaaggaacataccaaaaagcttaaagtattttcttagctaccagcattaccaatttaggtaaatgtttgctttgccagtatataacaaaatctgactgctatttttggaattgatattagtgtaaataactttacaaagtcatttttaaacatcatagataaagctgtcatgctgcttatatttaaagaatgagtctctttgaagaaagaagtaacttcatttgagatatgctcaaaaactgttttataaaaacttatataaaattcatattgagaaaatttgcaaagataactctcatacaatactaattaaaattcagtaggtatgaattttatcccacaccaattgttattgaaagcaatgaatatttttatcatctttactttttcgaaaactattttttattgctaaaacaatgtgtctactttggagaacatcagttcatcttttaaaatgaacttctttcagccatgaaagcacttcatatgcctctgaaaaaaatagattccaaatttgacaattgactccttttattgcagaatgcagcactcaactggacatagtcatagtgctggatggttccaacagtatttacccatgggacagtgttacagcttttttaaatgaccttcttgaaagaatggatattggtcctaaacagacacaggtatgtgactttgtgttttgatttctgttgttctaaagataaaaatgcacaaatttttaataaaaccaaatattctgaaagcaaattaatcaataaaactaaagttgagaatgaattttatatccatttcctgttcttatttctgataaaaaggacattactttaagctgtgttattttctatttttttcttttttcttttttctttttcttttttagacagagtctcactctgttgcccaggctggagtgcagtggtgcaatctcagctcactgcaaccttcacctcccaggctcaagcaattcatatttctcagcctctccagaagctggaattacaggcatgcgccatcacacctggctaattttttaaatttgtaatagagatggggtttcatcatgttggccaggctggtctcaaactcctagcctctggttgatacacctgtctctgcctctcaaagcattggtattacaggcgtgagccactgtgcccaacctaggctgtgttattttctaaacagaaaatattatgaaagctgccatttttaatgcacttgaaaaataactcctatagagttctataaactcatagtttaatttttacttaaaatggatatagccacttttggtaatgtcagagccgggtgtcagagtttgtaaaaactaatctgacatcccaaacaacccatcacattataatctctcctctcatattatacaaataagttagtaactgaccagaggatactacttaaagcctgttgtcctttctgttaataatttcttttccctaagttaaaagaaaatgcccctggctatctctgcataaaatcaaatagttgtttgtttatccccccaattaatatctatttctaaacacatctcctttattgccactaaatgaagtggaacttctcacacagcttttccactttagatactgagtttaatttaattacatttaattaaatacatttgactgatttaatgtttattaaactcatatgggcatatatattaaaatacagggcagacataatggataacaggcaaataaaatgtcaaaatgaagtcaatgcctcaggtcaggaattagccctagaatcagagcctaaaagattgttgtgtggtttggaggctgtagagagcataggagactttaagattatagtactgcaatcaatacagtgatcttccttttttttttttttttctgaggactttactttgggagaagtttctgaggcactgaaaaagcagactgactgcgttaatgtttgccacacctacattaaatttggaacataatatgtgcacatatatatacatacatgtgtcttcatgtgtctgtgtatatttatgtctctcttaatattttgatatctatgtatatataattttctaaaaggatggtggttgaaaatttcaaagttgaactcaaacttcaaagtgaaatgtattgctgcattccaaggctgaataggtctctgtagagagtgagtggaagggtaaggttataaatatcctgctggacaatagagaacttgttgaaatcagtgtaaaatcattaaaaatgaaatgggcttttacgtatcacaaaatgtaattttccctggaagtgacttatttgcaattgaccttctcaagtgaaattactagtggatggtaggggacctttttatcccgtcttgctacagggtacagggcagcctgcatcttaacagaccaactccaggatgtgacttgctcttccttctggcacctgttcctcatggacctccttttttcccttctgagaccactcttccttcctcctttcctcgcttcccctatcccttctctccttggccaataagatagcatagagtcataagattaaagctggaaagaatcttaaaggtcatttggcccccaacctcaatttatgaaggagacacgagaggctaactgatttgtttaaggtctttctgcttgctgatggcagattagaacacacacagctctctaattgtagcccagtttgctgttgttttttttctttctgagggctctacttctagagaagcttcagagccagtaccatctaatgcccctgaatagtagatttcaatccttttctatttcatgaggatgactgtcctcatccttcctcaggcagcctcttggctgaaaccgtgctaggcttggcaatgactcactgcctggactaataccttaaatgaaatggcttgtgttcccgctttctccacttttgcccatgatgtgctttctttccttcttcttgttttgtccatcccatttgatcttcttacctaactttttccttccaaagctaataacatgcttgaaatattttttacaatttattatacagccatctaaatattttattttacctttaaattcacttatgtatattactcttaaaaattaatttatttgtagctatttgtgaaaattagtgcagctgtgacatgtctgaagttggtccacaactttagaaagaaaatccatacggctcttttagaacaataattacagcttctgtgaagatctatgccagtgactccattttgtaaagaaataaataacagtcaattgcttatatgctcaagctattcttctgcaatttcgatgtttttcagttagaactataattaatttacatttctgtgttgagagtcctaaaagaggagctattctgcctgtccaccagaggaattctagcctgccagagtgggcaacatgaagttatatgtattttctggagggaacaatggctctattcagacaaattcaggagggcccttggggtccagatgctaccagtgaatgggaggaaaatgaacttaccctgcagcagaagagttcagttacatttaccaagatccaggacctcaatccacagagaagaatatttctgaatgaagcaccctgcacagtgtcgtttacattatcttctgacttcacccaagggaacctgatttttaaagagagaagctgattatatttctgaatttttatgtcacatcttgctttcatcattgattgtggagcttaaccatatacattcattcatttattcagatgtatgtactaagggcttactatgttccaagctctatgctatagcttgggtaatagtggggaagatgacagacaagggtgatgccttaatggtgcttctgtctaatgccatgtttctccaattatggctcatggaatttctgcttccaaatcactgggatgcttgaactataccccagattttcaaaatcagaatctctgagggtggggctataagcctgcattatatataagcaacccatatgattcttttctgtttgtttgtttttttgacaaggagtttcactcttgctacccaggctggagtgcaatggtacgatcttggctcactgcagcctccaccttctgggttcaagcaattctcgtgcctcagccttctgagtagctgggattacaggcatgtgctaccatgcccaactaatttttgtatttttagtagagatagggtttcgccatgttggccaggctggtcttgaactcccgaccacagatgatccgcctgcctcggcctcccaaggtgctgggattacaggcttgagccactgtgcctggccccatatgattcttaaacagattaaagtttgagaaacactggactaaggcataattattatattagtgtgcgtgagtgtgtgtctgtctatctgtgtttgctgcatactgtagataataggcacctcaagagcaaagtctgcatcatcttcttatcttcgtcagtggccagcccagtggtttactgtggcacagtaagtcctcaatgagcacttgttgagtaaatgtttgtatcatattgagtccagttttgtatttttctctgattattggacatttaatgagtcttttttctataactggtattttaaaaattattttaagtatattactttatactttattctctagtattcagtcttttctaatctttttttttctattttggcttatgttttatcagtgactaaattcataaataattctctaaaatgaagagattggaaaggacatatttaccaagccattgcttttgctaaataacatttaatagggttttaagtataatgcatgtgaactctttttaaagtttgatcatctttcagtggattcagaaaagaaatcctgtcatagaaaatttggaaagacatttccttttcaaagaaaatatgtgctgaaaagcatgcttatctttcatgtagtcttacagtaattctttccaaaaactgtttacttgacaatcaattctttttcttgattggttgctaatgtaatttaaatccatttgatttgtttgtttgtttgtttttagttttatttgtttcttttaatgaaagcattcaattccaccctatgattggcagaattaacttctggaatttattctcccctttatgtattctatctctgtttctgaaaggaacagatgtaaaaatgaattgtgagaaagattacccagaggagggtgcaaaagatagaaagctaagagctggacagagaacttttagactcctcatccataccaaatttctaaaagactatgaatgtagttgtaagatttgtagagaggatttctctgtagaaagagcctactcagaaaggcttcagtggggtcatacacatcttagtatgtgtatactggagttgggacacatagttgattgactaatgcctaactcctgtctgaattgtcagagcatgacagcagctgttatgtctagctgctgacagggaagtcggagcagaggtcactgcactggagtcagcctgcatccccagagattgttagaatgcatgtgttttcccaggattggcatgggtactcaaaagcaagagccagtgtgaggtcatgtcagggcctgtccttagggattactggaagtgagtggctgcctctgcagagaatgcagaagatctctgtaattcttaggaactgaggcagtgggatgcattcactcagggcaagggtgtaggtgagatatctcaatgaagggagttctccaaagaacccttgaaaaacttgtacatacctattaggacctgattcatcttaggataataccaatgcagtaataatttctctatccttatttatcttccctacctctgtccctggaaggtcagaaatcacagttagcactctaagtgaaaacaagtaggaaaacaaataaaagccagtcatgcatctttctcaactacaggcttcttacctcgtgtaagcccttagtagaagtaggagagaagatttaactacaaatgcgctttgatgtttcgccttgttggttttaatttagacagaaccatatgaaagtattgctgtttgatcttttttttcccaacctacaaatacagcaatttcatttggtacagcctaaattaaaatatataactttttaaattaacagacattttaaaactaagaataaaaaaaagtcataagatatttatctttccatctagggatagcaaaatacttcactttaaataaattttgaaggactggtgggccacaaataaaggttatattctaattacacctcctgtatttttgtttgctgtattgattagttacacatttggtacaatagatatagattgaatatgattcctattctctgcagtcatagatttgtcatttagtaattgcaagcaataaaaggcagagtcaaagatatggaatatttcccaaagtaactgttacctccaaaaaacaaaaataaaaaaaaagaaaaggaaagggggaaggaaggaaggaaacttacattaagttttccatgtgacaatttagtatacattagggaaatacaacacaacgatggaaacattcactctaaagagttactcaaaatccattctatgtttctgtgtggcccaattaagacttttgcaagcatagtcaaggaatttttgtcaaccaattttttacccaagacagagtaaaggctataaaattgccttttaaaaatcacctataaaaacaaacctgaaacactctgagcttgccattaaagatatgatggtgtaaacattatggaggtcttattgatcctcaatacctaaacataacattgcttttaataataaatgaagataatataaatatgtcaaataagtgtgcattaccctaaataaaaccagtaaattgtgaggcttgatataaaagtgaaatatactaacggaacaatgtctagattgttcacatcaaaagtgtagcatagcattaaaccaagcaaaatgaaacagagaaattaattaaattttaggaatattatttatctttctttttactgctgattttatggccatttccctagaagccttaaatctggggcctgattcattgtttgtaggtctgaaaagaagcctgagggagacatgcagccatacctttgtcagtctgcttacagtttccgaatgtggggtagggaatggggtgaatcttctctctcactagcctctagtctccattctcccacccctccagccatcaggcactagaataatcattccgaagtgagttcagaacatttccctaataacaaacaaaaaagaaacaaataactcttcttgttgcctgctaaataatatccaagctctctagtggactaactggcatctgaccacctggcccagccatttctcatgcatcctgcttccccttacacccgcctcagtcaattttttttttttttttttgtgggtggaggagatggagttttgctccgatctcagctcactgcaacctccgcctcccgggttcaagctattctcctgcctcaggctcccgagtagcttacccttcagccattcctgggcccttgccttccttgttcatgaagtgctgtgctcttgttacttgcttttcctgtgattccctgctccatctcaagcgctgtattctaggagaatttcaaatgtcactttctctgtaattttctatgattatcctacccactgttcttgagaaaaatgccttcctctcctatgttcccatagcagctgcaaccgtgagagcacatttccttactgctcttatcactcagtagcattgctctttgttttttgggtctgtctcttctagtagactgaattacatgacgacagaattgtgccttagtcttttcatttatggaagatagtctagggttttatgtttcctagcacatgacatgagccatttatgttgaaaaaatgggagtttttgaattttcaccttctcatgtataaaatcgttgtttttagtgacctctttcccttactttgcttcataaagtcatattgatccactgagctggaaggtacttgcttgtgggggattcccctggacaaccctttacattgtatttcagtcttttctttgcaggtgtttacccacctagccctattcccctcagccctaatttctcctatagcccttgcccttctccacaaacacagtgaattaactttgttttaacctctcctatctttgcatttttgagcctacgtcactttcattgtagcatcttccatgaagcaagagtccagataaagataccctttttctagaacctgtatctattatgtatcaactttattatgtttctgaacacttgtttccttaggaaataatcatctacctgtaaatcagtcccatttatatccctctttataatgacaaaatgttaaacctagcctctgctaacatagcttcagaatggtttgtgctaacagttaactgggattgtatcctgtattatcactacatttatatcctgacttagtcacactggaagcatgttgtagggtagggctttgtaccatagtttgataaaaggaaatatacattggccagacataaagcctgagctcttttcatattaggcaattgtgcatcttacaggaacacacaaaaacacctcattgtttcaccttgtcattacttctgtaaaggaacaattgacttggtaatattagttattgaatgaaagcccagaaacttagcttatgctgggcattaaaatttgggtgctggtgtaaccctgacttaacaagatagatatagaagataataatataattattaattaatagataactccattccttcataactctttgactaaatatacttatcctagttgagtttctgttgctataacaaaatacccaagactagacaatttgaaaaaaaaaaaaggtggattatttagctcatgattctggaggctgggagggccaagatagggtggctgcagctgttcagcttctggtgagggccttgcgcttgggtcataacatggtggagaaacaggaatggaagcagccacgtgcaaaaagaccaaacacaagaggcagcctcgctttgtaacaacctgttctcttgtagtaactaatccagccccacaagagtgagaactcactcctgtgataaagtccctcttgactcctctttttgcctcttaaaggcaccacctcccaacaccactccattggagaccaagcatcaacatgagttttggtgtctcggtggggacaaaccatattcaagctgtagcagaaacatagctactttagatacttctttttcttaaacactcttatcatttaagatagttgttaaaatcttaaacatgactttcagtttcataagagactaatccaaaaggccctcctttcagtgttttctgatagtgtccttcctttcatgttcacacactcacttttctccctctttcttctctgcacccaaaagaaatgaagtcattggataattaatttgctttaattgagcagatatttataaagtgtctggacgatcaagtattatgctaggtgtcaagagcaataaaaaaaatcactgaaatgttgttcctgattctaaaatcttccaatttagaaatgaggtaaaataatatattgggacagctacaatgcatgatggtatgtcataaatataatgaaggtgaatttaaaacacagaacaattagttgatcttgacaagtaagtaagtcttactgttgtagaacattgtttcccagtctgaggtgttgaatatgatcctcacaaaaaaatattactttaaataagaataaaatataccaggtcttccaattagtaatccacaatgcatgtttttaaagactctgagaaaactttcaaaagaatttgcttataagtctaaatagaacaagtagggataggagtaagagaaaaccttactcttttgcaccatttgcaatttgtgacagttttcatagtgataggagaaaggtagagatggggaggagtctgccgtaaagatatatatttaactttattttactcattgttttccaagattatttgaccatagaattcttttttaaatcaaacttagtaacatacaaagggatgctagtattcccaaaaaaaaaaaagtgagtggatatttgtgtgggggcttaccagaaaatatgattgtaaatctcatatttaagtggaatgttctaataagtgttacaaacctcttgttcatgtaacaaaattcatagccaattgtgtacctgatgtatgccatagcctgaatcagcctttaggtctctttggccttggattgtaattatctacccatctatttattttgttctacttaatcaagaggtttaaaccacatctccccaggaggtaaatgtatcctttccagttgtctctgaaaaggaattttccttctgcatgtgactccttatcccccgtgatattataagaaactgttctttctatattcatctactcttttactgataccacaaactgctctttacaatctctgggaaagaatgtccacatttaacccggttgcacctttttagctgtcatccctgcatacccatttctattcatcaaaatgcctaggatatttccacctccatgatttgttgtcatcagctctctatccaacttccaccatctgacttttgtatcatcccaacgtaattggctacttcaagtcaaatattaggattactggttttttttttcctttttcctctcaatttctaggatgacttaaactcctttaattatcatctttgacatattttccaggctgagggccactttgtttccttccatagtactttcataatctcttggctatttttgagctggctttcagattcaggaagctgaatcctccttcctccttgaggattttcacgtgggagagaataaatatgcttgtgattttctctcctcttgcttcctcacgatgttcatcacttggctcactttttaacttgctatttaattctcatactttatttgattctgctacatacatttacattatgcttgttttattagccttaaattataagctaaggtgaaatgggaactatctctgttgaattgaatctcaccaatattcagcacaacattacatttgtttgtttgtgatttgacccttgtctgtaatgaaaattaacactaggttagtgccaaagtaattgcggttttgccattatttttaataaatggtacccttttctggggaagactcacagcacaccttactctttctggttcctaagaaaacaagcaccccggtatcagccaggaactacattgaatgtcatttccctgagacttgagtttttccactgctccctcttcacatttcccagacttcgttgtatctctctttttctgcttatcattatttccctgctatctcggttttccatttgcttatgcgaaatgttacagtcatctagtaagaatgtcttagggtcagctgtgagcaaagcaaaacagcagtgaaggataagagaatatcaaaagccatgacatagtccatactctttacccctgcctgtccctctaaagttaggatgtacttgggaagatatagtgtgcactcaaacagttgagaagaatgcaatactcacagacaagtttgtttcagagttccaagaaggggaagctcaatatgggctatcctggcaacaaggtaagaaaagttttgcagagagagtggaactggaattaaatcttacaagattagcttagtaggagggacaaagaagtgcatttggtaggagtggagttcatattggggagtcctgaagatgggggtgaatggagaatttagcattggaatattaagggactgaaggtcaagaggagaaaactggattttaacatatggacctagtatttcaaggagtagcttgaagttttatctatttttaaaaaattagaataaaaatctatcttttaaagtatatttcgaagtcattgatacaggcaatggagagttattggaggtttttgaacaagtatgttataggatgaaagcagagtttcaggacagttagtctgccaggaatatgtagaaggatgtgaagagagtggaaatgaagagagggagatcagcagcaaagagactgaccattgccatggtccaagttcaaagcaatgatgtctggcctgagctaaggtaatgaggtaggaggcgagacttgactctggagtcgggctccaacaccagatcaaattgaggactagataaaacagggatgaggcagaagatgccttccataaacacgcccaccagggtgccatgttagtttaccattgacatggcaacaaccaggagttactgtcccattccatggcaatgacccaaggactcaaaagttattactccttccctagaaagttctgcatacaccacctcttaatgtacatgtgattaaagttaagtatgaatataactgcaaaactgccctgagcttctcctctctgcctgtgaggtagtcctgcctggcaggagcagtcacggagccgtaaggccaccagagctgtaacgctgcagcttcaaaataaagctgttttcttccacctctggcttgcccttgaattctttcctgagcaaagccaagaacccttgtgggctgagacccattttggggctcacctgtcctgcatgagtaggaatgcagggacacagttgacagctgccttagatccagctcccagaagcaaaccctgagaggacgattcacatgatagtgatatatttgtgaggaagcatttccaacagaaagcagatgaattggggaagcaaaacaaggtatcaacagaggacaaaggaaagtgtaatttcaagtggaatccaggcctcagcttgatatggaaggggagtttctacttgagtcaaggggctgatttctcattccctgcactcaccattgcctgtggatcagggtgatggggagctgaggaggacgggggactcccagacactcctggttttttcagtctttggggtaaagcagtctagtagctcaagtgcagtcatctgaagagagtctcaggtagagttgttagaagcaaagtatccagagcagataagggaataggcagttataactcatcttatattttaagatttacaaagaataagcttttagaagccaggcacatattggaggtggatagatggatgatagagatgtaaaatttaaagcactgatttctgacttaccaacattttgagttttttactattcctagtgtgaagataatttttccggacaatccaatggttcatagtaggttctttaagatatgtaaagtgtgttgtaaatgtaaagtattaacacacatgtggcaaaaagcagtcttgttaagttggcatctcttcagctcctctcatgtgagctcatccccacatgtaagtgagataaccctttttcccaaggagttggcagtttacgacaattagattaaaaccaataaatgagaacaacgtggactcattagtaaaaaatagttgtagtgtttgacagcgctcaaatatgcaacctcctttgagattcatggtcattcctttaaaaggagaccaggttacaatttgtgtgacttgtgtctagcagcattcaaagccacagaagcatatagagaggaggagataattggatttaacccgagttggaagttagccaagtgagtcattggagggaaaaaaaggttaaatgagttaaatgtttgcaaataaatgattatagtcattggaccatggaatctagtctaagtaccaaaaaaaaaaaaaaaaatggcagtattaatgaattagttggaggtcttgatatggtcagggaattagtgaaatgagccaaagttaatgttcaaaaagaaggacatttgaaattgggattgacctgctgacaaggtcttccaaatgacaaggtcaaggataagaccttgggagaagatggctagaggaaagattactgatgctggggaggtcaaagaaatgagagactagggtattccacagattatcagtggatactagattaatagattattaagtagatgccaaaattttcaagaaaaacaacaggagtaggagggaaaattttcaaagttctttagcctcttaatcaaataaaaacaaaggggaagaaaaacaaagcaaactgtaagatgtccttaattgatgagcaattaacttccacaacagtgtttgttcactttgatacctagaattagccataatgattatccaagtaacaaaaccattttgcttttatttacactgaacatttatatacccaaagacatgtgtatccatggatatgtcccttaataattattcagtgtttccaaggattactaatcaaaaactttagggtcattgaagaaaagaattttaaatttatgcagagggtaataaaaatgttcctcacattttattataaataaagaaaatatcctgaattgcagtcatagatgtgtctttatccactttattatttttgtgtaattagttggctgtatcctatcttgttcccaaagggtcttttggtcacctttattccaaatatagtagctctctcagaataggtggtaaaggatattgggtgaaagataaactcacagaacaaggctaacctggacatgaattgagcagagtgcatgttcattcagctgatgatgtaacctcatcttacaattacatatattctctagttatttcttatttatcttatacctaactaagcaactttaggagagaattcatatgttctattattttttacaaaatatgatatatgtatttatgtgtttgtttcatcatatactctaacatatctcagttaactagctagttaagcaaattcattgagtagccatgaagtggcagtggcactcagcagaagctagcaggttgaggtgactaaagaatggaggattttagatagatgcctttttactgagaggaaatagggtgattgaaagagcccttggataagggatacacatcttagactagaccccccttccaccacttcactatagggattgggtgttttcaactcagtttcctcacttatgaaacattatcatgtttctgttattataatttaaataattagagaagaaagttttaaaaagaccattaaatatatatcatagtattcttatttaagcataaggacataattgctccaacataaccagtgtactctagagggtaactcaaagatgataaaaattgctttaaatttgggcttctcttatttgtttctaaaaacacaccagaatatgcttttagtttccaaaaagacttagtgtgaaaatgtacatataaacagacatgaaattaagactaaagctttctgacatcagtgatttcagcagaggagcctggaaaccagttactgagccttcatgctacttaagaataaggttagactaagaaataggatttgctctaaagcaagtaacagaggcaacttcaccaacaggcaaagtaggcaattgccttggaaagaaggcaggcttgttgcaaattacctcccttacccaagtaatgaatcacctggaattcctgaattaaagagacattcctttgggcaaataattttctgagtctggattttgagataggatggttaaacaaaaagtcatcttcagtcacaatttttaatgcagattagtttattggttcacatcaacctttaaagggagatgtggaaaaagtgtaggagagatagccattactggggccaggaggcaggtgggaagaggaagaatatggagcaagggaaatcaaatctgggggcactttccctcctgtatttcactgcatgaaggctctgcagttagctgcctgcgttatccaatctgtggactaaagggaatgaaaggaggaaggcagtaggaaaggaagacaaaacaaggaaagaaggtggagtgggaagggctgatttgggagaaatgaggctgcagcaaggttagacaaagctcactgctcaagtgtgtaaccctgcaggctacataacctgattattcctccagcttcatggtgccctcttctttcctcacagccctggccatggctcactgcctttctttccattcttagggtagatctatctctttcccatcctggtcttcttcacatacacagtttcccctgtatggacgctctgcccttctagcactcactcttgaagtctcagcttctgagaagccttccctggacccccattttcagtctggcctctagattatattggctgattagggattttcccatacagtcctttccacagtttgcaattgttcatgtatttgaatgatcacgtgtttaatctctctctccttctagctttagagaagctccatgaaggcagagaccatatcagtgtgtttcatattctacccaccaaggcctaccagagttactctgtaaaatctgttgaattagataaaccaatcgtttgagaagtttagtaacagcatgtttgcttttgttctttggactacgaacagtcacagaatggctatgcttattactgtcaaaatagaagcatttgtgtactgataggtttgcaaactcatctgaaatgtattatatctgattcacatggttaacctgaagaaatctgaacaggaaatttggattgacgtataactcacagtggcttggtatttcaggttggaattgtacagtatggagaaaacgtgacccatgagttcaacctcaataagtattcttccaccgaagaggtacttgttgcagcaaagaaaatagtccagagaggtggccgccagactatgacagctcttggaatagacacagcaaggtatatggataaaaaaataaactaaagtaaaagactgcaaaaataactgctcatgatttagccttttggcatatcaattgaaagtttaatatgacaatatttaaagccattttgtttaaaatgagattcagaagattaaataatggttacaagatcagatgtttgtatgacacaatctcaccatccttcttatccttctcttgttacaagggtttaattgatagagaatccattttaaaatatcactgcatctatattttcatgttcttgggtactaagacaatattagttaatatttgtttcatttattttttgttttcaacttctaagagtctcaatctaaaagaacggattaaaaataggtctacctctactcaatatatatttatattctagaatgtccatgtattttcagtacttgatttaccgttatcgaagctactagataagaggtgttaaggcgccaaattaaatattgtctatttaaaatcatttttagtgcaaagtttgaaagaaatggaaaggatattatcatttgtaatcctctctccttttttactttctttagattccctccaatttacaacccttcctttcttccatctgcagttttccttatggtgaacacataactcagtctgtggttgaatttcattttataagaacgaacagaattgtcctctcttacaaatgtagaacactttatttcctgtgtgttctcttatctcattcattaaactagcaaacttctgaacaaattcaaaacaatacaaaaatcacaggaaatgtaataagtagtttgattaatgttaagaatccttctgttaaatgtcttcaacttctgaactcttgccttaggtggaaagctaattacccatgctctcacttcatctgcctgctaagatgactgttttaagaaggttaaaaaagttaataatgatcctgcaaagaatggattggatattcaaaattttataatttcatgtacagcttttgcctcatgaatattagaaaatcatctggctctagttatatggggcccaagagaaaataaccacaaacagatggaggtaattggacatttacctacctattggatcacctattggatcaccaatttgtatacacaaagagtgcacatgtttaggtgtaccgaatgcacccccattcaataatcaattaaatgtgactgcacattcgaagtaagtcaaagtgttctttgaaacctctgagcctgtagggagctgtacgttttccaaaggcaaccatttaagaatgaatattcatctctgaaaactaactgaagaaatattctggctgcttttgcttctgcataaatacggctctaaataccatgtccctatgtgttttttgcctctgtgtttcacaaagggtatagctgtgggacacagagtttattgaattttgattatacattaaaattctgtagtgatagtaccaagtatttttctcctacattaattaccttttcatgtttaagcacattttaattgttttttattcctttcaggcagaagttgcaaacaatatttttaatatttttagaattctttaccttcattttcagtaaatcccagttcaaagttttgtgtgtgtgtgttcccttcttcctatcccaaatttttacttttgtcaataaacttacagtatttaatcatgaggcctggattctcctgtcttgaagaaagggacactcttgatatattttaattttttaaagcatgcaggaaagtcaatgcttagtgccaagaaaggacactggatactggtactttgaggacaatgacaattttttaaggaatgtagttgaaacaggaaaggtgtactcaggagttctgtcaatgtctaatcttccaatattacataaagccagccctgagtttagaacagtcacattttatttatgaaaggccttttaatcatctccttcagctgatgttcattcaattcttttgtaaccctgatatttaagagaattaggaagttttagtgacctaaggaatttgaatttcaaaagtgattgaatctcatatgatattcgcatacaaagatctgttaaagactaacatgtaacgtctgttttcacctttgtttgtatactttaaaaagtcagaaaatcggctgggtgcagtggctcgtgcctgtaatcccagcactttgggagtctgaggcggctggatcacctgaggtcaggagttcgagagcagcctggccaacatggtgaaaccccatctctactaaaaatacaaaaaaaattagccgggcgtggtggtgggcgcctgtaatcccagctactcaggaggctgaggcaggagaagcgcctgaacccaggaggcggaggttgcagtgagccaagatcgtgccactgcacttcagcctgggcaacaagagcaaaactctgccttaaaaaaaaaaaaaaagccagaaaatctacttgtatagtatgttaaaaattattcatgatatttgttaaagattgtaaggaagacatcactcaagaggaacctttatgatgaaggtattgcagtaaggaagagagatagggctcagctttgactacagtgaggacaagtgggcatttatagtcaaggaacagggcagggattggcagtaacatcaaggctagggggattcttgctagactggctcaacaggattcttgctgaaggcagataaatagtaggaaaaataaactgtttttctctttctatattctaaacacttgacatgtcacttctgatgccagatgtgtgggatttttcccacatcgaccagttatctgacatcagctgcatgttctagaattcaattcagttctgacaccaactagagtttatgcaaacctcccacagattaacggctcagtccttcaagaattcattccaatttagagccagtaggtttccaggtacccacgatttgtccaacgtggctacaaattagaccccttacttgggtttgattatatgctagagtggatcacagaactcagtaaagtatcttacttactattattagtttattataaaaggatacaactcaggaacagcaagagatatgtagtgcaagctatgagggaaaggtgtcagagctgccattccctctcatggtgtacctccttccacctgttcagcaacctggaaactttctgaaccccgtagttcagaaagttttacagaggcttgatcacaggcatgattgattattaactgattctctagcccctcaatctttcctggagaatgagagctggggctgaacgtttcaagcttctgatcatggcctggtccttctagtgatcagctcccatttaggagcccaccaagagttacttcattagaacaaaagatactcctatcacctaggaaattcaacagattagaatatctatgtcagaaacccaggttaaagaccatatattagaacaaaagatacacctctcaccagtattgctcaggaagttatgagagttttaggagttctgcaccagaaaccagaggcagagaccaaatatatatttattatttgttaaaggaaaattttagacaaattaaatttgacagagtttatttgagcaaagaatgattcatgaatcaggcagcagtcagaaccataagaagttcggaaagatccattttagcagtgtgagcaatgggcttttacgagctgaatgcaaaatcaaattaaagaaatgacttgattggctatagctaggcatttaccttatttgggtatgatctggtggaaagttagaggttacttgccaggttctgattggtaaagtctctagttagaagttagttgcagtttctaattggtaatgtttaagttttgttttactgtttacattgaattggactttggtttgattatataggaacatacggcactggagctgtctcagcctaattgcctataaattcaattcttttaaaagataatatcatggaacagcgtaataagatttagagggtggggaatgaggaatgtgatcagataccaaggatgagggatttccactaaattgattaagccagattcttgcttaaactggactaagtgggtaaagaacacagcccagggtcagagcccagtctagaagaagatgtaaaggagcctgactcggttttggtcaaggagagggtctttgtcaagtatagagggcagagagactcaaagaaagtaaaaaattagtacaactatatcctgtatatccaccactcagaactgacagttgtcaacatcttgtcatatttgctttaagtccttcgaaaggaaaagtcatcacatagaatccttttccccatttcaccagaatcctctcttcctgcttaaagatatcagttatggtatatttagtgtgtatctgttgtgcaaactctttggaatgttagcttaagacaggcgtttccttggcaaatctatcccaaatggcagctgtttgtctgtacaaccaaatatctaaatggaccattcagtacaatgattgctgtactttgtaccaaaatcctagaaatatatgaagtcttttcattactttagtcctaaataaaatatactcatctcttccaagactccagagcgaaaaggtttgagtaaaaggaaataaagggggaggggagaagtgtgtgtatatatttatatagaatacatacaaaacaaaaattttccatttccctgtcttctgtttctttccataagtgctgttcaattaaattcaaattcggttttttgttttgttttgtttttgagacgggaaggtgtctcgctctgtcgcccaggctggaatgcagtggcgcgatcttggctcactgcaagctccgcctcccgggttcacgccattctcctgcctcagcctccagagtagctgggactacaggcgcccgccaccgcacccggctaattttttgtattttagtagagacggggtttcaccttcttagccaggatagtctcgatctcttgacctcgtgatctgcccgcctcggcctccctgaaattcagggtttttttgcagttaggttatagcattttcccctcctctccattgccatcttctcccatcctgctctcagcagcctgtgtgctaacacatagttcaggccaaatgttttgtaactccttcaaccactttttgctccctaaaacccaactgactactccatggactcagagcatcaccatctgcagtctattactcccatgtgaaagactgcagatgtccctatccccaggacactctcaagcactcacagccccactaatactctgttctctctcatctctcctccccagattagaggattttcgagccattctacaaatgtcagagtagctgtgggggaagcaaaatctcaagcaaaagtttctgctagacgcagaagaaaagaggcctgttaaatgagagaaggggtgtttacagagaaaggagcacctgggggagtgtttacagatctggccttctctgaccatgatgtatgcctcagtcacaccctccctttgaaatttccaaagaatgaaatactgctgcctttttatatataggatgtgtggtgattagcaaaacggagacctctccatcatctgaaataaatctaaaactattacaaacaaggctcattatgcctcccaacttgaatgatgggcattgatgctaattttggagggaagcaccaggctacctagagtagtcagtgtttttgtttagttttttactttgtctattgtaaagtggtgtcttatcaacctctcttttgtttgtgattactttagaaaggaggcattcacggaagcccggggtgcccgaagaggagttaaaaaagtcatggttattgtgacagatggagagtctcatgacaatcatcgactgaagaaggtcatccaagactgtgaagatgaaaacattcaacggttttccatagctgtaagtgtgttgccggagatattttcaaactcttaggtgtagagaagagctgtgtgcatattgggtaattttatgaaagtcacacaaaccaggttggaaaagagaaaggtctccatttgaaggtaagccctgggaggacagacttggatcttgctccctctgggtccttagtacccagcacaatgccaggccaaacagacactcaacaaacaatcattgaaaggaaggaaggaaggaagaaaataaggaaacatgaaaagaggaagaaggaagcaaaaacataagaaggaaggaagggtgagaaaaagaggactgaaaaaaagaagaggaaaagaagaggaggaaaggaagggaagagggtgggaaggcgggaaaaatgcctttgcctttaaataagagagaggatttgttcagtataacaagagcagtggccattgggcttcccttccccgtctgagcaattttcgactctctttttcattaattatcttcccccatcacttagctaaagtgggggaaagtgccagttgtctctgtttaaatattaacaacttctgacgtttgacacttgcttttcagcgaagtagacaggaattgaatttttgttttctgatgcaatttataagctcctggtatagacctttcgacctaaaatgtagacattctagtggggaacaagttctgaaataaaaagttacccaaatggtatgccaattacttcagagctagctctagttttaacagtgtgcttcttcaaaacagcttgcagttcttctcagacattagtgcattactcctgtaacctcattattcctatagcttcatggaacagcaggtgagggagctgagaaagaggcaagggcacccagtgacttgggtggtcccagaggacaggggcaaagtggcttaaagtcctctgatgagacgtgtggtatttcctctgggatggtcactgatactccccagggaaaaggatgagggctttactgaagcaaaagaaaagaattgagaataaatctgccactgccttctctctagtaaggaacattcaaaagccactgcactgccttcaagactcactttctcacattaacattgagtgtacattatagtatttcagttgctgctctaaactactatccatttttttttttaaatggagtctcgctctgtcacccaggctggagtgaagtggcacgatctcggctcactgcaacctccaacctcccaggatcaagcaattctcctgcctcagcctcccaagtagctgggaccacaggcgcacaccaccacacttggctaatttttttatttttagtagagatggggtttcaccatgttggtcgggccggtcttgaactactgacctcaggggatccacctgccttgacctcccaaagtgctgggattacaggcgtgagccaccgtgcccagcccactatgcatttaatgatacaaataaacaagtctttcgtagattataaacagcagcactttaaacagtaattttagttcttttctaactttctataagtgaaaaatctgtatccttcttaatcaaactatcagttttttaatctaccattctaaatctaactttaaaaaactacatgtagatgtgcagtgggggtgagctactcagatgggtagggggagcctcagacctggaggaaaggggtgggggcagccctcaagcccattgcccttgtgcccactatcctcccaggccacagtgcagaaccatggtcggaagggtgcttgaggtctgttttgtaacaggactttgaaggcagcaccatggagctcttcgtttttaatgatgccagacaaggctattattggaaaaagaaatgtgaagccaaaaaattcctgtaccttcatggtcactggaggccaagactctccttcttcttagaggatttggatattcttaaaaaaaaaaatcaagcaatagcaaagggctcagtgtctttcctttattttttggattccaggagcatagccttgaattaatccgatccttgcttcgttcaggccaaattgtaatcatttgttgaaacaaactttatttgtttctctgtttagaactatatctgtgtatttattttaataatattataagcatccatggacctaccacccaaattgagagctagctctcttttttggtaactacatctgagcacatttaccacctgccttcctccacctgggtaaccatcagtccactttctacattcctcaacctggctctacttttcaaaataatatttaggcacccatacatatccaaaaaaataaattttaagaatatttcattgtttttaacattttaaaaagagtgtaatgctgtatataatattttggaacttttaaaacttaatactatattaagattcatccataatgttgcatatctgtatagttcattctgtttttaaaaattgaagtgatatttacaatacagtgaaatgcaaggtttcagtgtgaaaagtgtgcacgaagtgaacaatttggtgagttttgacaattacgtgcacccacataagacttaatcaagatatagagcaatttcatcactcccagaaagtttcctgtgctttcttttttaaaatgtatctttaatttttatggatacacgatagctgtacatatttacctggtacatgtgatattttgatacaggcatacagtggctaatgatcaaatctgggcaattggaatatccatcacctcagacacttatcatttctttgtgttgggaatattccaaatcttctcctgtagctattttgaaatatacaatatgtttactgtagttgtcctatagtgctactgaacactagctcttattccttccatctaattatagttttaaatccattaactaacccctcttcatccctgctcttccccactactctttccagcctttgataaccaccattctattcagtatgtctatgagatccacattttcagctcacacatttgagtgagaacgtagtgatatttgtccttcagtgcttggcttatttcatttaatataatgttcttcagttccatccatgttgctggaaatgacaaagttttgttctttttaatggataaataatattctgttgtgaagatataccatgtttttttaaatccattcatccattgatccatacttaaggttaattctatatcttgtctattgtaaacagtgctgcaataaacaggggagtgcagatatttcttcaatatactatttcctttctttgggatatatacccagcaatgttttttttttcttttttttttttcattttaaatacacacctcctgtagtaaccactgatgtgacataccaccatagctcacttagattgccaattcttgaatttcaaataaataaaactgtatagtatgtactgtgtgtttagcttttcactcaacataattattgcttgtgatattttgtgtactggggattcattttttgttattgttatctattttatagaccacaatttgtactctactgtttatagacattttgcttgtgtccagtttgagttattgttataaatgtatcatgaacactaaaaaaaaaaaaaaaaaaaaaccaaagtgataatcttcaggtaacacttgcaactatggtaaaaactaatttttttatttattacagaagtgattttttattataaagttttaaaaaaaatattgaagcaaatataaggaaacacctagtgtcctaatatacagaaatacaaaataatatattatgatacacattttttcacattttttatgcccatgtacttatgtgatttaaaaaatagaattaggtcatatctacatattggggatttttaaatttttttgcatgttaaattttacatattgttttaaaaatgttttcattatcttgaacatttttatattaaaaacagttttaacataaaaaatttttacattaaaaactaatttttttaggcagaaaaagtacaaacctcaacaaagctaattagttggacttcatcaaaatgtaaaacttctactcttcagatgacactgttgagaatatgaaaagacaatctacagacgggaagaaaacatctgcaaaacacataaaggacttgcatccagactatatacagaactcttacaacacatttaagggaaaataaacatctcgttttcttttaatgggaaaaagatttgaacagacactaactacaccgaggaagaaatactatagcaaataattgtatgaaagagtctcaacatcattagtcattagagaaatgcaaattaaataagacaccactatacgctaacacaattgctaaaactaacaagtgaacaaaaaaaactgacaataacaagtattgacacgcatgcaaagcagctggatctcttagacatttctgatgggaatagtaaaatggcaaaatgggacgattactgtggaaagcagtttggcagtttcttaaaaagttaatcattcacttattgtatgacccagcactttcatttctagttatttactcaagagaaaagaaaatatatgtctattacagagacctacatgtgaatatttacagcagcattattcataatatgttgaagctgcaaacaactcaaatgttctcattaagtaaattgtggtgcatccatacaatggaatgctactctgcaatagaaaggacccaactactgctacatgcagcaacacggatgactctgaaaagcattgtacaaagtcacagaagccagacacaaatggctacatactatatgattccttaaatctgacattctggaaaaatcaaagctataaggacagattatttatcggtggttgccagggttgaacgaggggaggaagggattgactataggggcaggagggaactttttggggtgatgtaaatattctacaccttgatgtggcagtaacacaactatattggtttgtcacactcatagaattgtacatctaaacagggtgaattttactgtatataatttattgcaataaaccttaccttaaaaaaaaactaaatgtttgagaaaacctgcttggacatctaaataattatagttaacaatcatatataactcctgcttctctctcctcttcataaaaaagaatgcccctgtctccagcatttggtttcaaacaagaatatctcaattgtttattttccagattgccaatttagattaccacttagtccagtatgtgtttaaaatatatatgtgctggactgtgccttggtaatagtttcaggaagaattgctcattcaaaagcaggcaactcacttgctgattgcctttgccagcagataatgacatcactagctggaataatatcaaagacattcagaaactatgaatataacattacttttgaactgtcagattttaaaaatacagctgttagtaacagggacacagagtacaagaggagaaattttcacagacatacaaaattgccctttatatttttctacaccaattgtggtgtttatataacagttaatattagggagtctacaaattttgaaaatcactcttccataaatatgaaagtacataaaaattccattatgctaaggtactctacactgttgtttactgacaaaatgcttgagatcctttatttaacacatagaatttaaaatatattcttgctgtttctgttgtgtcttagattcttggcagctataaccgaggaaatttaagcactgaaaaatttgtggaggaaataaaatcaattgcaagtgaacccactgaaaagcatttcttcaatgtctctgatgaattggctctagtcaccattgttaaaactctgggagaaagaatatttgccctggaaggtatgtctatttatcttattgctgcatgttctctctgcaattcaaaatcagtataatgggatttttgtatttattcctaatacatcagtaatactttttttttttttttactgtgtacaatatctagcatggaacaatgctcttttatataaatctgccattaagatggctgtttctcacaacactgtgtctgctagagactctctttgtaagggcatggtagggcagtgctgatgggacagccgatgaagacaatggtcaatgtagatgtgccaggacaaaaatgtttccatgtgctttgttccttttctgttacatagatttggaaaatgagggtactacctctggtttgggttttttttgtttgtttgtttcttcatttcatattgagctactacaagagtgctcttatgcaataacttctttgttcacttattttctctgtattttgctccttgcccattttaaaggtcttcatggaaatttgccttaaaatccatggcaatgaaacattggttcactgtatttgtctaaatcatgttacttctttgcagatttttccttgagttttcaatggtgactggctgttgaggataacgagttatggcattccctattctgccttaggtagaggatgtcaagtagctaattactttggaactcgatctttcctaaaaaacaaaaaaaaaaagtcttcagaattgttatgccaggcaaactggcaaagcttctttcttcacattctttgatgatctctagtctcagggaacatgcgccttttctccaactagggagagaaaccaccagagaattcttttccccttaggctacatccaaatccagttgaccctgtccttgtgaggacacactgaaagactgttgtttctacatcttaacaatagaaatttaaaagcactttctcagtttccctgatttgattgataataggaaacagaaagacaaaatgggaatgagacacaactgaaaaaaagtagaccattttgattgagcgtcaaggggctgggaaaatgcagaaaaattagaatatgaaaatgtacagaaaggaaagataattatttagagttatggctttcaaactttttttgagtgtgactcacgataataactacattttgctttttgacccagtgcacataaatatatacatataaaaataaggcaaagtttcacaagataattcttattacatgtgatgcactgtgatggtttctcatcaattccattctaccctaatctctttcaatgaaaaaaaaatgctggctatactcagtctgttgatttcatgactgggtcacaatccgtacttagaacatttgatttagaggtgataggaatctacaggccagccagactgaatttctgtgcctcccttttcccctggcctctttcccctgtgcctttagaaacagaacactctaattgtttatgagtctggagtcccagctgcttctgaagaactcagctgtcttgtgctctgtgtacaagtcatttttaagtggctttggtctctcaacagctctcccggtgtcatttaccaataaaccagattatgagcttggctggccttaaggaaaatacataaggtcttccaactaattgtgtacttttaatttttaataacatgggctaagatatgatagaaacaatctgtaaaaataatttaaaagaaaagttacatagttacatttgatagttcaacagaatacagtgtcatttctaaatctccttttaagtaagcaagtaacctaaaactggcaaaaatgaagcccacttcagctaggggagggggagatcaattgcctgaaatgacatttcagattatttctaacctaactacaccatggattaaaggtgacaggttgaagagcccaaacactccaagaagtctctatatttaaatatgacatcattttataaggaactttacagattacaaatgtcttctatatcatctttgttgctacactacaccaaaagcagtgttttgactagactatttcttatttttttcatgagatatttaaaaaggctttatttctttgttgctcgggaaatctccatttcctgtcaacatgtatcttaagatgacaagtagctgtgattatgaaatttctgtttgccaaggacagtgccatctattgaggcaagtatgccaaggacttgcttagtacatcagaaaatagtctactgtctccatttcccgttgagcactgggagaaaatgccaacatttctaaccagaggctgcacagtggttagagtggctggcccaaacacccatgaacagtccagggagaagtttgaagcaagaagcccaggagaatatagtggtctattaccatgatgccactgcagcaggaagaacatcacatagcgtccttctgtctgttctcagctgaaggcagaatagcggcagggcaggtgctgaaaataatgcaggtttccgttgctgcattcttattgatcttgcagataagtgagaaaacacctgaaagcattgtggactgaaaatacatgtttaaattaaagttaaaatgcatctcagtcatttaaattacagggcaattcacacaagagattaaaatgatatatttgaattcttcactgccgcgtctaatctagtcctacaaaggtaattactgatgtatttgttcacaattttatccatgtaaataactaacaaatagttacattcacaaatttgattattctcttgcctcaacgaaagggcagactgactttcttaagtgctatttttaacttatctgcaaggccaaataaatcagtaacccctagtgcaagcaaataaatcaacattccatcaattccctcaggaaattgtggctttgggtttgtgaatattttgagaataatttgagagtagcagactgccatggaatgctctgaattatctctgcatttcagtaaagagcttcaaaatgggtacaggatcttttaaaaatgtatgattgaatggcatgtgggcagccctatcacaaagacccctctggatctgtgagtgatacttaccaccagtaattagagcaaataaatgcatactaaaatacctaaaccctttatcacacaatgaaattctgacagaatctatggcctgaatatgggtgggactgatggagttgagaaacctctttaaatatgtgaatgaaatttttttcagtcccataacatattaagggagtttagcctaagggctcagcagggttcccaaggcatgaatttggacaggaatttcctactgtagtacatccaacttgagccttgtggacccaaagcaccataggatccacaacatgctacagtataagaatggagatttctcaacccctctggcgaggacagggctgctaatgaacaagaatttgagacatgagccctttgactatttttctctgtcttctacccaggcctacctagaaattttgggttgagaaatgtatggctgaaaatgccctaagatgtttgaagttctggttggtaagaccacaagctctaccaggtatctgtattctgcaagtcagtagtgcatgaaaaggcattgttacttatttacagtgatattttcctatgttatagccacagctgaccagtcagcagcttcatttgaaatggaaatgtctcagactggcttcagtgctcattattcacaggtatgttgaccagttggtgaaaaatgaaatatatgtttgcaagacttcccttcccaaaccaacatctagccatcagtatgtaagtgcaacgtgcagttcatagcttgaacaattatgcaggctatgatgatgttttctaattcaaataggaaaatatcatttcacaagcttcttattaagaaaatatgttctctcacacagttcactacattgtactaatagttgtgaatcagacagtgtgagctttgccttgtaattatgtatctgtctaaatgaaataatttaacatatttgctacagatgtggaatatttttccacaggtcaaggaattcaagggtcttattagaattccatgttcaagacctaggatgctgggcacccagaataaagtagaaagacaagattagaaaatatatcatttgcagttaatgaaagaaaaggcataatggtccttgcaaaagaatattgacatttccatgtgcaattttactgtataacttgggtaagttatttgtgccttgatttccttttctgtaaaacaggtatggtagcaatagcatctaactcatagagttatcatgaggattatataagctaacaaatgtaaagcactttgaacagtatacctatacacattgttaatggtgtttaagtatttccccttattatttttattaaatattattatcttatttatttgcatgtaaggactgggtcatgcttggagcagtaggagcctatgattggaatggaacagttgtcatgcagaaggctagtcaaatcataatccctcgaaacacaacctttaatgttgagtctaccaaaaagaatgaaccgcttgcttcttatttaggtaaggtttggatataattataaaagagttgttttacttttccattttttacctttagcattatttgcttatgtttctataggcttgcaaccatatagcaggattatttcaacaagttgggtattttccagaacccatgcaaagttttaggcctctgagcagctttagttagtcaaaatgacatacatgggggtccttttttgttagtagggctgtctaatgcagggaatggtttaggttgatatgtgccctttctgatatgttcagtttctctgtgtctggtatcaactttaacttcaaggagaactttgaacctggtggacaagaaatgagagtagaaaaggaaacctcgacttctcctatatcctgaaaaccaaactcatattgtcttaaatgtcttctatcattaatttctctctatgggtcctaatttgggaaaagaaaaatgtattttgtcatgtaacttcttctttaatagctccattcacaatcagacaaatattgaacttaaacccagtgatataacatgatcttgtttcccagtgtcttgccagaaatgaggagttgtatgtctggtaccactttatttgggatctataccaagctgagcaacacctgggggatgccagggaactctcccctcactgaaaaaagatattcaccaacagttgggaggacctaaaataaaaaggaccatcaggatatggcttcccagctcttactcactcaacaaatatttgggggatcctcttttgccccaggcattgatcttagtgctgggaataaagtgataaagaaaacacataccttggcctggaagcattcacagcttcacgtgttagccttcctctctgggatctttctgtcccggagacaagtctttttctctctgtcccagttgctttctattttatcaggaaggtggcaggtctttactgcggtgtttatacatctccttattgaaggacacctattaaagctgtaggagcagcaggacttaagaagaataaaaggactagagttttagatgactaaaaatgtaacagtcaacagcagctgcactgtgactgctaaaatctcttaagacatgtagaactgcatgaatgaaagtccagtctgtttctcatagaaatcctgttacattccactctggtcagacaacagctagagtatctggttgttctaagtatcacatactacaaggagaaaatgacaaactaggatgtgccagtaaaatattacacagaaaagtcagctcccgaagcaattccctgctacaagtctcactctctcgaaaacttaaagaaattgaaggttagaaaacaaagtgtgcattgcatgtattttaggtatttggaggattgtgatataaaatataggggttaggcttaaaattcatttcaaattttagcattaaaagagatcctatggagcatgtagtcttaatttccaatcaagaaactgagagatagaacaattatgtcccagctgcctatggcaggtgtgaaaccacaattgaggcttcttgattcttatgtcagtgtttatatcacgataccaaaataactgattctgggttgattaagaaagcactgcacaaatattgagtaccagcaatgtgccaaacactgagtttatagggaataaaaagatagatggggcaggtcagttcctacactgataaaccttacttttttgggtgagagacaataatgaaacaagcaatcactatcagtatgatatgtgctatgacacagaatacctaaaaaagagggctggggattagattagatatcttctaaaagttcattacatcctaaggttctatgagactgtttatgtgaaataccttggaatcaagaaccagcttaacctgaggcttctgttatatgtagaataaatatagaacatttatcttcctatataatggatgacatataaattagtaaaactccttatgaaaggcatttgacaatgtgtttacagagctataaaaaatgttcgtaccacatttatacagaaatttcacttctgtggacctaacctagggaaaaaaatccaatatttaagaatgccaagtgaacaatgatttccattgtattattatttatgttattgggggaaatgccattatcctaaatgcccgaaaatatgcaggtagttaagtaaatagtaaatccacttaatgaatattacacacccataaaaataaaaattataaagctgctgattctatgatactaaagacttgaagcagttatggtacaaggtgtacaattagcgatagcgatgaggtcatagagacttgagcttgttttctgattctgcccctggctatggctttaggcaaattactctccccctcaaagcctcaattttcctatttctaaaatggaaataattacaccatatatatcatttgggttgttagattaagtaatgactatatttagtactgtgcctgacacacagttaacactcaatgggtgttgtctattattttattatgtaaatgttattatgtatttttttattgtgtaatgttatataataaacattcctcttattagtattgtggtaggcagaataatgatccccaaagatgtccatgtcctaatccctggacccatactttgcatggcaaaagggacttttcagatatgatgaaattaaggatcccgagttggaagattatcctcagatatctggctggacctgatacaatcaagcattctaaaaatcagagaacctctcctggatgtggccagagggagacagaactatggaaaaatggtcagagagatgcagtgttgttggctttaaagatggaggggggccacaagccaaaaactgtagatggctctagagctacaaagggcaagaaaaccgattctccttgataggctcccgaaaggaacactgacctgccaatatcctgatgtttagtccaggaagctctatgccagacttctaataaacagaatggtaagataaaaagttcatgatgctttaagccaccaacttgtggtaatttgttacagcagcagtagaaaactcatacataatacaaaataataatagtagctgacattagtactattactaataagtattgagtatttacaaatttaaagacactgtgtgaagtccacaaagatgtgtatgatattgttgccactcttaggaagcccacacattttaattgataacactgtagtttttggtattcttaattatatgtgattaaattcctttaaagtaaataaactcttaagaatcctaaatttgtcattcccaaaaacctttggttaaacgttgcttaaagcagatgtggagaattcaacttaaagatgccactgcaagtaagaaaatattaagaatcttatttctgagcacagtatttataatatatgacttctctctgtccaaaaaggaaatttttgggtatgttttctacagtgtgctgagattttcttttctgtttcagaaattatttcattagcttactcacaagtgagggtatatgacattttgccaacataaagtctaatacatgtaagatttctttcaaaatagaaaagcattcagaaaaggcaggacaaataccttgtgttttttttcacccaaaataatattctaaatctgaaatgaagttttcaaaatgtttctttgtgggggtcacaaattgagaagagactgagtgtattttttcataaactgtgtggattgcaagttgtaaggctatgaaaaatcttatgaaggaagcagaggcagaggctctgttagaaaaatcccatgcttatcaataaggatcaggaaactgtaagaactcaagctgtcaaacatctgtctcaggacatagtcctaccccatctttctattacccaaactgccttatgccaatacaggcattgcaagtgaatttggtggtgaaaatacagctgggattatgttcccctgcctcctccacccacagtttgctgaattctattcctgccatacagcttccaaaggagaaggaaagatgtgaggcaatgtcatggcatcaagacagatcatacctgtttcccattacctcactagatcctggcccttttcccaagaagtgaattatgagagctgacagaattcattcttcataaatccatgcaaagggctatgccatccattttagcctttttttcctcttttttttttctctttatttgagacagagtttctctcttattgcccaggctggagtgcagtggcatgatctctgctcactgcaacctccacctcctgggttcaagtgattctcctgcctcagcctcctgagtaactgggattacaggcgcctgctaccatccccggctaattttttatatttttggtagagaccgggtttcatcatgttggccagactggtctcgaactcctgacctcaggtgatccacctgcctcggattcccaaagtgctgggattacaggcatgcaccaccgcgcccagcccttttcttccatcttattcttttctttttcaggaaacactattaagcttaaatatttataattattttccttcttttaaaattaggctttacttggctctggctctctttttcttttcttctttcttgtctttagacacccaagcctcaattagtaactacgctaactggtagttactgtccctgagattatttcagctaatatttttagttatcaagtataagtcatcaaagagagttaactaaataatctcacaactcctagcctcaaacataatttttaactcatttttaaaggaggccttttatcaagttacattcacagctctgcaaattacacacacacacacacacacacaaacacacacgtactaacactctcattctactcccttctttatatttcttagcagagtggcatgaaataaaacagccttcattttgcacattcttcttttccattttatgtatgtataaacatggcctgaaagattcattttaaaacaatattgtggttagtaatacaaacatgtaacacattacatgttcgaaaaaatattttagattctattatgtataataataaaaaaccctcaaagaaagatgaaggaatgagaatgtgaggaatattcataaaggataatatgcctgaggaatagtgttcctttagcacttgtaagaataaacatactgtataaaaacttttgttcctttttaacatttttgaaagaaagtcaaacctactttacagtaaaatacttggtaagtgagttagaaaaatgatctttttctcagtgagaagtgctattctgtggcattttgaaaaataatcttacttctgctccactgaagaaatctggttattaaaagagttattccttttataaaatcaaaatctgcatgtggcaatttttattcattgatatggctctcttctcaaaacacaaagaacaaatctaacttttcactcaaaaattaatcttaaagacacaatttatgctcttcctgtaagcagcctgagatgatctcttaaaatggtttactattcacttgacccagaacaacccaaaaaatcattcaaatcaagagattgaaatcttcgtgttcactttaagaacatccatgaagctacccaggcaatcaagggttatgtatatctgaaaagccaccaagtatctgaaagatgtgactttacagaagcagtgtgtgccgttccatcattgcaatggtggagctggtagatgtgtccaaagccaaaccgtggagctggacagagggtttatggccccaaaagagtgctgaaagtttgttgcacatgcatacaaatgtaaaaagcagtgctgatcttaaaggtttgtatgtagagtctcttgatcattgtgtacatctaggtgggcgaagcacccaagatacactggctctgtttacagggctcatggtcagattaacccatacgtgacctccacccccactatcgcacccaccgcactgaaatgatgcttactgaaatagaacaaatttttctaagccagaggaggaggttgcatagaagaaaaaggtattccagaagaaaccgaagaaacaaaaataatgacccaggaataatttcaatataaaatatatgcaaataaaatcaaaagtagaaaaaagacaatcaaaattttaaagagcatggaagctcaattaaaatagaggagagaaccgggcacaatggctcacgcctgtaatcccagcacttcgggaggctgaggcgagtgcatcaggaggtcaggagattgagaccatcctggctaacacggtgaaaccccgtcttactaaaaatacaaaaaattagccaggcgtggtggcgggcgcctgtagtcccagctactcgggaggctgaggcaggagaatggcgtgaacccgggaggcggagcttgcagtgagccgagatcgcgccactgcactccaacctggacaacagagcaagactccatctcaaaaaaaaaaaaaaaaggaggaaagatcagatacgtgaaaaatgattcaagctctgtgttgaataaagtcacattaaaatcacagaaaggtactgttgttagacaatgtttaacacctattaaaacatacacaaatttaaataatagtgatgatacacaaagcctgggacagtttcatgaaattgtctttcatatggcggttcatagaacaaagtagtacaaattttctggaaacaattttctagacactataagaaccattaaaaacgtgatccagtgatctattccttgaaatgtactgtcaaaaaatccagaagagggacaaatttaaatgctccaaggtgtctttgaaatctgaagcataataccaaaaatattaaaaccacctgaattctagtgttttatcgggaaatggccatgtaatataaatgcaatgtctttatgctttaaccaagagaaatcatcttcaattatttaaaattacaattttaaaagctagtagcagcacagaaaaggtttacattttctatgattccaattatatgaaaagtgttaatttctgtagtgcagacacatatatccaaatgaaatacaattgatttattacaaattggggtggggatgtgcaattttttatgtgtgtcatcattgttatatcatttgtgattttaaataatgaaaaactcagattgggggaaaataacttctcaggagaaagcagttgtggtagatagagagcatattaaaagcttccaccaaaacaaattcttacgtgcattgaagaaaaaatattattttcaaaatataaccatataaaaatgattatcttggccatttaaaaagagtcttaatttattacatgaagcctttaagggtccaggtggtatacctggaatctttcttttgttaggttacactgtaaactctgctactgcttcttctggagatgtgctctatattgctggacagcctcggtacaatcatacaggccaggtcattatctacaggatggaagatggaaacatcaaaattctccagacgctcagtggagaacaggtaaacttgaaaaatattcttttatttaaattaatctattcatactctatgtatatttactgtctattgtcctaaacttaaaaatgcaatacccacatattcagtaacaactgggaacagggccctgtgttaggttctttggaaggatgtatagtgtctgtatctttgtcttcatgttggatgggtgtggaggtaagatatacaatagatgtggatacagatgtacaaatatatacacaagaaaagagatccaaaacattaagaggcatgaaattaccagtggcccagacaatacagtcagaatatgatgggattgctttaagctaggattggtgcagaaaagcttattagaagatgaaattcgggctgaatctacaagggatgatagaatgtggataggtagaaagagcagtgaaagagaaagttaaaaagataacatggacccatatgatgtgaggttttgaatggcaaattaagagcttggattttatcctggaggtaatgggaaattgtctgtaatatttaaaattgaaaaattcttattaggtagtattgaatattaaaagaagtttgggaaatgatacatgaaataacatttacatatgtatatataaaaactgaaagaaacatcgtaaatatgcaaacatttacacacacacatattaactgaaagaaagatctaacatgctttttgttgttgttatttttgaattgtgatagcttgggaacttttgtttctaaaaagttttctgtatttttcaacagttctacaaggaggatttattaactttattccacagtccttttacagagggtgggagaggggttcttcttagccttcactaaatattccaactctctagactagaggggcaggactgcatcagccctcctgctctgcaagagtccaagctgcagcccagcgcagcagtaaagctcaggtgcagggatactcacattaggcaggtccacaaactgcactcgctttaaagccccatgccctgcaggagcagtatcttttatgacaacaccatagacatagcttccagggtgtctacaaagggcaggccggctacaagagtaactgcactctgggaagtcaaaaatatgtcatcttcatcaggtacttataattcatttatagttccacacagcctgaatacaatattccagtaagaggttatttttacccctgtcagcgttgcttagccttagtggtaaagttgaaatcccagccacagcagattcccagggcaacagagttagagtagctaaaggtcagctcctcaagtatcaggtgaaagggttttattaactctttgcccacatttacgcttggaaaacgcataacagttagaaaaaggctattgttgtagctcaaactggaggtaagagaacgtaaaataagatgtcagcagtaaaaatggaaaaggaagggccatgacagatatcaataataggaagttgacaatagtaaaatgaagcattttagatgacgtctttgatccattatcactccattaattgtatacaagacaagaagtgtcaaattttatgaaaatttgcatatgaaagttgaggagagtatcatgaatgatttaaatcgtgaatgatttcagtttcaagcctgggaatctgaaagaaaggtggctccatgattagaatgtcaacacctcaagcaatttagatattttttaacaatgacgtttggcttttagacatgttccttgtaacagtaagcacaaattcagatatttgaaggtgccagtaaagtaaaatcaaaataggtaaagtcaatgagtaaagctgctgggcaaaaaaacacaggaagtggtgggaaccatggccctgggcagcttgtgagcttccactgagctccagttgacggttgccatgtggggaggaaagcccagagttgcaagatcttctattttatttatgtttataattaattcaacttttaaaaaaacctctcaaggccctcaaaagcctgtgagaaaagtgcattcaaaagtcagtgtcttttgcccacatgcctagaagcaatgtctaggactgtagaactgaagccttgagaaggaagacagaatgatgtttgcaattgccttagtagaaatttttaagaaggattggtcatctagggtaagagaatggaaaaaggctacaggtctgagctttagaagaggccaaaattcagaaaatgagagttggggaagaagccagtaaatatgaaaagggtggtctatgccacaggggcagaagcaagagagtaagagtaaaattgcagaagccagtacagggagatgtaccataagataattgttaagagcatcaaatattaaacatagaataatatttgaaaaaattaagcatttaggtaatgaagtataagttctctgcttttctctaaacagatttctatctttaaatgagaaaacatattgctacaagggatgatacccctgcaatccttccatatttttctatgtcccatagctgctgggataaggcttaaccatttcattgagaagacaatcttccaagactatgaggtgaaatatgccacaccagtattccaggacaactcagctccttataatgtatttaaacatatattcagccattgcagcatgcattctactgcttatctaattttatttccttaaaaaatcactatagtattactgaccttttctgatttgtggagaagaaagagaggttagagtgaaatctaaagaaattcattttgttactgtcaagcgatgaaatctgtaacagctgttcatcctcaaagatggaaccgactgatattctttatcctcatgaaagagccaataaataactttcagggagcatcaatttttatctttcatttcctttgccaactagctcctcttctagattgctagaagtaaaacaaatgtagatttcagtttccttgagaatttctgttgttcattgggctgttttgtttcattttgtgtcctagattggttcctactttggcagtattttaacaacaactgacattgacaaggattctaatactgacattcttctagtcggagcccctatgtacatgggaacagagaaggaggagcaaggaaaagtgtatgtgtatgctctcaatcaggtaatggtgtctgagtttggtagaaatccaggaaaatctcttccttctcttcattttttaataataaattccaatttttcactcactttgaaaaaacagagcaaagaagctatcaggattcattcactccaccaacccctcagttttgaaatgaccatttataattctaataaagtagctccaactcttagatattttctgcttggaaatgtgaattatgtttaacaatatataggataaaggaggtaaatataaatctcactaaactgctaaataaacccacaaggcttatttaggctgggaggcttatcagctctggcttggagatagataataacctcagcagttaaatcggatagggtggagggggagaagtcatgagtttcaaggcagcaacactgcaggcttccaggaaatacttcactgggctggagtgagattttgtcttctgttcctgactttagacatcattttttaagttaaataatttttaatttcttcattagaagagtgttttgctctttatagcaaagccagtgtttatctatttagcttttccaaatatgtacattctctcctaaattgattattttaaataataaatcatgtgtctttcttcctatcattttttggcttcctcctgtcaactttttttgtcctgggctgttttgtcctttttccaagaaagtgtattcttgattacctttgctagtactttctgtctgggttttttttttttttccttccactctaggcagctttagagaaagtttcctttctgagcagaataaattttcgctttgcacaatattgggtgaagaagggatagtggcacaaattaaggatataatattatttggcctgaaaaagatgctctgaattgtatactcaattgcattaaaaagagattccattaaagtatgtctcccacacttctaccatctgctctttggaatccctaactttactctcagataggcacactttttaagaaattttaccaactttaccactaatgtacaaatggctgttaatagcactgatttagtatactttaaaaattctactctgctgtagtaatgatggaaatacataaatatcctgtttatctttcttccagacaaggtttgaatatcaaatgagcctggaacctattaagcagacgtgctgttcatctcggcagcacaattcatgcacaacagaaaacaaaaatgagccatgcggggctcgttttggaactgcaattgctgctgtaaaagacctcaatcttgatggatttaatgacatcgtgataggagctccgctggaagatgatcacgggggagctgtgtacatttatcatggaagtggcaagactataaggaaagagtatgcacaagtaagaattgaaacctacagattcccacccttcagtgataagtcggttcaatgccaggcattacctgtctaacttcatgagttatttaatttcttcctcctgaccttattgggaaactggatttaattctctttaagtgttttttatagattagttactatatatatatacacacacaaacaaactataaatatacacatagtatgtatatagtatatatagtgtatatataatgtgtatatagtatatatatatacacactatatatactatatacacactatatactatatatggtatatatagtgtgtatatagtatgtatagtgttccttatagattaattactatatatacacactatatatacaaatagtataaatatatagtatatatagtgtatatgtagtgtgcatatggtatatatagtgtatatatacacactatatatagtatatatggtatgtatactatatatagtatatacggtatgtatactatatatagtatatatggtatgtatactgtatatagtatatacactatatatactatatatagtatgtatactatatatagtatgtatactgtatatactatatatagtatgtatactgtatatactatatatactatacatagtgtatatagtgtatatatagtatatatagtgtatatatagtgtatatatagtatatagtgtatatatagtttatatattgtatatagtgtatatatagtgtatatagagtacatattgtatatatagtgtacatatagtatatataatatatagtgtatatatagtatatgtagtgtatatatagtatatacagtgtatatatagtatatgtagtgtatatatagtatatacagtgtatatatagtatatagtgtatatatagtgtatatagtgtatatatagtatatagtgtatatatagtgtatatagtgagtatatagtatatatagtgtatatatagtatatagtgtatatacactatatagatactatatatagtatagatacactatatatagtgtatctagtatatagatacactatatatagtatatatagtagatacactatatatagtatatatatctatatattagatacatatactatatatagtgtatctactatatatactatatatatagtgtatctactatatatactatatatatagtgtatctactatatatactatatatagtgtatctactatatatactatacatatagtgtatctactatatatactatacatatagtgtatctactatatatactatacatatagtgtatctactatatatactatacatatagtgtatctactatatatactatatatatagtgtatctactatatatactatatatggtgtatctactatatatactatatatggtgtatctatatacacacactatatatagtatatagatacactatatatagcatatctaatatatagatatatatattatatatatagtgtatctactatatatactatatatactatatatagtgtatctactatatatactatatgtatagtgtgtatctactatatatactatatgtatagtgtgtatctactatatatactatatatggtgtacctatatacacacactatatatagtatatagatacactatatatagcgtatctagtatatagatacactatatatagcgtatctagtatatagatatgctatatatagcgtatctagtatatagatacgctatatatagtgtatctagtatatagatatgatatatatactgtatctagtgtatctacaatatatattatatatagtgtatctactatatactatatatattatctatatactatatatctactatatactatatatttcatatatagtgtatccagtatatgtattatatatagtgtatccagtatatgtattatatatagtgtatccagtgtatgtattatatatagtgtatccactataggtattatatatagtgtatccactataggtattatatatagtgtatccagtatatgtattatatatagtgtatccactataggtattatatatagtgtatccactataggtattatatatagtgtatccactataggtattatatatagtgtatccactataggtattatatatagtgtatccactatatattatatatagtgtatctatatactagatacactatatatagtgtatctataaactatatatagtgtgtgtatatagatacactatatatatagtgtgtgtgtgtgtgtgtgtgtgtgtgtgtatatatatatatattttttttttgagacggagtctcgctctgtcgcccaggctagactgcagtggcacgatctcagcttactgcacgctccacctcccaggttcacaccattctcctgctttagtctcccgaggaactgggactacaggctcccgccaccacgcccggctaattttttgcatttttagtagagacggggtttcaccgtgttagccaggatggttttgatctcctgacttcgtgatccgcccacctcggcctcccaaagtgttgggattacaggcgtgagccaccgtgcctggccgtaattactttatattttatacatttatctagtttcctttctgttgttattttccatatctccaggatttgactttttgaaacagttaaaaaaaagaatactttgtaacaatgctgtttaacatctgttaaatttagaatgggacatttagtgtgtcccgttctaaatagagggcactgctttctgaataaggcaaaaataattgtatgacttaaccaataaaggaaattagattcttgattttatatttaatgtccatgctgttataataaattgcattaaatttatatttatccattaagttgatatattttcgtcaagtgaattacgatttctaaaggtttataattttctcgcaagtaatccttagaaaaaataaatctgaatattaagtttaagctgcagggaacttctgttattcctgtttgtaatttgttgtcagttaacagctctaatccataagtgtattttttttccttcattagaaaaataacaagttacaaaagtgcttaatgcactacactataaaaacaaaagaatttaaaggagtttgaatgtaattgtctgctctcaagtaatcatagttggttagatattgaacaactacttacaaataaaacagaattcactaccttctagcttatataatttgaaaagaaattagaatattaattatttcattttctatttgagtgttctctttggttctgtagtcaacagagctctcaaaatctattcatgtaatgcaaacatgagtgatttttcataaaaccataatgacaatagtgaacagaataaagggcttatttcaataagagcacttgtatccatttgataaataatttgtttctgttgaaaatctttatggcattatttacttaacaagagacaggcaatattaatgactggggcatgatggaattaggaaatgcaggaagagagttctttcttatattctaatactttattccttcagcatcaatcctgtaaatttaatggggtagcatttgaagtagaaaaggaaagctaaatcattgtcagatgaaatagatttgtcataaacaacttgttttctaaatggtggtaaatcaagatgcaactttaaacaaaaacaacaaaaagaatattagagttggatttgtttaattactggcaaaatgtttttccaaggaataggtgaagatgtgcttactcatttccatgagaaccagagatgctgcttatgtatgggataatccagaatcaatcaagcccatagaaccaaggagtcagatatctcctgaattcttcacttaaaaaaatgaggaggattgctgggtgcggtggctcatgcctgtaatcccagcactttgggaggccgaggcaggcggatcatgaggccaggagttcgagaccagcctggccaatggtgaaaccccgtctctactaaaaatacaaaaaattagccgggcatggtggcgcgcacctgtaatcccagctattcgggaggcagaggcaggagaatcacttgaacctgggaagtgaaggttgcagtgagccgagatagcgtctcaaaaaaaaaaagggggggaaatactttcaaacgagcctcacctgtttaaggatgaaaaatgtttccatttggtttgccttagtaggcttcttattttatgttatttatgtggaaaacaagaggctcagaagacttgaagtttagggagggtttgtaagtcctgactgcttgccatgggcttctgttaaaagcattagcttaagcttgaaccaatgctaagtcaggaagtacagatatcaaacatactatgtatggtaatgtgcacagatcagtcttcaagacatactcatttgtgccatctcaacgttgtgaatacatctgagtggaattgagtctcttgtgccctcaacttttaggacaatttttgaaagacagtagagattacatattggaaaatgtatttgatgggatgtgttatttatacccagccacaaagttcagtgaactccaaattgacccctaggacaatattatactcccctcccccctttgctgatatgatatgttttcaagatttccagtacctttagatatgtctgtgtgatgggattggctaggaagcagaaagcacagaaccaattactcatactgtttcctttgaggattagacacaatgacactatataatttttccctctctctggtgtcagtgaccttgtaatgattttgtctgtactataaaaacagcaatatcctctgggaacatctgagtatttcctcttatctccacatgagggacctcttgggcggattcccaaattaacaaaactgattattttgttaaacaatttaaattctcagatttatttgaaactgttttgaacagactcttctcatatgaaactcttttttttggattctcacagcgtattccatcaggtggggatggtaagacactgaaattttttggccagtctatccacggagaaatggatttaaatggtgacggtctgacagatgtgactattgggggccttggtggtgctgccctcttctggtatgtattttaataacatcctgttaatctgagactgggtcacttgcagagctcccagtgtgattggagctcatgtcataccaaatatctatttccttttgtgttccactatgcaaatacaagttattcagttgagtgagctggaagagtcaatacatcttaagaacaaagaagctatatgaaagaaacaagtagaatgaactcttaatttggtgtgtctattatgtggtttacactaaaataggtattctgttttaggagaggtataggggaagagaagatcttatagaggatgtatataaacaagaaaatatccctaatatttggttgcttacaaggttttagagataatcgactttgtattcatttacctgatacatagaaacagataatcgcgtagcactctctgactctgtttatattgttggtcaagcctagaggcatcttaagtaatatcttcgctcagcctttaaaatgcctaaatccccaaattggcccagttctttcagatacatacattcataatgctttattaattatgaataaataataatttagtaggcaaaaataattattgcttactaaatatcctatctcaaaaactaaatatcctatttcaaaaactgttctgtttgaaagaaattactaggaagtcaagaatcaacttaatgagaaatccacatgataattttgaaaaatatataataaatttcattaagaaatataaaggaagggtttcataaataaaatctatttatgccaggtgactttatgggaagtccgcatgttgattctcctaaattaatgcattggtttactgtaattcgggtggaaacatacatcaatgctctttttcccaaaaatctacctagaagagtaataaagtataaaagaaaggtgaagatagagaggtgaaaatagatgactttgctataatttaagataatgcttaagaactaatggtcaaattaaaatggtacagtaaattgtgcacatacaataatcactatttaaaaaaaaaacctttacaatagaggggaaagaagactgaagggtgatacctaagaaaagggaatattaggcagcacagtggctgggactttggggaggactcaccagaagccaaggctcaaaaccagaagtcagcagtgtcagggacaatggatatacttcaattttgtttgaaatgttaatcctgaattagtttattatgctccctttagctcacaaatatttattgtattaattctcatattaaaaatatgttttcagggtttttatgctccagttttgtttcaaggctttcttgcaaagctttgcaaacttatttatggcctctcctgccccaaatcaaggcattgatggcccaaaatgatagtcatttccctatcatagtccaggctccactgacagcagaatggaccaaaccgatatactgggacacgaagactaagattcacaatgcctaacaagaagtgagagtggatacaagtgacagatgataggaaaaacgtttggaagcaaatagtgagagtcttgtcatgagacctggactgactcccaagaaagatctggctggggcagagaggatgtgtggggtggacaatggtcgaggcagcttcatgcctggagaatccatattactaagcaggaaactaggcatgttcattcattgctgatgaaagggtaaactggctaaaactcattcgaaggtctttatcaataagtgtttaaaagcattccaatgttcctactttttaccaaggatttaacttcctaaaaatgtaaagatacaatctagaagtacaattaaaggtgtcatcacagcactgtatgtaataccatcttttaataatgttaaatttaccactatactcagaaaccttttttttaaattaagctaaatatccaatgagatgggattgaatgcatagattatggtatgtgcatatgctggtatagtctgcttccattaaaaataataaatcccattaaaaataatgttctcagaaaaatgtaaatattggaaagctgttcattgtaatataatgttttaaaaatttgtaggcatacatatgaagatgtgcttttgtatatatgtatgtatgcatgtgtgtacgtgtatgcatgttttcttctgtaaagaaaaaaccactgagtgtactaaatgttaatgatgattattgctgagtggtagtataacaagttatttgtgttttctttatgcatttctatgatgtttatattttctatgagtccattgttttaacagaaaaaagaaaaccacctttttttaatgcaaaagcataagtagtgacctcattattcacaacatacacagttataaggggctagctctggccacaaggcagaaaccaggtaaaaatgtgcagtaattgttccggcttggatctaagacaatgacctcagtatccatatattctccatgtctgagatcttactctgatctcattttggattagtagacattactgggctttcgagttaaaacgactgagtttaaaatcccaggtttttcctcttaatagcttttgacctggcataaaatatttaacttttcagagccccagttatcaaacgtaaaacaaaaaaatgatgttgcttataattaaccttaagaattaaatgaaatagcatccatgtctagcacaatgcctcaaatgttattttgcttttccttcctagaaatagaggaagagctgaactcacaaggacagacaatattacagtccagacaagagatagcaggggtctacgggctgttcagggacctttagacttctttcaaatttggaacaaactcgtaaatccccaaaatacagttgattctggggtttcacctggacacttgattccatctcttttccatcacaggaaaaactagatctttggtgtttgaaccaaaagccccaaatggtttccaaatataacctacatgtcttagaacatcagatataatctcttctgtaacaatgattaattaaagaaatggagtcctgagcgctgtattatacatgaagcagaaccctcttccatgcactcactttgcactcccaagttgatgacattcattaaatgtaaaaatgtgtgagtaatcccattgtttttgtttgtaggtcccgagatgtggccgtagttaaagtgaccatgaattttgagccaaataaagtgaatattcaaaagaaaaactgccatatggagggaaaggaaacagtatgcataaatgctacagtgtgttttgatgtgaaattaaagtctaaagaagacacgatttatgaagctggtaagcaaaataattatagcaagtacttttgggtagaggacaatatatttgctctagcatgatgaagtccagtaggatattgtattttccccacatggtgagctgcacgtcatatttgccccagtgaagatgcagaaccttgaaaaaaaattctgttgcaaaaggaataggttatggaacccagtcaattctggagcagaaattacatgtttgtatgcagtgccctcaacactccatagtttctgtctggctctcctacttgctatgtacaatgagacgcttaagaaaaaaataccgattcagaggtagagtttagaaattgagctacaaatgggcccagttttccttcctgtaggtttctaccatgactcttctctcccttctcttgccccctcttgggaaagactgatattgcagagaaccctaatactttaccattcccacatttccgagatcctttgttccattgaggtgaccctagtttccgagagtcagacttgttctgtgtgtgtgttctcaggtgcatcaggtcagcctgtgcttcctcttcctccctccgttctccactttctaaggcagctttttaatgatgttgaaatatgctcgaatcaaagctataaaggccattggctaaagaagagaaatttactctgtaaccaaatacaagcagaatgagaaaagccattaatccttaaaatctgtttttcttgatttgttccatatgtgcatgtatatgctctgaaatagcctcctgactagaaagatcaatgaggtataagaacataaaataatgattttgagttttatatgtaactttatttcagtcttatttaatttttgcaaagtaattaagtgatcaaataaggaatattgtagccttcatatacagtgtaagatttcatttattttctttattgtggtatgcttattttattgaaccttaatagtggtttgaccataagctgagataatgtcattttatatataaatagattaaaatgtatatatttgtaaataaataactaaagtatatttttgtccctattgaaatataacataatcaatattctaagcagggttccaacatttctaaacttaaaaagaatgttttaagtgaaaatataataaatacagtggtggcctggcaattagatgataggcaggtgtgcatgtgtgtataagaattataaacaataaatgtaattagacactgaaagcacagtgaactcagagaccagttctatagagttcctcaaggttatcttcatgactgctaatatcattgttataacagtgtggatatgctgaacaatagaatcttttttgattgattgccaaagagatttttctataatgctaatttaataatctgtacaatatgagaatcacttcaaataaacatttccatcaattattttttaaaatttttgtagatttgcagtaccgtgtcaccctagattcactaagacaaatatcacgaagttttttctctggaactcaagagagaaaggttcaaaggaacatcacagttcgaaaatcagaatgcactaagcactccttctacatgttggcaagtaaatcatatatcgttgctgccttattccaaatcaagaatacagtagagatgtcttatttcaagtcaatcaaattcttactgttttatttcaaaatgcacttatgatgtcataaaggaaatcttgtttgttcatttttatcataaaatcgcaggtctaattttctcatttccaaatatttgtaaaactatctctagtcttccctgtctgcattatcagacatccatatattatggaacggcaggaaaagacacagtgttctagttgacaagaaaccttattcatgtcttcatttctttcactcattcatttattccttcaacttgaaaacatttaatttctgtgggccttgtctgtcagttgtggttggtaagtgattaactgctctgggggcagactgctgggctgtatgctttctgggatccatgtaactacatatctcgccgtttgattttagagcgaaggggaaaattatctggtattttctatcatctgtaggctttgtgctacttcagttttttttttttttaattttagtggatgagggagttttggaaatcaaactattaatgtttagagatggctggtaagccagtgtgaatcatttaaaatgtattttgttgggacactgtgtatatggggaatgttcccaacagagggcaggagtttcctaaacattttcttaaaatgtacatgagagtgataaaaacaagaagcagcatgaaggtaatgaggaaactgattttagtaactgacattaagacttagagacttgacggtaaacttggagctttaaaggaaccaggccaattttcctacttctgacttatttctgtattattgatatattcatagtctgtattttgaaaattgtagttcaggggcaggggagtgacagaaaatgtgcacccttttgtgccacatttgttcttcctcagtgattttcatgttgatatgcttcatgatacttatcatgaagcttattctgtcaggaccaagatcaatctattatttggtaaaataacactggagttgcccctcctatttagttaatcagaactgaacacttaggaattagaatgtggataaaatttgaatgggtatgaaaccagatatggcattgtctccaacctgctaaaaatcatctcagtctatgtttgtccacaaattcagtgtctaagttatgtccaggtactggtgtttaaaggactgaaatattttcaaaatttcgaaaattgttttggattttgaaagaagcactttgaaatttgttctggagtcagccagtgtagaatttgtatcccaaatattccacattctgagagactttggcaacgtcgtttggtctcttagagggtcaatctttcatctgtaaaataaggacaataatagttactcatcttagaggactgttgaaataatttgcaataatgtatataaagctcataattttgaatactataaatgattattgttattggtggcatgttaacagtattaatcatattcacatcctttccaaataattttacattataaaattcttggccaggcatggtggctcacgcctgtaatcccagcactttgggaggctgaggtgagtggatcacctgaggtcaggagttcgagaccagcctggccaacgtggtgaaaccccgtctctactaaaaacacaaaaattagctgggtgtggtggcacatgcctgtaatcccagctagtcgggaggctgaggcaggagaatcacttgaacctgggaagtggaggttgcagtgagccgagatcgtgccgctgtactccagcctgggtgacagagagagactctgtctcaaacaaacaaacaaacaaacaaacaaacaaaaacttatagctgtaggtatatattatattaatgaaatgtaactcattttatagaaagtttgcccttctgaagttgggaaatgttcccggaagtgttacataatgatctttggcttgaggtctcaagaaaaactatattgtgatgcaggtagctcctatgttgacacagccaagtgtgatgttgccatcactccagcagggccctctgaggaactggaagtgagtcaacaggtcatactctgaaacctccacattcccctatgccccttgtcagaatgccaatccctctccagggaagcaaaagcctgatgagatcatatgtcagattagatgcacaagaatgctgcagtaagcctgacccttgggaacagaagaaggagacataacaagatcagaacacccggtaaatatgataccagtgatatattttatgtttcaccctctaggacaagcatgactttcaggactctgtgagaataacgttggactttaatcttaccgatccagaaaatgggcctgttcttgatgattctctaccaaactcagtacatgaatatgtaagtcagatttctttaaaatacaaaataccaacttgtgaacattttaatgtcactagtaaactgtgttttttcactactctgcattgatcacaaagaacgaacaactaactggaagaaagaaaaaaaaggcaagcagattttattcctggtcaggaatggagaaagagggagctcttgctctaaagaccttctcttcaagctgtgaaaacctggggaattttaaggagttagatgtggggcagggaggtatatgtaagcatgtccagagaggaactccagatgtacaagtacagctcataaacatgcttccttatacaacatatgttcaagaaatggtggccattttcttctatggcagggactttagcattataatgacatgttaatgatctaaaggtaacaaggggttgctggttcttgtttgctccgttttctcaatggctttatcttcctctggtaattggcaaagggtcctgaagctcccaggccgtctatagttgtttttcagcaagcttacctacagataaatagactagaaaaaaaaaaactgtttaagaaaaaataatgcactttctcagctatctactgtttaacaaaataatgaactttctcagttatctactcttcaagaaaatagtaaactttctcagccatatctccaggtttgccctggtaacattaggaaaaagcttgaaacccatgcacacataaccctaaatcaatttaaaatgttttaaaaaagaattaggctcttctagactttttccaatccttctaatttcctattgttggagtttaagaaaactaataaatgacactcatttttacctcatttgaatttaggaccaatggaaagaaatctcccccattattctaataagcactggattgcagtgtatggtttaggtataaagggtgtcctcacgctgaagcatggacttagaccaccagtaaccacctaggtcatcagcagtgctgatccatctctgtccttcttcatggagcccaccttgtaaaacttgtcaaatggagtagagccaaatgtgtgcttcctgtgggtacagctgctctgagaatagaaatgagagaaagggactgagttgtgttcacttagttcctgttcccaaagttagagtccatgtgccacccctgagagtggagtgaggggagagaagagggagggtgtcactagcgtggctccaatggaagagatatgagggatggggaattctttttccccatacacctatcttccattctcccttccttcctaccagatatattgattgtcttatacataccaggcattggagcttacagtctaacactggaaacaggtattaagtagtaattagagcatatgctatggaggaggatttcagagctctctaggaacttccacctaggctgagaagtcaggacagccctcctgaagttgtgccatttcagtggagccctgaaggatagggtgatttccaccctatttaggggagtttggggagcagaggggatgctaagtgtgaaagtcctgagcatgaaggaaacaacgacattcgctagtgtggctgacgctaaagagcaagaaaggaggtgacgtgaggtgaggccggaggtaaaggcaggggccgggtcattcgggacttggtgccactgcacaaattctaaacttttgaaagagcagtgcagtgcttttgaaggtttttatttggttcagccacacgacaggatgcagcagagtgaagagtggttggagggaaacaggtggatgtgggagccccgtgggaagctattactttagttcagggaggaaatgagaatgcttgggtgtgaggtggtggtgggactgcagaagcaagaaaggattggagagatatttagaagaggagtagaatggacagggcttggtgagttacatatggtggtggtggagaggcggtcaatgaagaagaatcaagcaaaactcctagatttgtggcttgaccgttttccaccctctcaactgagctttatgatattcctaagtatttgattaattttaagagaaaaatctcatgattagagttgagtagatttagatcttgcagtacttgactttgtatttcaaaactgtccttccctggcagacaaaagccagtgcaaagcacccatgaaaattgtgcgttcttaaaaggacaagcacaatttacatttgtaagtaaatgtttactcttctcccctataaattacagggataaatataaaatcccttaagatttttgcagggaaattctccttatgagttgcttaacttactttggctgtatgccatttttgttacacaaattgatgggtaattttcaacaatgcgtagctaaattttgaaaaattctttcctgtcatcatttcagattccctttgccaaagattgtggaaataaggaaaaatgtatctcagacctcagcctgcatgtcgccaccactgaaaaggacctgctgattgtccgatcccagaatgataagttcaacgttagcctcacagtcaaaaatacaaaggacagtgcctataacaccaggacaatagtgcattattctccaaatctagttttttcaggaattgaggtaaacttccagtttttcatttatttgttctcttaacatcatttacctggcctacttttcatgctactgagataattgcttttattagattgattttgaaagaatagaaggaattttttacattagtcctcaccaatggtgaaagtattaagctttttaaaaaagttttgctttatttattcaaatatgtatgtcttttcttagattctgtgtgagaaaaggatagctcatgtataaaaactgtgtgtttcataaaatccttaaaccactgaaactgaaacagagtcaaggaaaataataacaatcaaagccaaaacagttaacagacgtacagagaggtacctctgtgttaagcaaaaaaaatttacctgcaggaaaatcaagataccatatctccctttctatgcaaaatccttactttggcaagatatttgtattaaataactgtgtcttattgatttgtaacagaggtttcttttattacattggcaataaaatatattaatctgtgtaagatgctatatcagaggtaatcagtgtttccaaatgtgaactttgctcttaattctgatctccaaatgaatcccactgagttaaaattttgtgtatatttatattaattaatattacatacaatttatattaaaagcaatgcacttattaatattatacatagtattaaaacactattgtctactttctgtaaactcagatttcatggacgtttctctctatctgttaggatatcacttagagacatgatgactaagacaaacctaaaaataatgtcatatattactatattttggattcaactaagaatattaattacaggctgggcatggtggctcatgcctgtaatcccagcactttgggagaccgaggcgggcaaatcacggggtcaggagatcgagaccatccaggctaacacggtgaaaccccctctctactaaaaatacaaaaaattagcaaggcatggtggcacacacctgtagtcccagctactcaggaggctgaggcaggagaatcacttgaacccgggaggtggaggttgcagtgagccgagattgcaccactgcactccagcctggtgacagagggagaacaagactctgtctcaaaaaattattattattattattattataaatacaaatgtacaaagtaatcttggggaaaatattaccacagaatttttctctagtaaaaattattgcctgtatcctcctatgctgacttaatggcctggcagagaggcatagctaaaaaatctgacagtgcatctcttctgtgtatattaacagtaacaacagtaataatgatggcaaccatttcttgagtcacatcatggtttaggccctgtactaaggatttcacttatttcattttcattaattcttttgtaagtaggtatgactgtactgcagagatgcgaagataaaacctttttttcatgtttcaacattcttgtaattgcattttacaattgataacatgtttatttacgtggcagtgttatttttacttcttatgggtatgtaaaaataatggcatatctcatgttcaatggcattttaaactggaaaaaatagagtatatgactaaaccacttgatagaaaatcagtcccagagaggtgaggaatcttaacaaggataaagctaacagtggtgcagtcagggtttaaattctggtggtcacgggtcagagcctatgctcttatccactgcactaaactcctccaatgactagcattcactgaagactgctctgcaccagtcttgggtgtctggattattttatccagccaccgcaatcactctgtgagggaggtgctattagtacttccattttacaactgaaaacttaggtaggattgtgagatatgctttgtctttcaggcacccacaagtgatgttttaggatttccatgagtgtagaacagctggtcccagaattctgtgcctcttccagctaaatcgagacaaaaatagtggcaaggcagtcaccaagacacatctgggaaaattctgaaagaacacgtatcaatatttcacctgcttgtccactctgattctgtttgctttctcttcctaggctatccaaaaagacagttgtgaatctaatcataatatcacatgtaaagttggatatcccttcctgagaagaggagagatggtgagcagatcatacaaaatacatgtagaaattgaatatgaaaagtaatatgtgcaaagacaaatatataaatccttccaatggtagtttaggataatacggatgaaaaatgttcagttcaaaattgtgacagattggaatatgctatggtcagaatgtttgtgccccaccaaaattcatatgttaatacttaatccccaatgtgatcgtagtaaaagatgaggcctttaggaggtcagtaggtccagagggtggagcccccatgagggattagtgtcctcatacgagaggcttgagggagactgctcaccccttctaccatgtcagaacacatagcaggtgccatctatgagaactgggtgtttccagacactgaatctgttggtgccttgatcttggacttcccaaccctcagaactgtgagcaatatatttctgttatttataaaatgcttggtataaggtattttgtacaaggtatttataaataacagaaacatatttaacaaccttgtaacaattcttacacaggcaaactcgaacaccaagacaagatttaaaatttatactacataacatatctaatttatactacataacatatctgataaaatggagctgggaaattctgttattggagtctcctaggtagtaggtgtctctggccttcaagaaaaagaatgcttcaaatagattggtttagaacttaatcagaaattctccttccatctctctctttctaaaaaaaaattgccttattgagatataattcacgtagcatggagttcactcgttgaaagtgtgtatttcagtgggttttagtatattcaccaaattataaattgtacagtcattacgacaattgattttagaacattttcacacaccacaaagaagccacgtatgcattggcagtcactctgtttttcctcaacagcctttctcccaagcccaggcaaccactaacctgctttctttttctatggaacaaattgaatttccaaatatcaattgacttttattggcaattctagaatcaggcaacaccttattctgtaaaataaaatgaatggtggatgagctgaggagaggaagttgactttatagagagaaaagggctgaagaaagcagaaacagaacgaaaagttgattggtcatttcaaagttattttccttgtaaaagtgaaagcagaggggattttcttatcatgctgtttgaaactggcttgattggggatttggtgattatctctcacttttctcatctcccaaaaagtcagacaaatgacttaatttcggctttgtggtgtggaacttaagcattatttagtctgttgggcctagagcaagagctgtccaaaccaatgacctcctatatgttttacttaacatgtttcttagtctattctggctgctataactaaatactataaactgagtagcttaaaagccagaagtttatttctcacagttctggaagctgggaagtccaaagtaaacacactggtagatctagtgtctggtgagggcccatttcatgcttcatagaagatgtcttttcaatgcatcctgagatagcagaaccaggaaggcagcattctgagttacaagggtactaatcccactcatgagggctctgcccttatgatctcatcacctgcccaaaggccccatctcctaatatcatcacattagtgtttaggtttcaacacatgaattttgaggggaaacattcacattatagcaatatgtaaaacatggtagacattcacattgaaaaagaatatgtatattatatgttattctatctattttgagatacaataaggtttcattttgtaagacaatgtttctcaaataacttcataatttgagtttaggtaatgtcatttatggaaattgaatattttagtcaaagtaaatttcttatctgttactaaagacatatttttattttataggtaactttcaaaatattgtttcagtttaacacatcctatctcatggaaaatgtgaccatttatttaagtgcaacaaggttggtttacatgtgtataaatgtatgtatatgaatgtatattgcttcttctgtgtatgtcgaatattttgctctataaactcactgacagtttcttccaggttgtaggagatcagtagaagtggaaggcaattaaccactttgcttcacaaaaacacccttaagaataattagcaaaataaagaaattttcatttaatagaaataattcacctagattaaagcaatggttctatgagctatagaagataccataatcacacatcatttatatctgccaaattgcatttaaattcataaaaaatttactgataatttaaaaactttcactggctgcccatcaaggtcaaatgaatcattagatggacttaaagttttatgatatccttttgtaatttaatatactttattcaaatcagtcagtacttctgaaaggtatcatagaacacacagactaacaacagcaaaggctcaataaggaaagtgaaatagtggtctaactttcttctaattgtaattatccactgacctgtctgcagtgagatggtgtcttttactgttttattcacagtgactagcattgtgcctgccatattataatcactacatagatgtagacgaaatgaataaattagagaaatgaattaatggattaattaattctgtatgttcaagtcaactcaacaaatatttatttgacatctattatgcacaagatattgagttagtcactgtaaggaatataaaaattactaagggcatgaaactcctcatagggtaagtattacagtagggggttgagtctagtataaaattattgtaacctgggatagaataaaaacactccattatagagatagaaagctttgtcagaaaattaatagaagctgaaataatatctacttggcaatgggaacccaagaaagctttatcaaggaacttataattgagaaagaccttgaagggtagatagcatttcacagagaggtcactgaatagcaccaggtggagcatttcaggcaaaatatatagcttgattaaaaaggttatcaattttagctgaaatataaagaatacataaagtagcaatgaaaataaacagggagtgtgcattctatcatattacgctaggtactgaatgtcagtcaaggtattatttcttaattgaacagaccttgaaaagccagtaaagtttttgagaggtaaagtcatctgtacagagctgctgcttatggagatgaatttaggaaggctgcagtgtggaatgggtgagagaaaaggggaccattcatgctaagagctgagtcacacaaatacctataatccaaggcagcatgctgctttctctgtcctgctgcttatgagccactttatacatttgggaataagcagagccattaaaaagtactcttatgcccattctgtgagacaatatgttaggtgcttggtcagttggtggaggggtatgtgtaaaataataatgaaagctaacacttactgaatatttcctatgtcctaggcacaatcttaagcactttatacttattactaatttaatcatcatttattactcatttgatatcccattttatagatgaagaaaccaaaacaaagacagataagtaatttgaccaaagtgtatcagtgtccaagaacaatctcattctctggccccagagccagtgttcattactcgttatatcatttgtatgtgttttctaatacgaggaagtatgtatatgtgtgtatgcacatatatacatgtgtttacataatatataatttaaatgataaccaaaatcaagagaataaatcagtgtttaacaaacaatatgatcatcaagtacttagtatggaaagactattaaagaagaaaacaaaagattttagatttactctcagctgtgtgaccctaatcacttatctttactaagtcctcatctgtgataaataagcatcacctgggggcagatatgtggttaaaaacagaaattcctgcaccccaagttggaacccctaaatccatatttctaagggaagcccagtaacctttgtattttaacaattaaactgagggattcttatcaatattgtcatagaattttgaaaaacataaatcagtgtgattgtcaagtctagtcgcacatcagaatcaacttgggaactttcaaccataccaatcatctctgatctccttcttcaccccaattaaaaaaatgattaaaaattatactcttacatgcttttatttagttgccaggataagcttctctttcaaacacttagaaatgtctttaaatagtcaagattttaatggtttgtctgaatgtgccgtgtattttctagtgacagcgaagaacctcctgaaaccctttctgataatgtagtaaacatttctatcccggtaaaatatgaagttggactacagttttacaggtaggagaaaactacatttttatgtggatgcctttctattaacccagtggttctgaaagtgtggtccctgcctggccaagggcatcagcatcacctggaaacttgttaggcaaattctctggccccaccagaaacctaccaaatcagaaactcggaggatggggttaaacaagccttccaggtaattctcatgcatcctaatgtttgagaaccattatactaaataacccaaagtgttaggtgttagtgataccggattgcatttgctgtccagtcttaattcccgaatgcaagttgaagacccagaagtccttcgcaaaacacgatattttcttagaggccgccagcatatttcttggtcatcgttctcatcctgtggaagctgatcagtcttctcaatctggacacacaagattaaagcatttctcattgataagagctgtttatttcttccaccattcataaaccattctttctcttaagaacttcttatctatcccaacacaaaccatgttgacaaactttccctctataatttcccctgcttaagcagaactccaagcttttgccaaataaacatgtgcaatatacttaaaaggataagaatcagtggcaagtaggtttattctaaaagtcttatcattttattaattttttaataatagtggctaacatttattgagcctttgtgttctgtcttatgtgatcctcatgataacactatggttcaaatacaactactatctccattttccagttgaagaatttgaggttcagagaggctaatttacccaaggttatatattcaggaagtgttagtttaaaccatttcacatgcttttttttttcttttaatttaaaaactgttttaaattgacacgtaataattgtacatatttataaggcgcttggagacgttgtgatgcaagtaatatatagcaactaaacagggtaattggaacatccattgtctcaaacatttatcttttttttgtattgggaacattcaatatcttctttctggcttaataatttattatctatggcactctctctttactaaatggagactacaaaaatggcatgattataggacatacatgtagattgtgctaatatttctcagcctttaaattctgtctccacttttctgtatttttctgtatccacttctattggtgcactgacttttccccaagagttttccatttacttaaaatcaaattttggcaaacacttataaatattttttgtcttcccttgactgaagtgctgcttaaaaacatactattttactctaccaagttcatccaaagaacatgatgaagctgtgtagagaagattgaacttttaagtttagcagtaaatataggactttaaattatgaaatggtaaaaatttttaatctatttagaattcagcattacattttagtttcatttttcactaggtataaatggtattagtgaatttacagaaacttttcacttgttaaccatgaaattttaacttttaaaactcatattctagcattttggggtcaaataagcatcagtgactattgaactaaattacataatccttctcactctcctcaaagatttaattttacgtttcaaggtaaatgaattcccctatgatttgaaatccctacaagtatttttgtggaattacatgatatggagaaagaaaataatgaggccaaataaaagttaaactttgttatgttttatttttcttctaattaattttttaagctctgcaagtgaataccacatttcaattgctgccaatgagacagtccctgaagttattaattctactgaggacattggaaatgaaattaatatcttctacttggtaagaaattacctctaaaatagtattctaaaggagttatttgtaaatatataaattaaagtattaacagacacataaaaatatgttgcttcaatgtttaatctctatattccagcatattttctttataatttcataaatataaatatagacatataatatataaatataattttcaatttatatttttctttataatttcactgaagatttaaatttgttgtaattatattttcacatcagtttagagatctaagcctctaatttcctcaaaataagataccactagaatgactttctagaaaaaaaaaataaactatgggactagatagatgctaccgataaacctgtagactttacttacattattttatcagtgtgactgagaaaagcactttttcattaattatgactatatcagaaatttgttatcacaattgtcttggcaattttttttacttaacaaataagtatgtatcacattctccttattgttacctttcacatgcattgtactataaattactcatgttggtactaccacctccttaaatgatgttttctattacatttatttttccttttaaatccttcataacaaactctataccactatagcaaacaatcacggaattttattttaggtaatgcctagttactgacacagactcaagttaaaatcactcaaggaaaaaagagagcacaattcaaataatggatttaaatatgtattcaaaaatatgagataatgcaacaaaattataaatgaagacagcctcaatccttttgggaattgccaaccacaaaaaaaagttctctcatagagtataaataaacgtatactcccaagattaatttcattttttaaaatttgtactctttgctagaattcctatgacaatttatgctaatttccctggaaattagcataaatgccaatcactctactggattctaggacagatttttggaattcaggctatcagatttctccagccctattcactttccctgaactagaaaattcagcaaaaaaagaaagaaaacaaaaagactttgttgcagaactttatatattgtaacttattagggtccagatttgaaataggtactctctcttataaaagtgttgatatgaattacattgctaagaatattcctgagcataaaactttgtgtgtatctctgattattttgctgaagtaaattctagaattggaataaaggagttttttaaaagaactttttttaaggtgaaacccggtaagtttactgctcggaattttccctaggaaatttttggtgatagaaacaaagatttcagggatgttcttaacaatattatttataatagtttaaaaattaaagcctgggcacaatctaaacacttaacacaatgaaattacttacattatcatatatttagtgaagagattatcatatattcaatggagagacaacgtaatattttagaaggcacattttggagtaagaaaccataatgctgctatttactagctttgtgatcttggaagttcttaattttcattccaaccttcttacctcatagataaaacaaagataatatgaggatctgcttcctgcagttgttaacagggttaaaagcaataatgcatataagaagattagcacagcatgtggcacatagtcaacaatattgatattgtggttgttatgaacagtcatattctcaataaacttatacatttaaaggaaaatgccatagcataatacattttacagacagggtacaaaactgtattttattgtgttacaaattttataaatatgcatatatgcaaataggacaggtaacctacactaaaatgttaccaaggtagttgaagtataggaaacgtttattttcagtattttccaatgtttctacaaggaacattttttaatcagaaaaaaatggtaattacagaacacaggatttcttttttttttttttttttttttttttttttttttttgagacggagtctcgctctgtcgcccaggctggagtgcagtggcgggatctcggctcactgcaagctccgcctcccgggttcacgccattctcctgcctcagcctcccaagtagctgggaccacaggcgcccgccactacgcccggctaattttttgtattttttagtagagacggggtttcaccgttttagccgggatggtctcgatctcctgacctcgtgatccgcccgcctcggcctcccaaagtgctgggattacaggcgtgagccaccgcgcccggccagaacacaggatttctaactgaatatcaggaaacagaatttgactggaaatcaagaagataagagttagggagcatgtttaagggtccaggtgcagctggtcaggaacctccagaattccagaattaaaggatgtatttcgtctttacaaacccaggaaactgcttcagatctgaggagctctcagtctggaaggctcagttgggtagatcactggctttccttgggtctatctatgtagatcaaggcgttccctacccagctaaagaagctgcacagggatgccataggtttcaggcctgcagattatgcttcagcagtaggaaggggacaactgcatctggttgtcccagttcagttgtaccttttaagcagggaaggacctctggatagtgagttcagtttcctgttgaactttatcctgcccacctttccctctgagctacactcactactggtagcagaacatgatactaagtggaaactttgggttagtggataaaatcgaatggagactgagatgaaagtaaatctgactctcataaaaccagattatcaacagccagtgtcacggtagccctagctgggggtagaattgtgaagggaagcagatgggagtctggttttcctgtatagtggtggcagatcccatctagccaggattagagatgatttatgggtttaaggaattatggcaaactgggtaaaggcaaccaaaaatctaaattgttccgtggtctcccttctttccagtttcaaaaagactggtatgttaaaaaaaaaaaaaagaaagaaaaagaaaagaatgagcatggcaagaacataataacagacaaaaacttccaattctggtcttctgttaatcctaggtctattaagagaatgggggatggaggaacaatatgattatagctgatacatacggctactgaccattaagtgtccatattttctgctggctgaattatgccaattctctgtacagcaccataaaggatctacatttgtttggggattcaaaatattacacaatttacttcatcagctagaaaacaaagccctacataagacagaagaattctattaaaagaggaagaaagattacatttccatttttttcttgtagattagaaaaagtggatcttttccaatgccagagcttaagctgtcaatttcattccccaatatgacatcaaatggttaccctgtgctgtacccaactggattgtcatcttctgaggtaagtcatgtgtgccttggaattatgtcattactgttatcttttccactttatgtttaagccttttgttctgcatgatacttgtaataaagaattttaccaaagtaacatggagaggtatttagataattaaaagcaaataataatagatgtattattccctagagctgctgtaacaaattatcacaaattgagtgacttaaaacaacacaaatttattctttcacggttctggagtccagaagtccaaaatcaaggtgttgacagtgttaattccctctggaggctccaagagagactctttctcatgctgttttcctagcttctggtgacaactggcaaccctagtcgttccttggcttgcggcagcatagctcctatctctgcctctgtcttcacctggccttctctgtgtttctatgtgttctccttctctctttgtgtttctgcacactcaccattagatttagggtccaccctaaatccagagtgatctcatctggagatccttaatataattatgtctgcaaagaccctatttccaagtaaagtcatatttactagttctagggagatttaggcatatctttggggaccactattcaatccactagagtagattttaaataattcattgttatgaaatgtttcttacacttttccttgatttgtggtaatcaaacaactctataaagtgacttcttaattgtacctaagcatgcacagctgcaaacaaaatagtataattgtatttactcacatcccaaataatagcaatattgcaccccctttatatttttagcttgaatgagactatatgatggttcattatggtttagtgcctaaaacaaaaaatcaccataagtattgaattaatgtgtgcatgatgtcagaatttggaaatctgtcttttcatgcattttttaaagtgttcccagaaatcaagaaatagcaacaatgctaattggcttgtgatcacttaaatgttttcctaagggcaaggaaaaaataagcctttggaatttccctctaatccaaaaaagcaggtttgtgaaaatccagaagagaaaaaaaaattgtacttttcatactgcttaggaaactttaatcttattaacttttgtcaaggatattgacagtactggggaagcaaaaggtttactaggttaagtctagaaccagctatcttataaatatagcattttaacataatatattaacatctatagggctgtctgcttacgtctacctcccatgtagactgagtgtcctatccttggtgtgtagggaatcaaaagtattactggatgaatacataaatacagatgaaggtctctcgcttttcaattgtttcatgagccataatattgaacaagtatttttgttgtttttgtttccttttttttgagacggaatctctctctgtcacccaggctggagtgcagtggcgcgatcttggcttactgcaacctcctcctcccatgtccaaatgattctcctgcctcagactcccaagtagctgggactacaggcgcctgccaccacacccaactaatttttgtatttctagtagagatggggcctcaccatgttggccaggctggtctcgaactcctgacctcaggtgatccacccacctcggcctcccagagtgctagaattacaggtgtgagccactgtggctggccgttgtttttgtttttatcagtagaatttaaatgcttttctctctctgtagtatagaatttataagcttatctttgattaaggtaataatgaatgtattaatcacgtaatagtaagttctattagcattctttcttttccattacaacctcactagtttccattacaattcaaaagtagcatggtaagagtacatattatcttggggtggatatatatgtatgtatggctggtgcataacaacctttcccatacagcacacttacaaagatggatctctaatatatggcaatggctgtcattcacagattctttacactactgcagcaagtcatgtttttcctctgatatctggcattgtctgataaatgtaatattttcatttctagaatgcaaactgcagaccccatatctttgaggatcctttcagtatcaactctggaaagaaaatgactacatcaactgaccatctcaaacgaggcacaattctggtaaattaagacaagtgctatttttaccttttgctttccaaatgaataaaattgatatcaatctagaaataaccatctgaagaatttaaatatagatatttgataaaacggcaagaatactgatatgtatctctggacatttaaacaggactgcaatacatgtaaatttgctaccatcacatgtaatctcacttcttctgacatcagccaagtcaatgtttcgcttatcttgtggaaaccaacttttataaaagtaagtaaatacatagttctatgcacttattgaataatatcaataaatattcatttaccacttagaatatgcaaggcactgtgctgcttttggaaagaatgtgcgactggaagtataagaggatgtgaccaagccccagctctacttaaccagctatgtgtgtctcatcttccttgtctgttaagaactaagatattaccaaggtcccctctggagagatatacttttttcaatctctcttatcctttttctttgtactttaagagataaatacctttccagtaccaaagcttgcacttatcttaatactttggaactcagttaatgtacagagtataataaagtggcaacccttgaccccagtaacaaaggaaagagctaacatataccatagacttactgtgttttatcagactgttattatatgtataattttataatatataggtatatatgaagccttttttcttttttttttttttgagacggagtgtctctctgtcgcccaggctggagtgcagtggcacgatctcagctcactgcaagctccacctcccgggttcacgccattctcctgcctcagcctcccgagtagctgggactacaggcgcccaccaccacgcccggctaatttttttttgtattttagtagagactatgaagacatttttaaccccttataaagccaaatctgtctgacaataagctactttaaaactttttattgtattttgtattatttatttctcaggaagtatttagttgaacatatgactttgccatttttgaatttgattatagtaagttgctatttttatgtcattaactgttaatattggcaatttcattttttaaatttcaactttaattttagatacagggagtatacatgcacgagtttgttacatgggtatatttgcaggatattgaggtttagggtacagattccatcgctcaggtagtgggcataatacccaataggtagtttgtcagctcctccaagtagtccatggtgtctactgttcccatctttatatccatgagtacccaaggcttaactctcacttatacgtgagaacatgtggtatttggttttctgttcctgtggaatttgcttaggattatggcctccatctgcatgtatgttgctgcaaaggacatgattttgttcttttttatggctgtgcagtgttccatggtgtatatgtacatattttctttatccaggccactgttgatgggcacctatgttaattccatgtctttgctgttgtgaatagcactgcaatgaagatatgaccgcacgtgtctttttggtaaacagtttctttcgggtatatacacccagtaatgggattgctgggttgaatggtagttctgttttaagttgtttgagaaatctccaaactgctttccactggctgaactaatttacatccccaccaacagtgtataagcttttccttttctctgctgcctcaccattttctgttattttttgacttcttaataatagccattctgactggagtgagatggtacctacctcattttggcttttatttgcatttctgtaatgattagtgataatgagagttttttcatatgtttgttggtcacctgtatgtcatgttttaaggagtctattcatgtccttcgcccattatttaatgtggttatttgttgattgattgcttgctgagttgttcaagttccttattctggatattagacctttgtcagatgcatagtttgcaattattttctcccattctgtaggttgtctgtttactctattgataatgtcttttgttgtgcagaagctctttagtttaattagatcccacttgtcaatttttgtttttgttgcaattgcttttagagacttagccaaaaattatttgccaagaccaatgtcagagagggtatttcctaggttttcttataatatttttatagttaaaggtcttatatttaaatctttaatttgtcttggttagtttttatatatggggaaagttaggggtccagtttcattcttctgcatatggctagccagttatcccaacaccattttttgactagggattcctttccccattgcttgtttttgttggctttatcaaagatcagacggctgtaggtatgtggctttatttctgaattctctattctgtttcactggtccatgtggctcttctgtaccagtatcatactgttttgattaccgtagccttatagtagagttcgaagtcaggcagtgtgatgggtctggctttgttctttttacttaggattgctttggctacctgagctctttttttagatccacatgaattttagaatagttttttctaattctgtgaaaaatgatgttggtactttaagagcaacagtgttaaatctatacattgctttgggcagtatggccatttaatgatattaaatgaaaggttttttcttttatttgtctcatctctgatttctttcagcagtgttttttaggtctccttttagagatctcttacctccttggttagctgtattcctggatatttcagtgttttttgtagcttctgtaaatggagttttttttttttttttgagacggagtctcgctctgtcgcccaggctggagtccagtggcgcgaccttggctcactgcaagctccgcctcccgggttcacgccattctcttgactcagcctcctgagcagctgggactacaggcacccaccaccatgcccggctaatttttttttttttttttgtatttttagtagagatggggtttcactgtgttagccaggatggtctcgatctcctgacctcatgatctgcccacctcagcctcccaaagtgctgggattacaggcgtgagccaccgcacccagccctgagttgtgttgtttatttgactctcaccttgaacattattggtgtatagaaatgctactaatttttgtacccctattttatattctgaaactttactaaagtcatttatgaattctaggagttttttggcagagtcttaagggttttctaggtataggatcatattaccagtggaaaaaagatagcttgacttcttctattcctatttggatgtctttatttctttatcttgccttattgctctggctaggacttagagtactaggttgaataggagtggtaagagtgggcatccttgtcttattccagttccccaggggaatggttccagcttttgcccattcagtatgatattggctaggattagttacagatgactcttattatttggaggtatgtttctttgatgcctgtctctacctagagttcttgtgctgattctttctcatcttgggggactgatgttcttcaactgtggtgtaagttgagtgtagtcatttgggtttgtttctggatgctttcagagggccaagtctctgtacaggatctttatttgtgggtgtatgctcacaggagtgtttattagcaaagtaatttttggtgttgttgtttgagctgtgatccagtagagggcaattaagggtaatgggcagtagataggctcttagtcttgccactcttgtatttgctcatgtttgcaggggtgctctgcagtgggtagggagaggcctcctccaatcactggcactgtacccatgtttcttttgttaggtgttctgggccacaggctctctcgggcagaggccatggcaggtagataggtgacaccttttccgaaccagccctgtggagggagtcatgccctactccagtgctggcccacgctggcccacgaatccatgtttgttacccatctcagtgctctgagatgggggctcctcccctacttgagtgccagccatagatctcagcttggtactcctgagacggacatgccatctctgggtctccaggacaccccgcagctcagagtcaggctctggttgctttggaggatccaaagtcctcccaggtcacagggaaagtactcaggtggggcgcagcacccaggctgggcggcagagactgcgctgtgcacatgctcctgtggggcagttaggcagggactctgggagggtctggcaggcgggagaggctgcagaacagacatgccccagtcccatggggaatgcctgctttctcctggcttgtggtcacctggggctagagcctctctgaaggagatggggagtccgaggggatgggcacctatgtctgtgctctgctcacaaaagctcctgggctccatgctagctgaagccctgtctctacctgctccctgggaaaatccacctgccagctcacacatccattggagatgttgggtactctgtagcttagatcccagatgtctgtggcaagagtgagctgtccctcagtcccctccctcaccccttctccaggagccatttagggccaggaagtagcccaagcattcaggtaccctacgcagggttcccagcttctccctcttcagcctcagcatctgtgttgcctctccacacacttgcggtgttttctccctagagatcagatctgcccaaattatattatttacttgataatttgggatctcttagtgggagagatggctgtgtctagttagccatcttgtccccctagatcatcaatttcatttttaatcctaaataagtgcctagataaacttcatcaccagaatgtagttgtttcatgtcttgctacattaaaggtaggcagagtttgaggtttgttttttctaatgataaatcaatacaaaatatttttaaaattttttttcattccataacgaggatctaagtaaggattttcagtggcaaatgagggaggacaagtgcacggttattatttgatactaccagttccatttggaagttaacaaaactggaatttttaatctctcagaaaaatcttagcttttataaatgtcctactcaaacatgactagctctcattttgattagcatcatatattaagaacaaatcctatttgcttttcagtcatatttttccagcttaaatcttactataaggggagaacttcggagtgaaaatgcatctctggttttaagtagcagcaatcaaaaaagagaggtaagtgcaacatgagttttgaaaacattatgcatttcactctgaattttgtgacataatgttttataattgttgatagtcccttaagcagtgactggtattgctctcggtaagtgacagacactatttgcttcaaattatacttcattagcttcaaatgtgattttagtcttattcatccttgtaagacactgggaaaatcatgatatttacaattcacatgccgcatttgactttatcacttataactatcacggtaaatggatgtttttactttcactttgataacaaatgatgcagttgtaactttcctccttaaaagctgacattataaaatgcagctgatatctgaagagcagccgcaaaaaacaacttctttataaaaagtgcctttatactgtacaggaaaacatgtacattttttaaagttttctttcaaatttcattgagaaatttgaaacaaaaaagtgatggtatttcctaatacaaattcagacttgagtcctcagtaaaaatagaaaggtttgagtttttaactcttgtcctttttataaattaataagccaaggtgacggagtaagaccccatctctaaaaaaataaaataaaataagtacttgttacacatgcaggcacttcagcatgatctccccccttctcatgggagactttaaatatcccatgtggataacagcaccatgtgaatcataaaattcaatttggaagctccctaactttcagatgttctttttaaattgcttatttcaaatttttccaatatcaatgacttctgataagtatacgcttttcaagaaaaaggaaaatacatgcatataatgtttacttatgtcataaagagcgcttagcataagcaatgcaaaatgcaaagttgttccttacatagaatagccaacatttcactaaaacctaaaaaatttgagtatggtttatgttggaaaagtacatatgattcctaaatttatgtgttaaaattttataatgagttttattttccctaaatattagttaaaaattcccctggaaatatttattctacattcatcctaaaggaaaaattatatctatattgataaaattactaaaagtgatcattttgtaattgtgtgatctgaggaaagtcactgatcttatctagattccggtttccatatctgtaagttcagggaattgttttacatatgtttaaaatctgccttgctgggcttagtggctcatgtctgtcatcccagcctactcgggagactgagatggaaggatcactttagcccaggagtttgagatcagcctgggcaaaatagtgaaaccccatctgtgttttgttttgttttgttttaagaaactgtcataatggtctgatgctgtatatgtctacattcttgccagctctgtcacctacctggagtgatttgagaggttttgattagtatcatgcatatacaaatctctcccctgttagtttctttttctaccctaatcttccctctaggtaaagaaattgaggtgttactgttaaaggcaaatacagggcttgaactattactagccattgatatctaccctaaattaatttttttcaaatcccccagggatgagacacagagcagataggtttcattgaggtttgagtgccaccctgagagagcttgagtagctggaacactaaaagcggtccattttacagctttgcttcagttaaaacctgatttatacatgtggacccagtgataagtcaagtagaagaaacattgtggtataatgaagagcacactgggagtgaatacatatgcaaacattcacttacccatacacttgacatgtatgcattatactttcaatttataaacaaaaaattatgcacactagaaataaaataaggagactttctcaggttcttatgacaacaaactgcgacattccaatctaaactaatgctattgtgataatacagtagtgtactaattaatctttaacacacataatactttggttctccctgagttaaacagaaattcactcctccccttgagcattccaatccattgacatttaaccctttatgtataaatttcagaaggataatattataaataccttttggtaataataaatttgacatagttagagatttagactagatgaagagcattttctaatgtaaatctaatgttttctcattatatagtaacgagattaatgcactggtagagaattgtagcctgcaagaactcaatgttccaggagttctaataggtgtttattatgttaacaatcttgtttaataattttcagcttgctattcaaatatccaaagatgggctaccgggcagagtgccattatgggtcatcctgctgagtgcttttgccggattgttgctgttaatgctgctcattttagcactgtggaaggtaaacaccaaaattcctttgactctctacttcaatcatcaacagcaaactggagaaataagctctgatatattcagactatgtaatatagtattattacagcaatgaaacaaacgttgaaatgatgactaagggaaagaaaaaagaaaaatgcgtatttcaaacactgcacacaacttgacccaatttttgtaaaggaaaaaaaacttattttaagttagaaatagtcaaaaattcacaaaagtatctttctagagtttagtatgataggggactttcacatgtgtaacaattaaaattttataataagtatgtatttcttttataaacagagaacaatgaaaactgtcttttatagagaaagaaaaaatgaattcctatgtcaatttaaggatatataagcagtagattcaaggttaaaataagccttgttttaatcacatctccatgtgtcttaaatatcaaataattctttaatgtttaaatatatatggcacattttatgtaataaattgtgtgcctgagtggaggataagggatcagctgatgtaggggagatcttaaagtttcacagactcctatttcaaattctgtggtaaatgtgagtaaccacctattttgtgtcaagtaactctggatatttatgtaatgttttgcttaggctgaaatagacatgatttttaaaactcttagcagctgtataattttcacattaagtagaattgagatgacagcttttgggataagttgaatagagaataacatcccatacagagttgaatgttttttcaattaaatatcaaataagcatttattctagcataatatccccctagattttacctattgttttgttaaatagttaaattatgttaaaaatataggttgtggctacatattaattgttctattacctgagcaacataattatttaatcaaatagtttaaatagcaagtttctctcccactgaaataccaactgttcctatcctttcttactctcctatgactcacttcctcttttgaggggcttagtctcagaggagatggtgaacaaagccagatgtaggtcagtggcatttaattcagtaaatagaatccatggcttttctctagcaaagttccccaaacaaaattctccactatagccaatgtccagctcttccttctactttataagggatcagtgttctctctgtaatacctagctttgccacactgtggtacccaaggcctggcttattggtgtcaaggttgtacttgaaatataggaagtggtttcttcatttctatgcacctctaatagagagtgttactgttgatttttttcagcatagtcttctgttctcagcactgcacttacctctatggttttagaacaccgctggcaggagaagaggaaaaccagagctgatatttggataggttctttcaggccttgtacctctgtttcagacaaacaaataggaaatttcagtcacctatttttcagtcagtagtctgaaaaagcataaatgtaaaactaagctcattgtttcatccagataatgatgtgttgatacattctgacagcttcttaggttattattaatattattattattgcaggcccaaaagaagatcatttgacaaactttgggctgtcttacccggtagaaatagttcagccacttcattgggaggcccagcaatcagaactgtgattctaaggtagaagggaagaaactagctcttatcgaatgcttactatgtgcagggagctattttaaacatttctgctttaagcattcccacttaatactcatatcaaccttatgaggtcgtatgaacctcctcttttaagtgaagaacataaaatttaagtatatttcccaaagacacatagtgagattcagagtaaggatctgaattctgtgccaaaaccactgactattatcactctgtgttctctcttgcttccattcactctggtgtccttgcaacaatcttttcgaccaagtattttaactacattttacacctgaggacattaaagcaaagggaggtaaagtgactctcccatgattactagctagtaaatgactggattcaaggaatgatctacagagctctttctttttccaatatatcctactgctgcaggctatagggtagggctctttactctggagctccaggagttgggttttgttcaagagagtcatgaactctcttaaacacataatactgtctttggttttggaatgagggtccctggttggattcagactttcggtagttccattatatcaagaaggctaatcccacttccccctactttaaagttctgttggaagctgcctgaagcatgagttcagttgcagtaggttcagaagagctactcttatcccagacatcttttttattctaactagatctggatcagacacctcaggactatcccttcttccttcctttcctgaatcccaccagtttggagttcattggaactcccaagtctgagtctctgtgtaagagacaggccaaaagtttctcttagagcagagattcactttcaaaagacacagtctttatatctttgtcttcatcatacacatggcaaaaattaaagcttgacaaagtgttagtagctgcttaatacacttcatgattgatgggaggaatcttgtaggggacgtaggtttaaataggtggagaaacttgtcctgaactgtggtaccacatgccgggggagatgccagcacaccaggagccatgagagactcagaacattcctctctcctaacttgatgtcataatgatgcctgaagttcctcaactgatgatttatttattaatcctaaagctttattcttcatccaatatacatgttctgggtgggtgtggatggggactggtgtctcaccactttttagtcttttatacattagtatgaatttattcattcagcaattattccatgttatattcattaagcacttacttttctgacagttatcacctcattagagcctttgccatagggttttgaacaagggatcatgaagcaaacacaggaaggaaaaaatgaaagccagtgctgcaaagaaagtgttggggctgaaaacaaactctattggtttcaaatttgggctaggattggcccagtccatcttgaagctataaactattttctcctaatctccactctttgccactcaacttctcttaaaaacccatgttaattggttgggtggagtgcttagataacagaagttattttaaaatagaacatttaatgtgtagaagccaaggagcattgtaaagaagcaaaaagagctgtgagagatcagaagcaaagcagagtgggaaggagaaaaagtcttagaatccaccacctgcttttgtgaaagccttgtctgtttatttttgactcaggacatgcaggcacaagttaagaagcctaatggtttgtgaatctggaacttttatacttggctcatatgaaaaagcctgagacgtgtaggagagctggcatttggggaagaaaaacttattgttttcatgtgtatttgttccgttaccgccttttcttcatctaccaccaactagatgatggcataatagaagacatgagccctgaataaaaattttccaacctaaaagtgcatatttttgagggtttatcccctctaagccctcagttgtttaataattattttataaacacatagttccctggcataatttgccataatttcgtgattaaaatgatgtagaggtgccacacttttaaagaattaactcattgcctttgctcgatctattatagccccctctcaaatttaaaaaatatatacaaatttgaaaaatcacttacctatgacccttaattttctttttttaaaaataagcattttaggttagataattgcaaagatcccttctatcccccatacttagttttgttattctataggatgggaaacaattgcagcacttataactttttatgatgccccaaattgcaaagcataatgaaatatggctcaccatccaccacgatgtgaaatttttcttatggtcaacaacttcattttttatttccaaatgatatagtgtgttttcaagaggctttttatatcaaatctatataagcagacgtcctgatgcatttaaagttaatacagacaactcagaaatctccctaacgccctagccataatatacctgtcagattccctaccatctctaatgacctcaacttatggtcatcgatcatttgatggaaatttctctgccacatccctgaaaaaaaagatgatggcaaagaagagacaatgctagctaattgcagtttgtctcccaaaatattttcccagaagcttttaattagttcaatgtgtatactatattttactaggggtcatggtgtatttaaccaatgaaaatattaaaaatgaaaccgcggcccggcgcgatggctcacgcctgtaatcccagcactttgggaggccgaggcaggcagatcatgaggtcaagagatagagaccatcctggccaacatggtgaaaccccgtctctactgaaaatacaaaaattagctgggcatggtggtgcatgcctgtagtcccagctacccaggaggctgaggcaggagaatcacttgaacccgggtggcggaggttgcagtgagcggagatcacgccactgcactccagcctggtgacagagtgagactgtctcaaaaaaaaaaaagaaaagaaaaaaaaagaaacagcaatttaataaatgtcattttttgacattgaatattaataggtcaatgagaaaatatttcttaattatattagttgtgtgcccagcattgccaatatactattaaatttaattctatccaaaggattaatatttgctacctaaattaaaatagttaattgtgttatgttttgtgttttctcaacagattggattcttcaaaagaccactgaaaaagaaaatggagaaatgaaatattttatgaaagaaaataataacaattattcaataatctatcctcaggtttgcctcaaatatgtgacaagaaatgtataattcatgacatagtcatgtaactatgtaatccatcagggattcattacttggaaaatgacaggtcatgcattatccaaaaacaataccaaaaagacatattttataaaatgacaaaaaatattttacataattactcatttttgttgagtaagcaaaattacaaagtgtttttaaaaaaacctgtacaaatatgtttatgtattaaatcaccatccaaaatatttaaggaatatataaaaagatttttatgatcatagaaacatctattttcaaaacaatataaattaagcttttccccttgattcctgttggatatccatgttcagcatgacagtcagcactcgtaaatgccaagaaaagaattacctgaaaaagatcatttctccctattcaaatgagaatattttcccttggtagaatccatatacaatatggattgaaaattaagtcaccaagaatacatttagcatctttgtgttgggttctatacctaaaaattttccctccctgcccaaggtgattggaaagtactgcaattgagctaaaattttatctaggatggaaaatcaggatagactcgtttaaaaacaagtatattaaatgggttaaattaagcttttacagaacatgcttaattttgatattgagctctaaatgcaaaactcttttatactgaaaaaacacttaaagtagttttgtgtggcatcacagtgatttgtcatgaaaagccatatatgggggacatgctaaaatggcttctgaatgaaatacgacagcagagaaagatgccactgaaatgctgaaattatctttgctgagcagcttttgaatgctaagggttccagtatgtgacccaaagaaagagttgtctcaactccttggtacagggttcattcaaacccccaagctgtgagagtgtgtttatttttaattttttaaaaggtatttaatttccaaccacacttcttatttttttgaaaagacaattttccatttcagtattacattttaccaagaagtcactgctttttaggtgtgttgcatcaatatttaaataaaatcccagaaatgtattttaaagaatttcaggtttgaaaactcaaaccaacaggaagatatcacacctttgtatgtgcttctttgttcttgaagtagtcattatggttcattggaatctactgtagcataagctcctaggttgctccatttcttaggaaaatagcaatgaatgaatgtatagtagctgcatgtgtgaactactgctgtaaagtttgctgacatttctgcaacaacatttctccatctgatttaccagaacctgtaacaagaccagaacatgtattcatccagaaactcctgggctctgctttgttcaaagaggagcaaatccacatagaaattaaatgttataaatttatttttttaaactaatttccaaagaatttagctgaagactcagagtcagcctacctcttgactctccacatccgcatctaagatcctgaaggccaaaggaatgcgcctgtgggatgccaaagccatcagtagctggaagaaagaatacctctttctagaggtttggtgtcctcttgctggcctgtcattatttggaaatacgcgcttttggaatttccttcattttcgctatttccaggttcagaaatcatacctaccacttgttctttctttgcccagtaaaactcagggtttctcttattcagagttaccatgttgcacacccccagtgctcagcctgcccagaagcccttctctgat

SEQ ID NO: 29048 - DNA, 40173 bp, Homo Sapiens
aaggaaattcaaataaatacgcaaaatcatttgaatttgtccttgtacctgcaaatgtagtccatgtggtctcatcagaagtatggatttttttcttcttcaggtcattgtatttcagacatacacaaataaaagtcatgtgcccattgaggcaaaatatatctttcctttggatgacaaggccgctgtgtgttgctttgaaggtcatcagtgggaagtacatagttggagaggtaaggcagagatcatgcctgctctctgctttcaaagtcagcttccatttcccagaacctttgttttcagagtccccatggctataaggttgagtagcagccttgtcataaaacgagaatattcttcgaagaaccagttcttgcacagtaagccttcctcaaacatccctccctgatgaagtgtttctatccctatctatccagtcttcatcatcagtgtcttgcacactctttgccttggcactgtaagagtgatttcagtatgaaaagtttaagagggccgggtgcagtggctcatgcctctaatctcagcactttgggaggctgaggcaggaggatcactcaaggtcaggagttcgagaccagcctggcaaacatggcaaaaccctatctctactaaaaatacaaaaattagtcagatgtggtggtgcacgcctgtaatcccatctacttgggaggctgaggcaggagaatttcttgaacctgggaggtggaggttgcagtgagccgagattgcaccactgcactccagcctgggcaacagagtgagactccatctcagaaaaaaaataaaaagaaaagtttaagagaggcacattggaaaattggttaggtccttatatatttttgtaaaacctgaccctcggcatcctgctataaaagtcaagctgaaatgaaaactattgtaactttctaaaaaaaataaaaaagaaagaaaagaaacaacagtttattaattctttgtatattgtaaggattatcccacagttacaattataaactataatttactaaatttaaagtaattattattttttgttcaacataaactcccaaccaaaaaaaatttctttcactattgattctaaaatatattgatcccaactgaaagagacttctctttagttggcctttcctggttcaaattcttatcagataagtatattttgatggtcactttaagtttccattcatcttagactcagtttttaggttttgcctgggttttaataaacattgatgttgttttcttcattaaagcctgaagtcactcttcatgtaaggaatgatttaaaaatcatcttttccagattaaagagaaggaagaagcccagtcagagtaccgaggagcagtgacccagggccatggcgcttacctgatgagtcaggatgctccagtatggcttggtgtgcatgctgcgtgcatacaggagaggaaaagagagttagaacaagatatgaaatacgaatttcatcctagaagctgagaaaatttacactgttgtgggacccagacttccacttgctctaagtaaggggaagccatgacagtcagacccatttgacttacctgaacaaaggaggaaacggcatcaatagttccagacaaacaggaagagctaggcctgtcattgggaactgagtttcccagaaggaatgacagacaaaaagataacatttgagatatgtaactttcatcttctgataagagtgatatattggccgtgcacaatggctcacacctgtaatctgagcactttgggaggctgagacgggcagatcccgtgaggtcaggaattcgagaccagcctggccaacatggtgaaaccccgtctgtactaatagtacaaaaattagctgggtgtggtggcaggcacctgtaatcccagctactggagaggctgcaacaggagaacctcttaaaactggggggcagagtttgaagtgaggcaaaattgcaccattgcactccagcctggatgacaagagcgaaacatcgtctcaaaaaaaaaaaaaaaaaaaaaaaaaaaaaaaaagaagaagaagaagaagaatagtgtgatatatttacaatttccctggaagtaagctcacctagcagatggtccaaacataaagaagggaggcatccctgccgggtcctgtgtgggccctgctcctgtgcttttaggtgattagatttagcagggacatgacctggacagcgtggaagagggaacagctggcaggtccactggactacttttcttaaatatcaggtgttttcacgaggcttctggcaggtgctagattgcgtgtagtcagcgtctaactctagtgcagatattttagttgtttttgcagatggggccttatgtttgagtatcacctctgggggagacaaatgacaatggtgttttgaaaatttaatgtttgctggagctaggggcatattcaagattaatatagatcgaaggggtaaattattgctcttgacatctaagatatccacttgcacgacgggaataggcaatgaagaggtgattattgaacagttaacaatgctgactctatgtatggacaaactgtatgtatagaagcctggggttcattatcaggttatcctcctatgtgagttggtaaatgtttcctcctaaatacctatgtatttccctaggaatatggtccataagacaacagtcttcacaaaagatattacctatgggtaaagtctgatcaaaactattgctaacccaagaattcaggtctcccagaatgcatttgacatcttgtgactataatgttctcctatcataatatatggtattcactttgggaggccaaagaaggaggagcacttcagcccaggaggttgtagtgagccatggtcgggccactgcactccagcctgagtgactgagcaagaccctatctttaaacataaacaaagttttgaaaaaagtaaggcgtgtgatggggagtctgggtgtgcagtgggggagcctgcttcaagaggagactgtgccggttagcagtgcccatgcctggaggggctgggatccattctgcttttctgtcaagtttttgggatctttctaagtgtttctccctcatcttccaagcatgtgtttgcaatttcaaactctagtaaagtgagcttcccgggatagagaccatcaggcgtcctccctggcgtgagtcctcgtcctctgagagccgccctgaaggagcacaggaagactccagcctgccttgctaatggatggaagctgtaactaccaataacccatgttagggatcttttagtcaatgttatgatcatcaccaattaatatggaggttaaagacaaatccagtctttatccataggttgaaaaacatcttggaaattattttcataagctctttttctgaaaaataattgatgttttctttaatacttcaggaggaactcctttaagcaaggagttcttgatagttgtagaattattttagagagaaaagtaatagggcatttgtcatttaaatgtcagagatgctctttgctagagtgagagttgcttccttatgccttttgctatgttgatgtgtatcagattttaagaggtagactttattcactctttgccagctctaggcctttgggatcagatttaggtaatattgttacttatggaaattaagttgatatctttgtcagcattctgataccttatagggttgtttttagcgtcatttactccctccctcaggaattgaaagtcaagattttcaacttttttctatttgaaggataagtcagtcctctgatggatgggagcttaaattagccaaactttcagatctttcctcctattatcactttctctgtttaacctcagctacacttgagtacattcttccccatgtcttgtctctcatgttgagttgtgagatttctcaacactgttaacatgtacttcaaaaatatttctccaatatcttcaaaattaaaacaggtgaaatgcaatcagttctacagcaaatcgtcacatcctaaggattttttcccagtgtagtgccggagtatttgaatattttaatgcaaaatccaaacatagttggagaaaagagatatgttttttaaacatctggttttatgtgtacatgcggaaatctcacattcttccaaggctaagaaataggaacatctgtgtttccttgagtgagaggggaggcgcaaagaggcaagcgctgccgcagttgtgagccctgactcaggactgcaccagcgggaatacaggagttcttcaggtcaatctcccagctcatagtttgatttctgccttaaaaatcatggactgattttttaaaagtgaattattaaatatgttttgctgaaattaattttctttattataaaatttaccattttaaccttttttaagtgtacaatttagtgctgttagctacattcacaattctgtgcaaccatcaccatcttcaaactatttcatcagcccaaacagaaactatgtacccattaaacagtaactccacattccctcctacacccagtgcctgctaccacgactctactttctgtctctatgactttgccttttctgagtatctcatataagtggagtaataggacattgtccctttatgtctggcttatttcacttaacatgatgtttttaacgtccatctacgttgaagcatgtgtcagaatttcccttctttttaaagctgaataatattccattgcctggatagaccacattttgcttatccattcatctgtcggtggacacttgggttgtttctgtcctttggctattgtgaataatgcagctatgagcattggtatgcaagtgtctgtttgagtctgctttcaattctggatatatgtgtagtgtgggattgctgtatcatatggtcactctatctttagttttttttgggaattgccatgttgtcttccatagcagctgcatcattttacattcccaccaccaatgcacctggattccagtttttctacatcctcaccaacactcatcattccggttttttctatattgattgaagtcaaccagcttttctttggtttgttttggtttttgagacacggtgtcacttggtcatctaggctggagtgcagtggtgcaatcatagctcaccacagcctcgacttcctgagcccaagcaatcctcccacctcagcctccagagtagctggaactacaggggtatgccaccactttttttcctattgttttttatttctctgtttggtttttgtttgttgttggtattttttgagacagtgtatcactttgtcacccaagctggaatggagtggtgcaatcttggctcactgcagccctgacatctgggtctcaagccatcctcctgcctcagccctccaagtaggtgggactacaggcccacaccaccacacccagctaattttttgtagagacagcatttcaccatggacccaggctggtctcaaatcccaagctcaagcaatctgcttgccttggcctcccaaaggggctggtattgcaggcatgagccactctgcccagccaccacttgttttttaataacagccatcccactgggtgtgaaatgggatctcgcagtggttctgatttacacttccctaatgactagtgacatcaagcatctttgcatgcacttgctggcttttgtgtatcttctttggagaaatatcaagtactggaatctactcataccaaggttgcatattagtaattagctaaagacataatttcaggatgctttgtaaatgtaaaggatgggatcatgctattatttaaaattctagctgggcattgtgactcatgcctataaccccagaactttgggaggctgaggcgggtggatcacctgaggtcaggagttcaagaacagcctgggcaacatggtgaaaccccatctctactaaaaatacaaaaattatccaggtggggtggcacatgcctgtagtgccagctacttgggaggctgaggcaggaaaatcacttcaacctgggagggggaggttgcagtgagccgagattgtgccagtggactacagcctaggtgacaggcaagactccatctcaaaatagaataaataaatgaagtaaaataaaataaaattctgtttaaaatcttttcgggaaaatacccagtagcaggagggagagaaaataccatagagttataaaattcccgaaggatagaatgtatattttattttaaatgtgaagtaactattttctggatggagcattgaaagagaaataattccttttttataaatagatagaagaccaaatgaccaggttatgttctccgaattgccactctgtctccgtcaaatggtagcaactcaacacagatgtgcccgcggccctgcaggccccagcccaggtgccgtcgttgtttcacaatgattgactccttgtctatggattcattcctcactgcacacaggtaagaaggagcagagtttgttattctatgggaagaccaatatattttgctatttttttctgtcttcttccctccccttctcaccaacagattttcttcttctgagaacacagctggtggttagccagggctttggggaggcttctagtttttattgaaaggggagaggaaatcactaaaagaatttctgttaaacgaagacactgcagagcggaaaggctaatgaggatttttttttcccatttcaggcaactctgtgtgcactaatttgagaaagaatttttgtacaatagtgtcgactattgagcttcagaagacaactggaactttaagattcaaaacctaaactatcgacccattgtttgaaagttatgattttatatttccaaatataatgctctatgtcaagcttgtccaacccacaacccagggcagctttgaatgcgacccaacacaaattcgtaaactttcttaaaacattatgaaaatgttttgcaagttttttttcagctcatcagctatcattagtgttagtgtatttcatgtgtcacacaagataattcttcttcttccattgtggcccagggaaaccaaaagattggatcccctgctgtctgtacttcctttgttgatttcctgtgttgaaatttcattacacgatgtggagatgggccatctgtacaaatgagcttactttccttctgtttctaatgcagcacttcttcatctgaggtagttgggtttaggtgtgtctatatgggcatcagtgggtggcaattctgcagttaaatatggcatttatgcttggaaatttttctagagaggttctcaaagatgttcatgactcaataaaagttacatgccaccagggtgcgggccctgcgggacgggacgagggcggggcgcatgccgcgagcacccgcctccccgcgctctgctggcctccacaccctggggccgcctttcctttcgcaggggcagcggggtgtcctggaagccccggagcttcatggaagcctgggagggcggcggagtggggtccgcagcgcggtgcccagagaggcagccggcgcccgaatccagggtgcacttccaagcggcgaggttcatcatggaggcaagtgtcaagctaggggtgcagtccattcccattgccactgcttgcaccatttaccataaattcttctgcgagacctgactggacgcctgtgacccttacctgattaccatgtcttccatttacttggccggcaaagtggaagagcagcacctgcggactcgtgacatcatcaatgtgtccaacaggtacttaaacccaagcgatgagcccctggaattggactccctcttctgggagcttagggacagcattgtgcagtgtcagcttctcatgctgagagttctgcgcttccaagtctccttccagcatccacacaagtacctgctccactacctggtttccctcaagaactggctgaaccgccatacctggcagcggacccccgttgccgtcactgcctgggccctgctgcaggacacctaccacggggggctgtgcctccacttccaggcccagcacatcaccgtggcagtgctctacctggccctgcaggtctgcggagttgaggtgcccgctgaggtcgaggctgagaagccgtggtggcaggagtttggtgacgaccttaccaatcattgacaatattgtgtctgatctcattcagatttataccacggactcagagatcccctaaggccctggcctaggcctgcccaaagagaagcctaggatgatcagctgcctggggaaattgccaccatgtcaccacgatggctggtcctcagaggaccagctgggaggactggttgtgctgctggagaagggctggagaaggcgatagcatgctgccgctttgacagtccctagcagtcgtggtccaggtgatggtgggagctgggcctccagcgggcaggcccggagtgcactgtgtgcagctgatccaaggcagccacatctgcttttgtcctttgagaggaatctgactacaatacaggcatgacatcaatgaaaggaaaatcatgaaatcgatgagactgaatccctagggatttttttatagccagatttatagcaagaatgaatgtgcaatgtggctgaaatctattttgtgtaataaaaggtgatgcaagtcaaaaaaaagttacatgcccactggtctactgatgctacttagaaatattagttataaagtactggactaagagtagatcatattgtatattgaggatgtgggttttttccgtgttttgattaaaaccaaatgaattatgaaagaaaaaattcctgtttcccccacagtcacaccatttctagtttccagatatgtgtttttcccaaccaattctctgacaccagttgcatgtcctacaatttaattcagttctgacattagctgcctggggttggcacagatctcacagggtgagggcccagtcccacaagactgctccccactccagaaaccagtagcaagtaccaggtccccaggttacccacacttctggtcagctccaagacagtgttcccacaaccctttctcaggttcagtaatttcctgtagcaactcacagaactcaggaaacctttacttaatacttaatacttaataattagtattactgatttattgcaaagaatattataaaggatacaaatgaacagccagatgaagaggtatatagggtaaggcccagaatagtcccaagcacaggagcttctgtctaacatacaattggggtgcaccatcctcctggcacatgaatgctgacccagaagctccctcaacccctttagatggggtttttaatgcaggtttcattacaaagtcctggttgattaaatcattggctgttggtgatttactctcccctccctggagattggggagtggggcagaaagttccagccctctaatcatatggttggctcccctgctaccagccctcaccatgggactttctaaaagtcacctcattaacataaactcaggtgtggttgaagtgtcctgttaggaataacaaatacatacatttcttatgtctgtagggaagttcaaactttccctctgaagtttccacctttggtctataaaataatccaacaatagatgaacagggcaaacgacatgcagatgtcgttacgtgtgcaggggccacatgagactcaaagaagggccagatgagtgaagtttcataccatacagaggtgggtagattgtcaggctcctggggggaagtggggacacgttgtgggagggtgaggggaggaaacatgtggtgagcaaaggctttcttctgatgcagatgaagtctggcaggcagcagacctgagagaatagaagcacttctggtaacagtttctctatcatctctttaaatatcagactttagcctcctcttcctgggagttcatctttcctaaatctggataaggcagataagggggtctcagagaaagcctatttgcacctgctgtttacttcactgacataagattcctctgcagatgcaaatattccctacaaatggactgcttttcagagctattcctgtgtctgctgtccctctgaaagcatctcaaaatatgccaaataagtctctttcggggtggcctatttttacctttttgtatatcacaatattgcaaattattaccaagaagcaacatttggactggtactgaatccactatagtttagcctatatatgccatttatgtagtttttttattcaaaggagtattagtataaccaggtaaaccatttcccagacattgctggtttttttctcaaaaatgtgtagcttacttttcatcactatatcagtatattgacttattagttgccagtgacttatgtatagaacttaagctcaatattgctttaaaaaatagatctttatgggtactgataagggagaataaattaaaagtgtacttttaaaattagatctaagggggaaagaaggtaaaataattttacctgggaacaggtaattttccatgaagtcacagcaagttgtacttcctctgtgagaaacacccctatcaatgacaaaattacaagggttggaatgaaggagagttccatctctcagttgttggagaggaagcacctggtggtgcacattgtgccgtcctcaccctgcagagtgcagatcatgttcatggatgggcatcccagcaccaaggtagctcttcctatggtagaaaagaagttttcatttttttaaataaaatgaattggcaaaatggccttttatagaaaaagcaaaactctagggacagaaagcagatgaggagctgccagagctggaggaagctacacagggacacagaggaacctttcaaggtaaagagaatattctgtcttcacttcaacagtggtcatgcaactgtatacatcccttaagatcatcaaactatatatttaagaggagtgcattttactgtatgtaggttataccttcatttttaaaatgattttctttgcaagtcttttattagaagccaagtggatctttttttttcctttgctacttaaacacagatgattgacaagctggcaacccgagctctaatcagagattacaaagatggcattcttcatgaaaatgaaaccagtcgtgaggtttgttcttttcattgtaaaaactattagacattgttcttaagcattcttacattgatttatctgtggaaatagaaagtgaggtcagctgcatggagaaggagactgtggtgtcagggcattcatcactgtatctgtgacactgtgcctgggatgtgtggtgtgtggtaaatgtttgttgaatgaattaacaaaagagtggatgtcagtggtttctggaaaattctgtaatgttttgtttatcagaaaaaaaccaaggagggctcagagagcactcagtgagtgcctgtagtggacgtcacctcagatctctcatgtggtagcattagtattcccatcttactgatgagagtcctgagtgcgaaatgctgagtgacctgccaaagcccacctgactccccgatgctgtgcagaccacggcctccgcagaggatcccctcacccaggccacagggactgcccagctgttctctcagggatgagatcttcaacaacgctgtgagtgttagtcctcaatgccatccccacaagaaggtgccagcgtgacagcaggccctggagacccccacagacagttctagtgacagatggtcacctggtggtctccctattctactcagatgcccctgggttggcagcttctctgtgatgttttgtttaagacccttttgtcctgaacaagtcattctgtctttccaattcttcagctttaaattgggagccacagactgtgaaagaatgagaaagcccactgcccaggagagctctctgtgaactacagggagctgaataatgaagagtgacattttctatggctaagtcagttgatctcattttaaagggaatattgagccacctatttagatgggacctacaattcaatatttagtctgaaatacaaatcttaaaatgatttactgaagtatctaaatagaaataaacaaaacaggacatgacttatattttattctatcctggatgaagaaacaaaccttgaaatctctgattattaaacccagtaaagaaaactctctcataatacaatttacaagctttgtggcagttgagaaaagggtatgtattattgttaattcaaggttatattattttatttatatttccacattaagaaagtcactcttgctttgacggttaatgacaacacccacaccctgggcctgtgaagcgtgggttgctgacaggccagtaggccccatgagtcccaacctcccattcatgggcagtttcagtgttgggacttatggtgatctttctaaatgagttgggtatgttatcatttttaatgttatagttattattaataattagctaatgtgtatttttcagataccctataattttgttacagttttggcatttattgtcttttattaatccaagatcgtcaaaaaatagaaaaggcctgggttctctgagagccccttcccccttcataagtttaaggggaaaattcacataatatgcccagcacagtggccagcacctgccagtgctctgtaaagaggaaagtcactccacctccccactttccctcacgcttgtggcccaaggcccaagctccagtcccacacaccagcataaaagccaacacccataggctttagaatgtgtgattatcatttaattggataatgtctgtttgatttaatctatttgtgattcgatataggatgagaatgagtcaccttttcctgatattccaaaagtttctgaacttattaccaaagaagatgtagacttcctgccctacatgagctggcagggggagcaccaaggagccatcaggaaccaagtaaatgctgattaccaaataagttgatattgagctttgtttgttcatgaagatgaagggaaccctttgctaaaatagctcccttcttacctgtatatgaagaagttgttgtatccctgatgatggaaaatattcatgcatttataaaatgttgaattacatcatgttgcattacagagacttcacaatgtatgaacggagctgtatagtacaaaaagagaacacctgtggctgtgcttctatcatgggcaaatagattttcatacaggaagctaaagtcatctaggtagtgtaataggtttgtcataaaattatcaatagaagtgctatatctaatagatcaatagaactgctaataatctaaattcaccaccaatatttcttaaagtttatagtgctttagactgtggcccttatgaccagaaatacaatagaaatggaaaaatgtggcttaaataaaaattggaaacaaattgaaaagcaaagaaactgttttgttaacagtgccgataacactcttaggtctctaggttaaaaaactaaaatttccaaaatgtaagaatttaaaatctaactgggcaccatggttcattactgtaatcgaagcactttgggaagctgaggtgggaaaaatcacctcaacccaggagtttgagaccagcctgggcaacaaagtgagaactcatctctacaaaaagttttttaggctgggtgcagtggctcatgcttgtaatcccagcactttgggaggccgaagaagcagattgcttgagcccagaagttcaagaccagcctggggaaaatgctgaaaccccatctctccaaaaaaaagtacaaaaattagctgggcatggtggtgcatgcctgcaatcccagctactcaagaggctgtggcaggaagatgcttgaacccaggaggcagaggttgcagtgagccaaaatggcacccctacactccagcctgggtaacagagtgaggatttgatcataaataagaaaataacatacgaaagatgtgcaaccttgttactaaaagaatttaaaatataaaaactgtcatgagattcctttttattatttaactctgtcaggttggcaaatatcataaaaggtagatgactgaaagtcagtaaatacagtggttaagatcacaggtgctgtggctgagtgctcaggtctgaaccccagcccgcacttcgctctgttggacttgaccttcccagtgccccagtcctaatgcccgagtggggagagcagaaaaatccacctcaggtgattgtaaagagttctgagaccattataacatgtctagcttgtggatatttgataaatattagctgtagttattaattcacaaaggtgtctgaaacagacactgttgcccaaacagatggggcagaaagctgacaagtggtcttgggtttggagggatacttgctttttcttcttttttttaaatcttaactttttttttttttttttgagatggagtctcactctgtcacccaggctggagggcagtggcatgatgtcgactcactgccacctctgcctcctgggttcaagtgattctcatgcctctgtctcctgattagctgagattacacttgtgtgccaccacacccagctaatttttgtatttttagtagagacagggtttcaccatgttggccaggctagtctcgaactcctgacctcaagtgatccacctgccttggccttccaaagtgctcagatttcaggcatgagccaccgcccctggccttactttcttacagtgcacccttttgtatattttgaattttgaaccattggcatggattgcccatgaaagaaaaataatactttaagcaaacacaaacaaatagtttggggagtcaggaggagtaggaagttcattgttttggaaaaaaaaaattctgatgtacaattaagaatcgactgtccttgaaacaagagagactcactgttaaaatgggccctggaaaatgtatacttatcttttatgtgtttcaaaaacgcacacccagaagaagctctgaaactggagatggtcatggttgcacaacagtgtgagtgtgcttcatgccactaacctctgaaatgactacaatagcaaacattgttgtatacattattcccacaatgaaaattaaattaacaaaataagagatacgcccctacactctgccacacacgtaagtactttgttcagagaaaagctctggagggatatatgccagagatcagataaaacattctgtatggcttttatgttcttctttgtggctgtctacttgtgtctacttgtattttctaattttctcatagtacacatgtattgtttttagatttttggttttttttttttgagacagggtctcgctctgttgcccaggctggagtgcagtggcaccatcacagttcactgcagcctcgacctcctgggcgctacagatcctcctaccttggactctctagtagctgggattacaggagtgagccaccatgcctggcctgtttatagagatgtttgaagttattttcaaaattagttataaattaatttaggttttaatacagcgtggtgatgaattatttcatactaaatttgcaaatactttggatctgaatacttccagatccaaaaatatcagatgaaaaatattatccattagtttgatgacttgaaagtttatatttatgttagctgcaataaatttttttaatgggccatgtaatttatcaaaaatgtcaagcctctgttactctccctcggtatctgttttaccaaaatgtggcacctgccacattctgcatggagttattccactgaattcagtaacaagccagctgcaatagagcccagacatctggatctgtttggtccttcccgactcactgaagcttgaggcatttccttatttgatacatcttcattgtgaaatgagaccgtccagggagtgcaacaccttttctgctgggacgcgctcaggaaggacagcgctcagtgctgggtgctctcgcccccctaaagccacaccagggcttaggcgcagtgtcttctgcaccaaccccaagtccacttcgttccctcccgctcatgaaagcacactgagaacaagccagagggagacatttttaaaacatacctcctaatccaagtttttaaagtaaatcatttgaaaaattcaatgctataactcttagcaagaaattgagggcactgaagctaggggtccagagcccatgctgttccttaaatcaggggtccccaacctgcagtccctgacctgtcaggaaccaggctgcgcaacagaaggtgggggggcagtgagcgagcattactgcctgagctcacctcctgtcacatcagcagtggcagtagattctcatgggagccccgaaccctgttgtgaacagcccatggagggatctaggtgccctttctgagaatctaatgcctgatgatctgaggtggaatagtttcatcccaaaaccatctgccccaccccgtccatggaaaaattgccttccatgaaaccagtccctgctgccaaaaagattgggggccacaccttagatgatcaaggtgtgagtgtgtggttaagcaaaataagcaattgtgaatttcaagggaaagaggaagcaaatgggtgattttggcaaatagaagaatcataatgaggtcaggcatggtggctcacacctgtaatccccacactttgggaagccaaggtgggtggatcacctgaggtcaggagttcaagaccagcctggccaacatggcaaaaccctgtctctactaaaaaatacaaaaatactatccaagaagaaatttcataaaataacccatatttctcagtatgattcttttttttaattttttttttgagatggaatctcactctgccacccaggctggggtgcactgactattcacaggctctatcacagaacactacagctttgaactcctggcctccagtgatcctctcacctcagcctcttgagtagctgggatgctccacaatacctgacttaatcaaatttttgatctttgcaaatcttacaggtgaaaaatatattggtgacatttatatttttgtttctttatgaatgaagaggagcacgttttatattcttacagccctatgcatcacttcctgtgtgttatctgttcatgtcttttatcttttttattgagattttagtcgttttcttgtttatcttatgaaaactttttatgttagggaaattggccctttgtgatatgagttgtgaaaatttatttaccagtattccacgtgttattttgatgttgtttattatctttttgtaatgcagattttttaatgcagtcaaatttttaatctttgtgtttctttttttttgtttagtgttgttttgtttttcatcatgcttagaaatacctttcctagtcagagattacacttaaaaatttttccctttattactttaaatagttttatgttttcatgtttacatcaatttttcatctgattgaaatttatcctggcacaagatgagagatatggaaccaatatttttcttttccagatggctattccttttcctcctattgacttgaaatgccaccttcataatctagtagttctcacgttttaggagctattgctggacttaatctactctgttccttgattcatctactataattattgtaattttataaaagactttaatatctgataggtctagtccatcactattagtcttttccagtttgcttctctgatttttaaaaatttaaccagataagtaagcattatttttaaatctgtcttttcatatattgtataatattaattattcaggaatatacttaaaatttgactgagttgggaatggactactcctcttttaaatagttcatattcacaggtaaaattacaggctaactatttcaaaaatatcaaggacttgtcatccatctaaaactggatttgatacagccaactttttgaggaacactatttccatttagattgaaacagtaatagtaatatagcatccctcaaaatttgttttgcatgcatattattcatattcttctataactatatgttcatttaattaccttaaagcttttggctggacagagtctcacacatgtaatcctagcactttgagaggccgagctgagaggatcacttgagcccaggagttcaaaatcagcctggtcaacacagcgagatcatatctctacaaaagaataatttaaaaataagctgggtgtggtggcacatgctcatagtcccagctactggggaggctgaggtgagaggatcgcttgagcccaggagtttgaggctatagtgagttgtgattgtaccatggtactccagcctcagacaacagagcaagaccctgtctcaaaaaataaataagtaaaaaactaaataaagcttttgagactgtttttccattttcttaatattgcttaaagcaatataaaagagtagaataatttacttcaaatgactatctaatgttaggcctaacatacacccagtgatactgctcattgtaaaatcttgggcaagtcacttctgtgctcctcagttccctcatgtgtaaaatgaggggtgtttaaatttccacaattctaagaactaagagagaagttctttcaatctattgattgctgatattctctccaggtctcagtttccatgtctagaaaaaaagggccttgtactgaaatgatcttgaatgtctctggtggcgttattttctttcctttttttctttttttagacagagtattgccctctcgcccaggctggagagcagtagtgcaaatctgcactcatagctgcctcagcttcccagactcaagcactcctcctgcctcagcctgccaggtggctgggactataggcgtgagccactacacctggctaattttttattttttgtagagatggagtctcagtgtgtcgcccaagctgctctcaaactcctagcctcaagcgatccttcctctttggcctcccaaagtgctgggattataggcgtgagttgccgcacccagcactggtgttattttcaacatcccagctcacattgatgattatgattctggatgagcaactgcctgatgggtgggaagtcaagtgctaggaagaatgtttgcttgattgttctttttattctgtgttttcctcttatgttaataattctctcttctgggcagcctcttttagtgtcctctgagtggcaagaattaccttcatccaaaccaaaacttagggctaaaagaaaaatgaaattatctaagacagaaatttctgaagattttgaagaggatggcttaggtgtactaccagctttcacatcaactttggaacgtggaggtgtggaaaagctattggatttaaattggacagagtcatgtaaaccaacagcaactgaaccactatataagaaagttaagaaagtccactggaaacatctacttctttttttttttttttttttttttttttttttgagacggagtctcactctgtcacccatgcttcagtacagtggtgcgatctcggctcactgcaagctccgcctcccgggttcatgccattctcctgcctcagcctcctgagtagctgggactgcaggcacccgccaccacgcccggctaattttttgtattttttgtagagatggggtttcaccgtgttagccaggatggtctcgatctcctgacctcgtgatccgcccgcctcggcctcccaaagtgctgggattacaggcgtcagccaccgcgcctgaccggaaacatctacttctaactttttttgtgtttctgctccagcctttggttcctctcttcccccggctgcccgctctcacagtcctgcttccttgccttttgcctcatattgtcagatagctagttttggttttgctgctcctcccagacagtttgatgcatctcaattcagccaaggccctgtgcctggcagttgtgctgactgtatcccacagttggcgtcttgtcccacaggacctccccagaacccctcttctgcaccctactgtggcattgctctttcagggagctcattgagctccacacagtctgctccactgcaacctgttggaggccgtacgaccaggccttctactggcacctaccctgagctggattctccccagcttcatttctctcttcctacagaccctgatcccatcagaggttttgggtcttatcatccctctgcttcctctccttttcattttcagctttccgcagcccctttgactgccaataacctctgccttacctgagcctctttacagtcagtcctggactaccccagtagatctctgtcttctggacgaatcagtaggcagtcttgaaggaagtcaatgtcctgactatggttttcaaagttgttctgaaacagaaagtcatgagctatgagaagtactgctttttacaaataaaatgtgatacaacagacaacagtatcccgtgctttctggaggtaatagaggaggatgaaacagtgtgcacacagcactggcaggatgctgtgccttggactgcactcttcagtctacagagagaggtatgtgttttatttctccttaaatctgtggttagctggcttcatagtttagaatggggctcctcaaagcagctggtcaaggaactgtctatcgtcagtctgtagtgaaggaaggggcttgtgcactggggtgtaaatcatactgcttcactcattgaggaactcttgctacaaaacaaaacagacagctggatgaaacagtgtgcttgatgctggctggtgtttctctaccaacattagaccagaacctcatgctggtgaatgtttctattcctcacatgaaaatgaagatctctgaacagatgatggggtgagatcttaatttcctagattctagaactaatggattgtaatccacataaatttcacactgtgaagtagagcacaagcacttgtacttgtactctaaatattttcacataaggtcatgggaatacagatattattcaacgtgtatattgtgttagagcttatcactccatttgttaagctaataaacaccctgtagatttggcccctgcactggtactaagacccagtcctgcatctgtgattacttggtttggtgtaaagtagtttagtgaaacggaaagggcttgatgcagcataaaagtaagcctgagtcccagccaactttgtgattggggcaagtcaggtaacctttctgagcctcagtttcctcatccatatagtggagataatgatagtgtctacttcacagagtgggtttggggtttaaacaggataatcacagctgcccagtttccctacttgagacagtgcacccaaaagcctgctgggagcatactgcagatggtcaagagtgtggatcccacagccactcctggctctgctgcttgttagctgtgagactttagacaattacttcacctttctctgcctccgtgttctcatctgcaatgtgggtgtgataatagtgctccacaggaagtggctaaacatataaaagaacagcacctggtaccatttctctatgggatggcacatattatcactgctgtaatttttcaaattattgccataggcccttaaacctgtgcacctgcctagggccacaccctgctttctgctccctgtgttggtttccctggattctgtctccgttgaggttaatatccccaagctcaggcttagcacactctcctctgcatgtgatgaagcaggcagatgttgggggggtgcagggaagttagttttaaagtccgtgtttaatataacaattttatacttagaaaaaactgtcattttcatgtttcagactacatcagggtacatttttatgttaaacaaaaggaatcatgctggagatctactgtacaatacagggcctatgattgacaatccaatatggtatacttaagcatttgctaagaggtctatcttatgttaagcactttttccacaaaagggaacaaaacaaaacaaaaggggtggaagaaaagttctgggagtggtggctaagttcatggcattgatgattgatggtttgatgttttcacaggtgtatacttaactccaagcacatcaagttgtatacataaaatattggtgactttttgtatgccagtcatatttcagtaaagtgggttttttttaaagagggaatcatgctatttaaaagtttgagaaataccggttcaatgctcattgctagttgataatgcagtagggtgactatagttaacaagacattgtatacgtcaaaatggctagaagaaaatattcgaaatattgccaacacaaatacatgataaatgttcaagctgatggagatcctaaataccctgacctgattatttcacattctatgcatgtatcaaaatatcatgtgaaccccaaaatacgtaccaataaaaaatgaaataaagcattgctagaagaaaaaaagtacgatttaaaaaaatctctacacatgagtctctttccacactttttataaatgccaccacatatgtagtcttcatagcgtttatgaggttccaaacaatactatgtcactagtgtatgaagaaccttattttacagtaataaaaatgttagaaatgctgtaattaactgaaattcaatacatggaaacatatttatctcatagcttcttttttcatttaatttgttaaaattttattttagatgcagaggtacatgtacaggtttattacatgggcatactgtgtgttgctgaggtttgggcttctaattgtcttgttgcccaagtagtgaaaatatgtttttcaaaccttgcccctctccctcccccactacctaacttcttatgtcataaaatgtcaataacataacttacctttgttttcttaattttgtatgatggcttctgaaaacttacaccagaactgcaatttatattaaatcttaatacaaatgctttgcacagcttaaacaaaaaggcattgaaattgtaggtaagtcactatgtttccatttattaagtcatgattttcattcattcataagcatgctcctaatcgttataaactattatgtaaatgagtttactaatgtaataattatgaaagttatatttgaatggaattatatttaaccattaaaggaaatgggagatctggttctagtaatatttttgccgctaactagggtattgtttgtgcacatttattagcataaatagcaccaattgctgtaaaaaagaaatctcagtagcttaacataatcaaagattactttcttgtccatatcccagtcaaatattggtcaggaagaaagttccacttatgtggtcatttagagaccttgactccttccatattgtggctccaccatcttcaataaatgtctttaaaattatcctggtaagagagaagaacaaagattaccctggcatcatccccctgctagacaagaggaagaacactagtcacatagccccatccatatacgaaggcctgagaaatgtactgttaagctgagtgtccaggaggagaaaacagctctggtgagcacctagccagcctctgccagaggcagtttttcaacctctggacctgtttcctttcatgacaacaaggagataggtaaggaaatcctgagcatccttgacccggcaagtggtttgaaggtcaaatgctagccctgggacaggagctgtttgtttgtttgtttgttttgagactaggtctggatcccttgcctaggctggaatgcagtggtactatctcagctcactgtaacctccacttcccaggctcaagggatcctcccacctaagcctcctgagtagctgggactacaggcacctgccaccatgcctgactaatttttgtattttttggtagagatggggtttcgccatgttgcccagtgtggtcccgaaattgtgagctcaagcaatgtgcccaccttggcctcccaaactgttgggattacaggcataagccaccatactcagcctggggattttttaaaataaaatacacattattaaacaactagccaatattcatgaaaagatagaacagcagtgtctcactggccaccatcacttctaaaatgctagaatttttgtattccaggctgggtgggtgggcaaatgcatagcctgtttgacctgcactaggccaaaaaagggtgatgacaatttacatgaagagtgagtgcttgatcccggaataatagaagagccgctatcggactaactctcctgccaataacagttattaactttgaataaaatatttaaaaccattctttgaaagccaggagaataatcaaaaacaggcagaaactagagtgaaaataatctttgaaagaaaggaagccaactaggtgggctccacattaatccagcttgtcaccgaaaggcatttctcagctcatgagacacagtgggaggtttgaactacaacagaaagtcttaatgggatgaggacacggggttggagtttgaggttgccaaagtggctggaagttaaggattaaaatcctataaaggagggaaccacagagcagggagctctgaaatctgcatccaaatatccctcagatccttggctgtctcctaacctctacctatatggggtgcaacctcaaggaatccagaaaaaagtcacagctgggaagctacagagctaagcagagatttcagctgctgcctagtactggccagagtttacagttcaagtggcaccaaattagagagactttatgaatatctttccattgaaaccataaaagggtcataaggatcatatctcatgatcaaggactatatcccaggacaaagggataaaccaaaatagacccatcctaataaagcctaaaacaaagcatacacaggacccaccagaacaaaactgaacactctttagagtaagagagcgtagctgggagtctctacaaggtgtcatttttaatggtcagtatggaatgaaaatttgataacataagaagaagcaagacaatatgatttgtgatcaaagggaaaatgggctataaatgctgacccacagatgacccagatattagaattagcagacacagactttaaagctgtttttaaaaatatagtgaaggattgatttaccagaaaaggatggaatgggtgaataaatggcagaatctcagcaaatagatggaaactataaaggagaaccaaatgaaaatcctagaattggaaaatatagtatctgcaatgaaaaggtcattgaatgagcttaacaacagaatggacacaacaggaaagaaatcatttaattcaatttacaatgtactcaataaacttatctaaactgcaatacagaaagaaaaaaaatagaatgaaaaaagagaagagccaagactgtggaatgatatcaaaaggtttaacatttgtgtaactagggtttcagaaaatgaaagggtagacagaaaaatatttgaatatttttgtaaaattgatcaaagacagcaccttccagatccaagaaactcaacagaactccaagcaggataaattaaaaaaatgaccatatttagataggccagagtcaaactgttgaaaaccaaagataaactgggaacagtggttcacacctgtaatgcctgcactgtgggaggccaaagggggcagatcactttatatcaggatttcaagaccagcctggccaacatggtgaaaccccatctctataaaaatataaaaattagccaggcatggtgacatgcacctatggtcccagctacttgggaggctgaggtgggataatcacctgagccctgggatgttgtggctgcactgagccatgattgtgccactgcactccagcctaggtgacagagtgagataaaaattcaagataaatatattgtcatgtgaggctagagctcagggaagaggtcagaattggaaaagcctggaagaattctcaatgtcagtagtatttaaagcctggctcaggatgaggtcacccaaagaaagaaggtggtctgagcagagcaggtgctaggaccagtctgctgcacagcagggtttagtgttcagactggacaagaaacatcaaagacgcagagaagaagcagcctgagaaacaagaggaaaactggagaaaattgagtcacagatgcaaggggatcagatttcatgaatgtaccttttccacgggcttttcctgtgcttcactgtattgctccctattatccatgttatttttctgtaagtgtgtgcttttctgtctttcttcctctacgtagagtctcaagctgtctgatttttttctctgactagtttttttatctctgtacccaactttgtcttttatcctcttcttcatttctcttttatcatcccttctccttctgcatttgttttttaaataacactgatacacattaggcacttcatcagtttattatttattatattagtcttggagttgtatgctgctattattaatattgcttaaaaatcagtctaacgttttgtaaataataccccaaaaataagccacaaaagaattcagcaaattaaactgcttttgtctccattgattttcttttgtgggacaatggattagtttcttattttgtttttaaaaatttattaagttctttttcctccattaagaacactatattatttaataaaagccctcttatgagcagttttggctacctcagtgatgtaaaattaatggtgtatatgcagatatgtgcatactctgccaggtccttttgtctttactcaaaaaaggtaattgtatattcttttttttttttacattttttattatactttaagttttagggtacatgtgcacaatgtgcaggttagttatatatgtatacatgtgccatgctggtgtgctgaaccattaactcgtcatttagcattaggtatatatcctaatgctatccctcccccctgctcccaccccacaacagtccccagagtgtgatgttccccttcctgtgtccatgtgttctcattgttcaattctcatctatgagtgagaacatgaggtgtttggttttttgtccttgcagtagtgtactgagaatgatgatttccaatttcatccatgtccctacaaaggacatgaactcatcatttttaaggctgcatagtattccatggtgtatatgtgccacattttcttaatccagtctatcattgttggacattttggttggttgcaagtctttgctattgtgaacagtgccacaataaacatacgtgtgcatgtgtctttatagcagcatgatttatagtcctttgggtatatacccagtaatgggatggctgggtcaaatggtatttctagttctagattcctgaggaatcgccacactgacttccacaatgattgaactagtttacagtcccatcaaccgtgtaaaagtgttcctatttctccacatcctctccagcacctgttgtttcctgactttttaatgattgccattctaactggtgtgagatggtatctcattttggttttgatttgcatttctctgatggccagtgatggtgagcattttttcatgtgtctgttggctgcctaaatttcttcttttgagaagtgtctgttcatatcttttgcccactttttgatggggttgtttgtttttttcttgtaaatttgtttgagatcattatagattctgcatattagccctttgtcagatgagtcggttgcgaaaattttctcccattctgtaagttgcctgttcactctgatggtagtttcttttgctgtgcagaagctctttagcttaattagatactatttgtcaattttgtcttttgttgccattgcttttggtgttttagacatgaagatcttgcccatgcctatgtccagaatggtaatgcctacgttttcttctagggtttttatagttttaagtctttaatccatcttgaattaatttttgtataaggtgtaaggaagggatccagtttcagttttctacatatggctagtcagttttcccagcatcatttgttaaatagggaatcctttccccattgcttgtttttctcaggtttgtcaaagatcagatagttgtagaaatgtggcattatttctgagggctccattctgttcgattgatctatatctctgttttggtaccagtaccatcctgttttggttactgtaggcttgtaatatagttttaattcaggtggtgtgatgcctccagctttgttcttttggcttaggattgacttggcatgagggctcttttttggctccatatgaactttaaagtagttttttccaattctatgaagaaagtcattggtagcttgatggggatggcattgaatctataaattaccttgggcagtattgccatttttatgatattgattcttcctacccatgagcatggaatgttcttccatttgtttgtatcctcttttatttcatcaagcagtagtttgtagttctccttgaagaggtccttcatgtcccttgtaagttggattcctaagtattttattctctttgaagcaattgtgaatgggagttcactcatgatttggctctctgtctgttattggtgtataagaatgcttgatttttgtacattgattttctatcctgagatttgctgaagttgcttatcagcttaaggagattttgggctgagacaatggggttttctagatatacaatcatgtcgtctgcaaacagggacaatttgacttcctcttttcttaattcaatacgctttatttccttctcctgcctaattgccctggccagaacttccaacattatgctgaataggagtggtgagagagggtatccctgtcttctgccagttttcaaaggcaatgcttccaggttttgtccattcagtatgatattggctgtgggtttgtcttagatagctcttattattttgagatatgtcccatcaatacctaatttattgagagtttttagcatgaagggttgttgaattttttcaaaggtcttttctgcatctattgatataatcatgtggtgtttgtctttggttctgtttatatgctggattacatttattgatttgcatatattgaaccagccttccatcccagggaagaagcccacttgatcatggtggataaactttttcatgtgctgatggattcggtttgccagtattttactgaggatttccgtgtcaatgttcatcaaggatattggtctaaaattctcttttttggttgtgtctctgcccggctttggtatcaggatgatgctggcctcataaaatgagttagaaaggattccctctttttctattgattggaatagtttcagaaagaatggtaccagttcctccttttacctctggtacaattcggctgtgaatacatctggtcctggactctttttggttggtaagttattgattattgccacaatttcaaatcctgttattggtctattcagagattcaacttcttcctggtttagtctgcagagagtgtatgtgcccaggaatttatccatttcttctagattttctagtttatttgcacagaggtgtttgtagtattctctgatggtagtttgtatttctgtgggactggtgctgatatcccctttatcattttttatcgcatctatttgattcttctctcttttcttctttattagtcttgctagaggtctatcagttttgttgatcctttcaaaaaaccagctcctggattcaataattttttgaagggttttttgtgtctctatttccttcagttctgctctggttttagttatttcttgccttctgctagattagaatgtgtttgctcttgcttttctagttcttttaattgtgatgttaggatgtcaattctggatctttcctgctttctcttgtgggcatttagtgctataaatttccctctacacactgctttgaatgtgtcccagagcttctggtatgttttgtctttgttctcgttggtttcaacgaacatctttacttctgccttcatttcattatgtaccaagtagttattcaggagcagattgttcagtttccatgtagttgagcggtttttagtgagtttcttaatcctgagttctagtttcattgcactgtggtctgagagacagttggttataatttctgttcttttgcatttgctgaggatagctttacttccaagtatgtggtcaattttggaataggtgtggtgtggtgctgaaaaaaatatatatattctgttgatttggagtggagagttgtgtagatgtcaattaggtccgcttggtgcagagctgagttcaattcctgggtatccctgttaactttctgtctgattgatctgtctaatgttgacagtggggtgttaaagtctcccattattattgtgtgggagtctaagtctctttgtaggtcgctcaggacttgctttatgaatctaggtgctcctgtattgggtgcatatatatttaacatagttagctcttcttgttgaattgatccctttaccattatgtaatggccttctttgtctcttttgatctttgttcacttaaagtctgttttatcagagactaggattgcaacccctgccttttttgttttccatttgcttggtaggtcttcttccatccttttattttgagtctatgtgtgtctctgcatgtgagatgggtttcctgaatacagcacactgatgggtcttgactccttatccaatttgccggtctgtgtcttttaattggagcatttagtccatttacatttaaagttaatattgttatgtgtgaatttgatcctgtcattatgatgttagctggttattttgctcgttagttgatgcagtttcttcctaatctcgacggtctttacattttggcatgattttgcagtggctggtactggttgttcctttccatgtttagtgcttccttcaggagctcttttagggcaggcctggtggtgacaaaatctctcagcatttgcttgtctgtaaagtattttatttttccttcacctatgaagcttagtttggctggatatgaaattctgagttgaaaattcttttctttaagaatgttgaatattggtccccactctcttctggcttgtagagtttcttccaagagatctgctgttagtctgatgggcttccctttgtgggtaacccgacctttctctctggctgcccttaacattttttccttcatttcaactttggtgaatctgacaattatgtgtcttggagttgctcttctcgaggagtatctttgtggtgttctctgtatttcatgaatctgaatgttggcctgccttgctagattggggaagttctcctggaaaatatcctgcagagtgttttccaacttggttccattctccccatcactttcagttacaccaatcagacgcagatttggtttttcacatagtcccatattacttggaggctttgttcgtttctttttattcttttttctctaaacttcccttctcgcttcatttcattcatttcatcttccattactgataccctttcttccagttgatcgcattggctcctgaggcttctgcattcttcacgtagttcttgagccttggcttttagctccatcagctcctttaagcacttctctgtattggttattctagttacacattcgtctaaaattttttcaaagttttcatcttcttcacctttggtttgaatttcctcctgtaactagaagtagtttgaccgtctgaagacttcttttctcatctcctcaaagtcattctccgtgcagctttgttccattgctggtgaggaactgtgttcctttggaggaggagaggccctctactttttagagtttccagtttttctgctctgttttttccccatctttgtggttttaactacttttggtctttcatgatggtgacgtacagatgggattttgttgtggatgtccattctgtttgttagttttccttctgacagacagaaccctcagctgcaggtctgttggagtttgctagaagtccactccagaccctgtattcctggtatcagcagcggtgtctgcagaaccacggattttcatgaactgcaaatgctgctgtctgatcattcctctggaaattttgtctcagaggagtacacagccatttgaggtgtcattctgctcctactggggggtgcttcccagttagactactcgggggtcaggggtcagtgacccacatgagtaggcagtctgcccattctcagatctccagctgcgtgctgggagaaccaccgctctcttcaaagctgtcagaaagagacatttatgtctgcagaggttactgctgtcttttgtttgtctgtgccctgcccccagaggtgaagcctacagaggcaggcaggcaggcctccttgagctgtggtgggctccacccagttcgagcttcccggctgctttgtttacctaagtgagcctggcccctcccccggccttgcagccaccatacagtttgatctcagactgctatgctagcaatcagtgagactccgtgggcataggaccctccaagccaggtgccggatataacctcctggtgctccgtttcctaagcccatcggaaaagcaaagtatttgcgtgggagtgacccgattttccaggtgccttctgtcagccctttccttcaccagtacttgaccagccctttccctgaccccttgcaattccagagtgaggcaatgcctcaccctgctttggctcatgcacccactgtcctgcacccactgtctggcactccctagggagatgaacctggtacctcagatggaaatgcagaaatcacccatcttctgtattgcttacgctgggagctgtagactggagcttttcctatttggccatcttgcctcctccccccgtatattcttaattataagacaaaggttttttttccttccctaaaaccactttttgtctgtatgctgtggctcatgcctataatctcagcactttgtgaggccaaagtaggaggatcacttgagtccaggagttggaggctacagtaagctctgatcacacccactgcactccaacgtgacagagtgagcccctctctctcaaaaaaaaaaaaaaaaaaaaaaaaaaatgaagcttgcctttttaaaataaaaatggttgttaattctgagttcaacatatgtaaacattcatttttcaattttgatatttcataatatagtaaaagatcttgattaggatacctgtaggtactaaccactagaaataacttgatacaccagtgtaactggtcataactcttgtttgtctgttgaatatttaggtttacctttctaagctatttgtaacaagagcctaaaaactggatttctttcattgaacttcatacctctctggttattgaagatggcaagcgaggggccctctggatacaggtcagtttcctgacaatcatcaggatactatgatagggacacggttccaaccatcctcatttatttaaatagcaagctaattaagggccttgaagagtattagagagtttcaccatctgctcatgtcctgtgatttagctgtattataattctttaatgggaattttataagaaggcagtttgagatgcagagtttccaacagacttaacgcagttttttcccctttaggtataaaaagaagagaacatctcctggacctaattgccacaaagcaatattacagtttatttgcaccaggttggaaaaaaagggaatagtgttcaaatcactgatggaactggaatatgcttctatttccaggtggctttaactatagtattatgcaacttatttatattttcaactatttatttaataaaccttacaaacaagctatagggaattatcttacatgtgtagactactttataagtatgtaggaaggtaatttttttcaggtgacagcttgcccaagtctcctgtggtgggcagggctgatgtggtatttgtgccttaggctgcaaaggaaatgggctcaaagagtttcagtgtagctcccctggaccccggcccttctggctctggatatggtactcttcactgcagtgtgctgatcctgggtgcctccagaaaacccataatgtgactgttgtgccccgcccttttcccaacaatggcagggcctgggacaagaatacaatacaagtatttaaagtttataactttatagtttgtaaaatacaagtatttaaaaagttataaatcaatctagcaaactattagattaagaagtgtgtcctaatctcctcccttggcaaatacaactttataaccacctggaagaccaggttcaaattcagcccttggctgacccttagcaccctaagaggccttgccagcacacatgaataccccaccccacccatcaaaatgccgtccagaccccatgcgattgccccctcaccccagccaccttgcagcaccagtgagatggcagcactgttcaaactcaggatgacagaccagggaagaccctggaagtggactcagggccatgtggtcaggaacgctggagttgcaggtctaaaaaggaggatgtgggctccagggtgggcacattctctggtccatacagaccctctaccccatggcaagaggggcatgaccagagtatgatccctctgacatacatatatatgtatacacatacacatatgcacatacatacacatatacacatatacatacacatatgcacatgcatacacataaacacatgtatatatataagtatatacatacacatatgcacatacacacttacacatgtatatataaatatatacatacacatatgcacatacatacacacatacactgtatatataagtatatacatatgcatatgcacacacatacacatatacacatatacatacacatatgcacatacatacacctatacacatgtatatataattatacacatacaaatatacaatacacatacaaatatgcacatgcatacacatatacatacatatatgcacatacctacacatacacacatatacatacacatatgcacatacatacacatatacacatgtataattatatacatacaaatatgcacatacatacacatatacatacacatatgcacatacatacacacatacacatgtatatatataaatatatacatacacatatgcacatacatacacacatacacctgtatatatacgtatatacatacacatatgcacacacacatatacacatatacatacacatatgcacatacatacacatatacacatgtatatataattatatacatacaaatatacacatatacatacaaatatgcacatacatacacatatacatacatacacatacacatacacatatgcacatacatacatatacacatgtatacatatacatacaaatatgcacatacatacacatatgtacatacatacacatatacacatgtatacatatacatacaaatatgcacatacatacacatatgtacatacatacatacacatatatataaatatatacatacacatatacacatacatacacatatacacatatacatacaatgtaattggcttatgttcttttaaaggcaagataaggggaaaactaatcaaactaataaaaataccgttgcaagggaggtttggtagagaggacaaggatggaagctaggtttctcctagtgtgcttcgttttgcagttttgactttgggactatgtaaatattttatgtaataatggataagattgatatttatttatttgtttgttgagacaaagtctggctctatcacccaggctggagtgcagtggtgcaatctcagctcactgcaacctccacctcctgggctcaagccatactcccatctcagcctcctaagtaactcagaatacaggcatgcaccaccatgccctgctgatttttatattttttggaaagacagggcttcaccatgttacccaggctggtctcgaactcctgaactcaagcaatcctcctgcctcagcctcctgaactgctaggattacagacctgagccaccatgcccagcctggaaattaatttaagatgactttaaaacatagttaataatttgactgtatcaaattatgtcaaatcccctagtgggatagtgcctaaggattaaaaaatattacaaagaaatctcactgggagtagccatggtgttaataacacttttgatttgttattttggaaggtagatactaatattgatagaaactaatatgtataaaatcaaataagttaaatgaaaccccttgatttctaaacttgaattagatcagagaatagaggaacatgttatgtgactccatgcaaatgcagtcagcaaagtctggaatgtggggaaataaatggcaagataaaaaaaaggttgaggagcagaacctataaataatcctttagagacatgtcaaccaaaagcaagggtagaccttgtttagatcctggtttgaacaaaacccactgcatttaaaaaaacgagacagggaaaattaaacactacctggatattttttgatatttaaagaaatattgataacaattttttttttttgagacagagtcttgctctgtcacccaggctggagtgcagtggtgcaattttggctcactgcaagctctgcctcctgggttcacaccattctccttcctcagcctcccaagtagctgggactacaggcatccgccaccatgcctgactaatttgtttgtatttttagtagagacgaggtttcaccgtgttagctaggatggtctcgattgcccgacctcgtgatccactcacctcggcctcccaaagtgctgggattacaggcgtgagccactgtgcccggcctgataaatattttttaagtgtaatgactaagaaaaagttcttgaacacaaaacaggtgttcaggaagtcctgggctaggcacattggctcatgcctgtaatccacgcactttgggaggctgagacaggaggagcacttgagcccagcaagatcaagcccaggagtttaaggtcagcctaagtaaccaatgagacccccgtctctacaaaaaaacttttttaattacccaggcattgctgggcacagtggctcacacctggaatcccagcactttgggaggccaaggcaggaggcttgcttgcttccaggagttcaaagaccagccttgaccacatagcaagaccctgtgtctacaaaaaaatgtaaaaattacccgagtgtggtagtgtgtgactactcaggaagctgagttgggcggggggggtattgcttgagcccaggaggccgaagctgcagtgagttgtgattgtgccactgcattccagctggggcaacaaagaaagatgctgtctgaaaaaaaaaaaaggagaatcataatttactatatgtaatttatacttctgttttttaaaaagcaataccttctcattagtttgccaagaaagatgagaatttattcttttttctatttagggagttttctttttggatttatttatttatttatttattgaggcagggtctccttctgttgcccaggctggagcgcagtggcatgatctcagctcactgcaacctctgcctcccaggttgatcacttcagcccagcaagaccaagtccaggagtttaagaccagcaattctcgtgcctcagccttccgagtagctgggattacaggtgcacaccactgtgcccagctaatttttgtatttttagtagagacgatgtttcgccatggtggccaggctgatctcaaactcctggcctcaagtgaaaataaaccagtgccacttgccaagagaattaattaaataaatatcaaagaaaaaacactttgaacagctaggagatgggactaaaaaattagtatttgacttaataggcacatccaaagaggtatttattctatttatattattcctgattagtaatattatagctgttagaacaagtataatctttgaacctgtttttgaactgtaataccacaaagcattaaagcaagattttcaaaattgatcaagtatattcaagcatatagctcttactacattattactatggtgctagcaaaatggtttgctggcacttgagtacgtaagacaatacgatgttaggccaggcgtggtggctcacgcctataatcccagcacttttgaaggctgaggcggggggatcacaaggttgcagtgagctgagattgtgctacagcactccagcctggaaacaaagtgagattccgtgtcaaaaaaaaaaaaaattaaatattttttatttcctgtttattgcatgtttgaaacttttttctgtattttctattttgggatgtacgtaatattgatgcaggagtacattacctggaggtgtaggcacaagattttcttactagtggaatgtgaaccaaaaagtgtagaggccactggactaaaggaggccagctgaattagtgaaaatattcaaagccagttttgttgttttcagcagtcagtaacagtcagtagacgaacatttaccaggaaatgtcggtcttttaaacactttggacatgcttcttatttagtatgttcattctatcatgacattcaccaaacatttattgagtgcctactgtgtaccacggattagtaagcacattaaatttataagctttgttgatttccaccacaaacccataagacctcatgttattctcataattgaggaaactgagattcccagtgttgaatgaaagccacacagtatcacatggccaatatcatgtgattgcagagtcaggatcaaacccagctcttcaccatcatgctatactgatagccctttcccagttcacagggaaaaatcaggaacagggagagaattttcaaaatattaagtttccccatagaattttctgaagaactctggtgtatgttgccacttgttcactgacaagttctagcagatgacagaacaaatgaggaagtagctaattaatattaatgaacaaccccagaatttttctgagtgttgaatagacttgaatattcaacagtctcaaatatttgacaacatttagtggacacagacttgactcgatatgcttagtctaccaagtttttcctggcttatgagacacagctgaacatatgccagtttcatgggggactgtcagatattctgaaggtacctaatcaagtcagtacagtaggaaggagagagaaacagaagtctcgtttgtgaaatactacttgagtttgtgcgtgaagaatggataggatttaaactgagaagagtggcaaggggacaaccataaacaactatagagaggctggaaccttagctgtcctgtaggcagcagggatgcctggaggcatgtggaaaccacgaatggagggcacaggacatttgacaatgcagtgcataagctcaacatcagacaagtagaagaacttctgtaagatgtcaaggaaaactgcttttattaaatatcttaatttttggcagaatcattttgtctgatataatgtgatgggtttagtaccacattacatttcacatgttatgttctgaaatctgaaacatttattttttttaatctaagaatattccctgggcttttgaagcaataaagaaagcaagtgaatgggtaagaagaactgaaggacagtacccatctatctgcccatggcttgaactggggaatgactgggactcggccaccaagcagttacagggactccagcccataaacactgtgtcccctcttcatagagtccttcattacagtcaaggctaagtcaaatgaaactgaattttaaactttttgcatgcttctatgtagaaaattatcaaatgataatagatacttataatgaaactccattaaggttttattcagtgtagcaattagtgtctttaaaaataaagtggaagcagaactactttaatcaactaacaagcaatagtgaaacttaaaatatttcagttttctgtctcattttttgttattttattttttatatatattttttgagacaaagttttgctcttgttgctcagactgg

SEQ ID NO: 29049 - DNA, 23765 bp, Homo Sapiens
tggcagcctggatagggggattggacttcatgtttgcccactcttctgctggtcttatggaaggcagctctctggagcttatgacaggcgccacatatccctggggggaggcaagatttcaccattagtccaagtctgcagcctcccattctctaggcctgcagccacattactggacctaaacttctgggagccatgaactgggctctacattgttccaaaggaaaggggctcaaggtatcagtgcagcttagcaattgtcccttagaaagctcacagatcaaaaacctccctgtgtatcaattctacagccaccagcagcatttcaactgacctttctgaaaactgaaaaaatgaacaccaaataagtaagccaaccattgatgtactaaccaacagcaggatgttttttaaaggcctgcactgagccatcaactgaacaggctcagttctaaatcagacagcagcctgtgctgggtgcctaaggggatgtcacaagacagtaggtctggaaagaagcagccaggcagccaagaatgggagctgcaccccaggatcacaaacaccttggtgaatgcctgctctacctgcagtgtggtcactttggcctctacaggtggaagtcttcatctgtacaaggtgaataataaaaatattataaaacaaaggcagtcacaaatagccacattggtgttgaggtgatcaaactgaacaccagaccatgggggctacaaagtctggtggagtcaaaggaatgagacaagacaagctaatagtacataaagtaggtccagggggccaacactagtatagaggctgtgaaggccgtgaactctgggagccacaccatttattggtgattaaacaaagaagcagatgatgaggacatgctggtcgaaaggaagcagtcacatcaagtgtttagtttatagctgtgtcagtctagcattttctttgaagcataaggaacatgttctgccactcgagataatgttgaacatttccttctacctcaagatacaattaatttgtgatcctgggagagcaagaagcaaggagccagcaagtctggacacattccagaggccacgaggggttttatgtcctgattcctggattccatccaagccacgaggggttttatgccctgggcttaggttgtagtgtggtggggcagccttccacccttaagcacagaacctggtgttccacaggccacaagaagttttaaactctgtagtgaggatatgttccaaggctcttttcatattatgtcagactagcaagtcttgcctcagcttttctcccaacaattggactgatgagttgctctactgggcacaagcatcatgggttcttaaaacaaggccctggacaagcaccaaatatgttcctatcaccacattccactagcccttcaactataaacatgcacaggagtcacctgggggccttgctaaataaaatgcagcttctgattcaatagtctcaaacaggatcagagattctgcctctcttgttgagttcccaagtaaggcagaccatgccagtccacagactcacactttgagatacagcacctgggccattgtgttctaatgtgcttgataacctggagcacctattaaatatccaagttgccaggactttcttctggaaatcttaattcagtatgttttgtttggagccttggacatttgggaaaattagaatttctttctctccctttagacaaaagtcaactactgctgaggcatgtgcttaatgttgactaaaacatccaactcaacaaccaatcctgtataattttcaaactctgtcaataacttgctgggtctaacctgcataacctggctgcatgacgggtgaagaaatgcactcagacacaggtatcccatgaaagagtggggtaggggactgggcagctcccagacactgaggagggtgctgtaaagagtcagcagtcacagccctgtcaggctggggctccaggcatttattcagcacagttttaatgacaaaggtctcaagtaaacaccacacctctagagggaaattaacattgctgacctcctgagtagagagcagtcatgcacctgcaaatgatcaaaggtctgttttaggaccacatgagaaaacaagctatttagataaactcctctacattcctatgtatctacgccctaagcttttaagagaattcagctgccttcacccaaatcttttactgaagctatgtaaacctgccagccttccaagaagttttgtgtctatttcctacaacttaatttttataatttctcccaccatcctgacagatcccctacaaaaggccatatttcttctgagcttgctcagtccagctgagccagctttccacttgactcctgaatgtgcgaaggacgcaggttcccaggaccatccagaagcatctctcatcaccttaaagctctgaaacactggctgggtgcagaggatcacgcaagtaattccaacacattcagaggctgaggtgggaggattgcttgaggccaagaattcaagaccagcctaggcagcatagcaagaccccatctctacaaaaagtacaccccaaaattagctggatgtggtggcacttgcctatagtctcaattaattaggaggctgaggcaggattattatttgagcccaggagtttgaggctgcagtggggtatgatcgcaccaccacactccagcctgggagacagattgagaccatctctaaaacaacaacaacaggccaggtgcagtggcttatgcctgtaatcccagcaatttgggaggccgaggcgggtggatcacctgagatcaggagttcgagaccagcctgggcaacctggtgaaatcctgtctctactaaacatacaaaaaattagcagggcatggtggcacacacctgtaatcccagctactctggaggctgaggcaggagcattgcttgtacccaggaggcagaaattgcagtgagctgagatcacgccattgcactccagtctgagcaacaagagcaaaactttgtctcaaaaaatatatataaaaaataaaataacaaaaaatgagacagaaaactgaaatattttaagtttcactattgcttgttagttgattaaagtagttctgcttccactttatttttaaagacactaattgctacactgaataaaaccttaatggagtttcattataagtatctattatcatttgataattttctacatagaagcatgcaaaaagtttaaaattcagtttcatttgacttagccttgactgtaatgaaggactctatgaagaggggacacagtgtttatgggctggagtccctgtaactgcttggtggccgagtcccagtcattccccagttcaagccatgggcagatagatgggtactgtccttcagttcttcttacccattcacttgctttctttattgcttcaaaagcccagggaatattcttagattaaaaaaaataaatgtttcagatttcagaacataacatgtgaaatgtaatgtggtactaaacccatcacattatatcagacaaaatgattctgccaaaaattaagatatttaataaaagcagttttccttgacatcttacagaagttcttctacttgtctgatgttgagcttatgcactgcattgtcaaatgtcctgtgccctccattcgtggtttccacatgcctccaggcatccctgctgcctacaggacagctaaggttccagcctctctatagttgtttatggttgtccccttgccactcttctcagtttaaatcctatccattcttcacgcacaaactcaagtagtatttcacaaacgagacttctgtttctctctccttcctactgtactgacttgattaggtaccttcagaatatctgacagtcccccatgaaactggcatatgttcagctgtgtctcataagccaggaaaaacttggtagactaagcatatcgagtcaagtctgtgtccactaaatgttgtcaaatatttgagactgttgaatattcaagtctattcaacactcagaaaaattctggggttgttcattaatattaattagctacttcctcatttgttctgtcatctgctagaacttgtcagtgaacaagtggcaacatacaccagagttcttcagaaaattctatggggaaacttaatattttgaaaattctctccctgttcctgatttttccctgtgaactgggaaagggctatcagtatagcatgatggtgaagagctgggtttgatcctgactctgcaatcacatgatattggccatgtgatactgtgtggctttcattcaacactgggaatctcagtttcctcaattatgagaataacatgaggtcttatgggtttgtggtggaaatcaacaaagcttataaatttaatgtgcttactaatccgtggtacacagtaggcactcaataaatgtttggtgaatgtcatgatagaatgaacatactaaataagaagcatgtccaaagtgtttaaaagaccgacatttcctggtaaatgttcgtctactgactgttactgactgctgaaaacaacaaaactggctttgaatattttcactaattcagctggcctcctttagtccagtggcctctacactttttggttcacattccactagtaagaaaatcttgtgcctacacctccaggtaatgtactcctgcatcaatattacgtacatcccaaaatagaaaatacagaaaaaagtttcaaacatgcaataaacaggaaataaaaaatatttaattttttttttttttgacacggaatctcactttgtttccaggctggagtgctgtagcacaatctcagctcactgcaaccttgtgatccccccgcctcagccttcaaaagtgctgggattataggcgtgagccaccacgcctggcctaacatcgtattgtcttacgtactcaagtgccagcaaaccattttgctagcaccatagtaataatgtagtaagagctatatgcttgaatatacttgatcaattttgaaaatcttgctttaatgctttgtggtattacagttcaaaaacaggttcaaagattatacttgttctaacagctataatattactaatcaggaataatataaatagaataaatacctctttggatgtgcctattaagtcaaatactaattttttagtcccatctcctagctgttcaaagtgttttttctttgatatttatttaattaattctcttggcaagtggcactggtttattttcacttgaggccaggagtttgagatcagcctggccaccatggcgaaacatcgtctctactaaaaatacaaaaattagctgggcacagtggtgtgcacctgtaatcccagctactcggaaggctgaggcacgagaattgctggtcttaaactcctggacttggtcttgctgggctgaagtgatcaacctgggaggcagaggttgcagtgagctgagatcatgccactgcgctccagcctgggcaacagaaggagaccctgcctcaataaataaataaataaataaatccaaaaagaaaactccctaaatagaaaaaagaataaattctcatctttcttggcaaactaatgagaaggtattgctttttaaaaaacagaagtataaattacatatagtaaattatgattctccttttttttttttcagacagcatctttctttgttgccccagctggaatgcagtggcacaatcacaactcactgcagcttcggcctcctgggctcaagcaataccccccccgcccaactcagcttcctgagtagtcacacactaccacactcgggtaatttttacatttttttgtagacacagggtcttgctatgtggtcaaggctggtctttgaactcctggaagcaagcaagcctcctgccttggcctcccaaagtgctgggattccaggtgtgagccactgtgcccagcaatgcctgggtaattaaaaaagtttttttgtagagacgggggtctcattggttacttaggctgaccttaaactcctgggcttgatcttgctgggctcaagtgctcctcctgtctcagcctcccaaagtgcgtggattacaggcatgagccaatgtgcctagcccaggacttcctgaacacctgttttgtgttcaagaactttttcttagtcattacacttaaaaaatatttatcaggccgggcacagtggctcacgcctgtaatcccagcactttgggaggccgaggtgagtggatcacgaggtcgggcaatcgagaccatcctagctaacacggtgaaacctcgtctctactaaaaatacaaacaaattagtcaggcatggtggcggatgcctgtagtcccagctacttgggaggctgaggaaggagaatggtgtgaacccaggaggcagagcttgcagtgagccaaaattgcaccactgcactccagcctgggtgacagagcaagactctgtctcaaaaaaaaaaaattgttatcaatatttctttaaatatcaaaaaatatccaggtagtgtttaattttccctgtctcgtttttttaaatgcagtgggttttgttcaaaccaggatctaaacaaggtctacccttgcttttggttgacatgtctctaaaggattatttataggttctgctcctcaaccttttttttatcttgccatttatttccccacattccagactttgctgactgcatttgcatggagtcacataacatgttcctctattctctgatctaattcaagtttagaaatcaaggggtttcatttaacttatttgattttatacatattagtttctatcaatattagtatctaccttccaaaataacaaatcaaaagtgttattaacaccatggctactcccagtgagatttctttgtaatattttttaatccttaggcactatcccactaggggatttgacataatttgatacagtcaaattattaactatgttttaaagtcatcttaaattaatttccaggctgggcatggtggctcaggtctgtaatcctagcagttcaggaggctgaggcaggaggattgcttgagttcaggagttcgagaccagcctgggtaacatggtgaagccctgtctttccaaaaaatataaaaatcagcagggcatggtggtgcatgcctgtattctgagttacttaggaggctgagatgggagtatggcttgagcccaggaggtggaggttgcagtgagctgagattgcaccactgcactccagcctgggtgatagagccagactttgtctcaacaaacaaataaataaatatcaatcttatccattattacataaaatatttacatagtcccaaagtcaaaactgcaaaacgaagcacactaggagaaacctagcttccatccttgtcctctctaccaaacctcccttgcaacggtatttttattagtttgattagttttccccttatcttgcctttaaaagaacataagccaattacattgtatgtatatgtgtatatgtgtatgtatgtgtatatgtgtatgtatatatttatatatatgtgtatgtatgtatgtacatatgtgtatgtatgtgcatatttgtatgtatatgtatacatgtgtatatgtgtatgtatgtacatatgtgtatgtatgtgcatatttgtatgtatatgtatacatgtgtatatgtatgtatgtgcatatgtgtatgtgtatgtgtatgtatgtatatgtgtatgtatgtgcatatttgtatgtatatgtgtatatttgtatgtatataattatatatacatgtgtatatgtgtatgtatgtgcatatgtgtatgtatatgtgtatatgtgtgtgtgcatatgtgtatgtatatacgtatatatacaggtgtatgtgtgtatgtatgtgcatatgtgtatgtatatatttatatatatacatgtgtatgtgtgtatgtatgtgcatatgtgtatgtatatgtgtatgtatgtgcatatttgtatgtatataattatacatgtgtatatgtgtatgtatgtgcatatgtgtatgtatatgtgtgtatgtgtaggtatgtgcatatatgtatgtatatgtgtatgcatgtgcatatttgtatgtgtattgtatatttgtatgtgtataattatatatacatgtgtataggtgtatgtatgtgcatatgtgtatgtatatgtgtatatgtgtatgtgtgtgcatatgcatatgtatatacttatatatacagtgtatgtgtgtatgtatgtgcatatgtgtatgtatatatttatatatacatgtgtaagtgtgtatgtgcatatgtgtatgtatatacttatatatatacatgtgtttatgtgtatgcatgtgcatatgtgtatgtatatgtgtatatgtgtatgtatgtgcatatgtgtatgtgtatacatatatatgtatgtcagagggatcatactctggtcatgcccctcttgccatggggtagagggtctgtatggaccagagaatgtgcccaccctggagcccacatcctcctttttagacctgcaactccagcgttcctgaccacatggccctgagtccacttccagggtcttccctggtctgtcatcctgagtttgaacagtgctgccatctcactggtgctgcaaggtggctggggtgagggggcaatcgcatggggtctggacggcattttgatgggtggggtggggtattcatgtgtgctggcaaggcctcttagggtgctaagggtcagccaagggctgaatttgaacctggtcttccaggtggttataaagttgtatttgccaagggaggagattaggacacacttcttaatctaatagtttgctagattgatttataactttttaaatacttgtattttacaaactataaagttataaactttaaatacttgtattgtattcttgtcccaggccctgccattgttgggaaaagggcggggcacaacagtcacattatgggttttctggaggcacccaggatcagcacactgcagtgaagagtaccatatccagagccagaagggccggggtccaggggagctacactgaaactctttgagcccatttcctttgcagcctaaggcacaaataccacatcagccctgcccaccacaggagacttgggcaagctgtcacctgaaaaaaattaccttcctacatacttataaagtagtctacacatgtaagataattccctatagcttgtttgtaaggtttattaaataaatagttgaaaatataaataagttgcataatactatagttaaagccacctggaaatagaagcatattccagttccatcagtgatttgaacactattccctttttttccaacctggtgcaaataaactgtaatattgctttgtggcaattaggtccaggagatgttctcttctttttatacctaaaggggaaaaaactgcgttaagtctgttggaaactctgcatctcaaactgccttcttataaaattcccattaaagaattataatacagctaaatcacaggacatgagcagatggtgaaactctctaatactcttcaaggcccttaattagcttgctatttaaataaatgaggatggttggaaccgtgtccctatcatagtatcctgatgattgtcaggaaactgacctgtatccagagggcccctcgcttgccatcttcaataaccagagaggtatgaagttcaatgaaagaaatccagtttttaggctcttgttacaaatagcttagaaaggtaaacctaaatattcaacagacaaacaagagttatgaccagttacactggtgtatcaagttatttctagtggttagtacctacaggtatcctaatcaagatcttttactatattatgaaatatcaaaattgaaaaatgaatgtttacatatgttgaactcagaattaacaaccatttttattttaaaaaggcaagcttcatttttttttttttttttttttttttttgagagagaggggctcactctgtcacgttggagtgcagtgggtgtgatcagagcttactgtagcctccaactcctggactcaagtgatcctcctactttggcctcacaaagtgctgagattataggcatgagccacagcatacagacaaaaagtggttttagggaaggaaaaaaaacctttgtcttataattaagaatatacggggggaggaggcaagatggccaaataggaaaagctccagtctacagctcccagcgtaagcaatacagaagatgggtgatttctgcatttccatctgaggtaccaggttcatctccctagggagtgccagacagtgggtgcaggacagtgggtgcatgagccaaagcagggtgaggcattgcctcactctggaattgcaaggggtcagggaaagggctggtcaagtactggtgaaggaaagggctgacagaaggcacctggaaaatcgggtcactcccacgcaaatactttgcttttccgatgggcttaggaaacggagcaccaggaggttatatccggcacctggcttggagggtcctatgcccacggagtctcactgattgctagcatagcagtctgagatcaaactgtatggtggctgcaaggccgggggaggggccaggctcacttaggtaaacaaagcagccgggaagctcgaactgggtggagcccaccacagctcaaggaggcctgcctgcctgcctctgtaggcttcacctctgggggcagggcacagacaaacaaaagacagcagtaacctctgcagacataaatgtctctttctgacagctttgaagagagcggtggttctcccagcacgcagctggagatctgagaatgggcagactgcctactcatgtgggtcactgacccctgacccccgagtagtctaactgggaagcaccccccagtaggagcagaatgacacctcaaatggctgtgtactcctctgagacaaaatttccagaggaatgatcagacagcagcatttgcagttcatgaaaatccgtggttctgcagacaccgctgctgataccaggaatacagggtctggagtggacttctagcaaactccaacagacctgcagctgagggttctgtctgtcagaaggaaaactaacaaacagaatggacatccacaacaaaatcccatctgtacgtcaccatcatgaaagaccaaaagtagttaaaaccacaaagatggggaaaaaacagagcagaaaaactggaaactctaaaaagtagagggcctctcctcctccaaaggaacacagttcctcaccagcaatggaacaaagctgcacggagaatgactttgaggagatgagaaaagaagtcttcagacggtcaaactacttctagttacaggaggaaattcaaaccaaaggtgaagaagatgaaaactttgaaaaaattttagacgaatgtgtaactagaataaccaatacagagaagtgcttaaaggagctgatggagctaaaagccaaggctcaagaactacgtgaagaatgcagaagcctcaggagccaatgcgatcaactggaagaaagggtatcagtaatggaagatgaaatgaatgaaatgaagcgagaagggaagtttagagaaaaaagaataaaaagaaacgaacaaagcctccaagtaatatgggactatgtgaaaaaccaaatctgcgtctgattggtgtaactgaaagtgatggggagaatggaaccaagttggaaaacactctgcaggatattttccaggagaacttccccaatctagcaaggcaggccaacattcagattcatgaaatacagagaacaccacaaagatactcctcgagaagagcaactccaagacacataattgtcagattcaccaaagttgaaatgaaggaaaaaatgttaagggcagccagagagaaaggtcgggttacccacaaagggaagcccatcagactaacagcagatctcttggaagaaactctacaagccagaagagagtggggaccaatattcaacattcttaaagaaaagaattttcaactcagaatttcatatccagccaaactaagcttcataggtgaaggaaaaataaaatactttacagacaagcaaatgctgagagattttgtcaccaccaggcctgccctaaaagagctcctgaaggaagcactaaacatggaaaggaacaaccagtaccagccactgcaaaatcatgccaaaatgtaaagaccgtcgagattaggaagaaactgcatcaactaacgagcaaaataaccagctaacatcataatgacaggatcaaattcacacataacaatattaactttaaatgtaaatggactaaatgctccaattaaaagacacagaccggcaaattggataaggagtcaagacccatcagtgtgctgtattcaggaaacccatctcacatgcagagacacacatagactcaaaataaaaggatggaagaagacctaccaagcaaatggaaaacaaaaaaggcaggggttgcaatcctagtctctgataaaacagactttaagtgaacaaagatcaaaagagacaaagaaggccattacataatggtaaagggatcaattcaacaagaagagctaactatgttaaatatatatgcacccaatacaggagcacctagattcataaagcaagtcctgagcgacctacaaagagacttagactcccacacaataataatgggagactttaacaccccactgtcaacattagacagatcaatcagacagaaagttaacagggatacccaggaattgaactcagctctgcaccaagcggacctaattgacatctacacaactctccactccaaatcaacagaatatatatatttttttcagcaccacaccacacctattccaaaattgaccacatacttggaagtaaagctatcctcagcaaatgcaaaagaacagaaattataaccaactgtctctcagaccacagtgcaatgaaactagaactcaggattaagaaactcactaaaaaccgctcaactacatggaaactgaacaatctgctcctgaataactacttggtacataatgaaatgaaggcagaagtaaagatgttcgttgaaaccaacgagaacaaagacaaaacataccagaagctctgggacacattcaaagcagtgtgtagagggaaatttatagcactaaatgcccacaagagaaagcaggaaagatccagaattgacatcctaacatcacaattaaaagaactagaaaagcaagagcaaacacattctaatctagcagaaggcaagaaataactaaaaccagagcagaactgaaggaaatagagacacaaaaaacccttcaaaaaattattgaatccaggagctggttttttgaaaggatcaacaaaactgatagacctctagcaagactaataaagaagaaaagagagaagaatcaaatagatgcgataaaaaatgataaaggggatatcagcaccagtcccacagaaatacaaactaccatcagagaatactacaaacacctctgtgcaaataaactagaaaatctagaagaaatggataaattcctgggcacatacactctctgcagactaaaccaggaagaagttgaatctctgaatagaccaataacaggatttgaaattgtggcaataatcaataacttaccaaccaaaaagagtccaggaccagatgtattcacagccgaattgtaccagaggtaaaaggaggaactggtaccattctttctgaaactattccaatcaatagaaaaagagggaatcctttctaactcattttatgaggccagcatcatcctgataccaaagccgggcagagacacaaccaaaaaagagaattttagaccaatatccttgatgaacattgacacggaaatcctcagtaaaatactggcaaaccgaatccatcagcacatgaaaaagtttatccaccatgatcaagtgggcttcttccctgggatggaaggctggttcaatatatgcaaatcaataaatgtaatccagcatataaacagaaccaaagacaaacaccacatgattatatcaatagatgcagaaaagacctttgaaaaaattcaacaacccttcatgctaaaaactctcaataaattaggtattgatgggacatatctcaaaataataagagctatctaagacaaacccacagccaatatcatactgaatggacaaaacctggaagcattgcctttgaaaactggcagaagacagggataccctctctcaccactcctattcagcataatgttggaagttctggccagggcaattaggcaggagaaggaaataaagcgtattgaattaagaaaagaggaagtcaaattgtccctgtttgcagacgacatgattgtatatctagaaaaccccattgtctcagcccaaaatctccttaagctgataagcaacttcagcaaatctcaggatagaaaatcaatgtacaaaaatcaagcattcttatacaccaataacagacagagagccaaatcatgagtgaactcccattcacaattgcttcaaagagaataaaatacttaggaatccaacttacaagggacatgaaggacctcttcaaggagaactacaaactactgcttgatgaaataaaagaggatacaaacaaatggaagaacattccatgctcatgggtaggaagaatcaatatcataaaaatggcaatactgcccaaggtaatttatagattcaatgccatccccatcaagctaccaatgactttcttcatagaattggaaaaaactactttaaagttcatatggagccaaaaaagagccctcatgccaagtcaatcctaagccaaaagaacaaagctggaggcatcacaccacctgaattaaaactatattacaagcctacagtaaccaaaacaggatggtactggtaccaaaacagagatatagatcaatcgaacagaatggagccctcagaaataatgccacatttctacaactatctgatctttgacaaacctgagaaaaacaagcaatggggaaaggattccctatttaacaaatgatgctgggaaaactgactagccatatgtagaaaactgaaactggatcccttccttacaccttatacaaaaattaattcaagatggattaaagacttaaaactataaaaaccctagaagaaaacgtaggcattaccattctggacataggcatgggcaagatcttcatgtctaaaacaccaaaagcaatggcaacaaaagacaaaattgacaaatagtatctaattaagctaaagagcttctgcacagcaaaagaaactaccatcagagtgaacaggcaacttacagaatgggagaaaattttcgcaaccgactcatctgacaaagggctaatatgcagaatctataatgatctcaaacaaatttacaagaaaaaaacaaacaaccccatcaaaaagtgggcaaaagatatgaacagacacttctcaaaagaagaaatttaggcagccaacagacacatgaaaaaatgctcaccatcactggccatcagagaaatgcaaatcaaaaccaaaatgagataccatctcacaccagttagaatggcaatcattaaaaagtcaggaaacaacaggtgctggagaggatgtggagaaataggaacacttttacacggttgatgggactgtaaactagttcaatcattgtggaagtcagtgtggcgattcctcaggaatctagaactagaaataccatttgacccagccatcccattactgggtatatacccaaaggactataaatcatgctgctataaagacacatgcacacgtatgtttattgtggcactgttcacaatagcaaagacttgcaaccaaccaaaatgtccaacaatgatagactggattaagaaaatgtggcacatatacaccatggaatactatgcagccttaaaaatgatgagttcatgtcctttgtagggacatggatgaaattggaaatcatcattctcagtacactactgcaaggacaaaaaaccaaacacctcatgttctcactcatagatgagaattgaacaatgagaacacatggacacaggaaggggaacatcacactctggggactgttgtggggtgggagcaggggggagggatagcattaggatatatacctaatgctaaatgacgagttaatggttcagcacaccagcatggcacatgtatacatatataactaacctgcacattgtgcacatgtaccctaaaacttaaagtataataaaaaatgtaaaaaaaaaaaagaatatacaattaccttttttgagtaaagacaaaaggacctggcagagtatgcacatatctgcatatacaccattaattttacatcactgaggtagccaaaactgctcataagagggcttttattaaataatatagtgttcttaatggaggaaaaagaacttaataaatttttaaaaacaaaataagaaactaatccattgtcccacaaaagaaaatcaatggagacaaaagcagtttaatttgctgaattcttttgtggcttatttttggggtattatttacaaaacgttagactgatttttaagcaatattaataatagcagcatacaactccaagactaatataataaataataaactgatgaagtgcctaatgtgtatcagtgttatttaaaaaacaaatgcagaaggagaagggatgataaaagagaaatgaagaagaggataaaagacaaagttgggtacagagataaaaaaactagtcagagaaaaaaatcagacagcttgagactctacgtagaggaagaaagacagaaaagcacacacttacagaaaaataacatggataatagggagcaatacagtgaagcacaggaaaagcccgtggaaaaggtacattcatgaaatctgatccccttgcatctgtgactcaattttctccagttttcctcttgtttctcaggctgcttcttctctgcgtctttgatgtttcttgtccagtctgaacactaaaccctgctgtgcagcagactggtcctagcacctgctctgctcagaccaccttctttctttgggtgacctcatcctgagccaggctttaaatactactgacattgagaattcttccaggcttttccaattctgacctcttccctgagctctagcctcacatgacaatatatttatcttgaatttttatctcactctgtcacctaggctggagtgcagtggcacaatcatggctcagtgcagccacaacatcccagggctcaggtgattatcccacctcagcctcccaagtagctgggaccataggtgcatgtcaccatgcctggctaatttttatatttttatagagatggggtttcaccatgttggccaggctggtcttgaaatcctgatataaagtgatctgccccctttggcctcccacagtgcaggcattacaggtgtgaaccactgttcccagtttatctttggttttcaacagtttgactctggcctatctaaatatggtcatttttttaatttatcctgcttggagttctgttgagtttcttggatctggaaggtgctgtctttgatcaattttacaaaaatattcaaatatttttctgtctaccctttcattttctgaaaccctagttacacaaatgttaaaccttttgatatcattccacagtcttggctcttctcttttttcattctattttttttctttctgtattgcagtttagataagtttattgagtacattgtaaattgaattaaatgatttctttcctgttgtgtccattctgttgttaagctcattcaatgaccttttcattgcagatactatattttccaattctaggattttcatttggttctcctttatagtttccatctatttgctgagattctgccatttattcacccattccatccttttctggtaaatcaatccttcactatatttttaaaaacagctttaaagtctgtgtctgctaattctaatatctgggtcatctgtgggtcagcatttatagcccattttccctttgatcacaaatcatattgtcttgcttcttcttatgttatcaaattttcattccatactgaccattaaaaatgacaccttgtagagactcccagctacgctctcttactctaaagagtgttcagttttgttctggtgggtcctgtgtatgctttgttttaggctttattaggatgggtctattttggtttatccctttgtcctgggatatagtccttgatcatgagatatgatccttatgacccttttatggtttcaatggaaagatattcataaagtctctctaatttggtgccacttgaactgtaaactctggccagtactaggcagcagctgaaatctctgcttagctctgtagcttcccagctgtgacttttttctggattccttgaggttgcaccccatataggtagaggttaggagacagccaaggatctgagggatatttggatgcagatttcagagctccctgctctgtggttccctcctttataggattttaatccttaacttccagccactttggcaacctcaaactccaaccccgtgtcctcatcccattaagactttctgttgtagttcaaacctcccactgtgtctcatgagctgagaaatgcctttcggtgacaagctggattaatgtggagcccacctagttggcttcctttctttcaaagattattttcactctagtttctgcctgtttttgattattctcctggctttcaaagaatggttttaaatattttattcaaagttaataactgttattggcaggagagttagtccgatagcggctcttctattattccgggatcaagcactcactcttcatgtaaattgtcatcacccttttttggcctagtgcaggtcaaacaggctatgcatttgcccacccacccagcctggaatacaaaaattctagcattttagaagtgatggtggccagtgagacactgctgttctatcttttcatgaatattggctagttgtttaataatgtgtattttattttaaaaaatccccaggctgagtatggtggcttatgcctgtaatcccaacagtttgggaggccaaggtgggcacattgcttgagctcacaatttcgggaccacactgggcaacatggcgaaaccccatctctaccaaaaaatacaaaaattagtcaggcatggtggcaggtgcctgtagtcccagctactcaggaggcttaggtgggaggatcccttgagcctgggaagtggaggttacagtgagctgagatagtaccactgcattccagcctaggcaagggatccagacctagtctcaaaacaaacaaacaaacaaacagctcctgtcccagggctagcatttgaccttcaaaccacttgccgggtcaaggatgctcaggatttccttacctatctccttgttgtcatgaaaggaaacaggtccagaggttgaaaaactgcctctggcagaggctggctaggtgctcaccagagctgttttctcctcctggacactcagcttaacagtacatttctcaggccttcgtatatggatggggctatgtgactagtgttcttcctcttgtctagcagggggatgatgccagggtaatctttgttcttctctcttaccaggataattttaaagacatttattgaagatggtggagccacaatatggaaggagtcaaggtctctaaatgaccacataagtggaactttcttcctgaccaatatttgactgggatatggacaagaaagtaatctttgattatgttaagctactgagatttcttttttacagcaattggtgctatttatgctaataaatgtgcacaaacaataccctagttagcggcaaaaatattactagaaccagatctcccatttcctttaatggttaaatataattccattcaaatataactttcataattattacattagtaaactcatttacataatagtttataacgattaggagcatgcttatgaatgaatgaaaatcatgacttaataaatggaaacatagtgacttacctacaatttcaatgcctttttgtttaagctgtgcaaagcatttgtattaagatttaatataaattgcagttctggtgtaagttttcagaagccatcatacaaaattaagaaaacaaaggtaagttatgttattgacattttatgacataagaagttaggtagtgggggagggagaggggcaaggtttgaaaaacatattttcactacttgggcaacaagacaattagaagcccaaacctcagcaacacacagtatgcccatgtaataaacctgtacatgtacctctgcatctaaaataaaattttaacaaattaaatgaaaaaagaagctatgagataaatatgtttccatgtattgaatttcagttaattacagcatttctaacatttttattactgtaaaataaggttcttcatacactagtgacatagtattgtttggaacctcataaacgctatgaagactacatatgtggtggcatttataaaaagtgtggaaagagactcatgtgtagagatttttttaaatcgtactttttttcttctagcaatgctttatttcattttttattggtacgtattttggggttcacatgatattttgatacatgcatagaatgtgaaataatcaggtcagggtatttaggatctccatcagcttgaacatttatcatgtatttgtgttggcaatatttcgaatattttcttctagccattttgacgtatacaatgtcttgttaactatagtcaccctactgcattatcaactagcaatgagcattgaaccggtatttctcaaacttttaaatagcatgattccctctttaaaaaaaacccactttactgaaatatgactggcatacaaaaagtcaccaatattttatgtatacaacttgatgtgcttggagttaagtatacacctgtgaaaacatcaaaccatcaatcatcaatgccatgaacttagccaccactcccagaacttttcttccaccccttttgttttgttttgttcccttttgtggaaaaagtgcttaacataagatagacctcttagcaaatgcttaagtataccatattggattgtcaatcataggccctgtattgtacagtagatctccagcatgattccttttgtttaacataaaaatgtaccctgatgtagtctgaaacatgaaaatgacagttttttctaagtataaaattgttatattaaacacggactttaaaactaacttccctgcacccccccaacatctgcctgcttcatcacatgcagaggagagtgtgctaagcctgagcttggggatattaacctcaacggagacagaatccagggaaaccaacacagggagcagaaagcagggtgtggccctaggcaggtgcacaggtttaagggcctatggcaataatttgaaaaattacagcagtgataatatgtgccatcccatagagaaatggtaccaggtgctgttcttttatatgtttagccacttcctgtggagcactattatcacacccacattgcagatgagaacacggaggcagagaaaggtgaagtaattgtctaaagtctcacagctaacaagcagcagagccaggagtggctgtgggatccacactcttgaccatctgcagtatgctcccagcaggcttttgggtgcactgtctcaagtagggaaactgggcagctgtgattatcctgtttaaaccccaaacccactctgtgaagtagacactatcattatctccactatatggatgaggaaactgaggctcagaaaggttacctgacttgccccaatcacaaagttggctgggactcaggcttacttttatgctgcatcaagccctttccgtttcactaaactactttacaccaaaccaagtaatcacagatgcaggactgggtcttagtaccagtgcaggggccaaatctacagggtgtttattagcttaacaaatggagtgataagctctaacacaatatacacgttgaataatatctgtattcccatgaccttatgtgaaaatatttagagtacaagtacaagtgcttgtgctctacttcacagtgtgaaatttatgtggattacaatccattagttctagaatctaggaaattaagatctcaccccatcatctgttcagagatcttcattttcatgtgaggaatagaaacattcaccagcatgaggttctggtctaatgttggtagagaaacaccagccagcatcaagcacactgtttcatccagctgtctgttttgttttgtagcaagagttcctcaatgagtgaagcagtatgatttacaccccagtgcacaagccccttccttcactacagactgacgatagacagttccttgaccagctgctttgaggagccccattctaaactatgaagccagctaaccacagatttaaggagaaataaaacacatacctctctctgtagactgaagagtgcagtccaaggcacagcatcctgccagtgctgtgtgcacactgtttcatcctcctctattacctccagaaagcacgggatactgttgtctgttgtatcacattttatttgtaaaaagcagtacttctcatagctcatgactttctgtttcagaacaactttgaaaaccatagtcaggacattgacttccttcaagactgcctactgattcgtccagaagacagagatctactggggtagtccaggactgactgtaaagaggctcaggtaaggcagaggttattggcagtcaaaggggctgcggaaagctgaaaatgaaaaggagaggaagcagagggatgataagacccaaaacctctgatgggatcagggtctgtaggaagagagaaatgaagctggggagaatccagctcagggtaggtgccagtagaaggcctggtcgtacggcctccaacaggttgcagtggagcagactgtgtggagctcaatgagctccctgaaagagcaatgccacagtagggtgcagaagaggggttctggggaggtcctgtgggacaagacgccaactgtgggatacagtcagcacaactgccaggcacagggccttggctgaattgagatgcatcaaactgtctgggaggagcagcaaaaccaaaactagctatctgacaatatgaggcaaaaggcaaggaagcaggactgtgagagcgggcagccgggggaagagaggaaccaaaggctggagcagaaacacaaaaaaagttagaagtagatgtttccggtcaggcgcggtggctgacgcctgtaatcccagcactttgggaggccgaggcgggcggatcacgaggtcaggagatcgagaccatcctggctaacacggtgaaaccccatctctacaaaaaatacaaaaaattagccgggcgtggtggcgggtgcctgcagtcccagctactcaggaggctgaggcaggagaatggcatgaacccgggaggcggagcttgcagtgagccgagatcgcaccactgtactgaagcatgggtgacagagtgagactccgtctcaaaaaaaaaaaaaaaaaaaaaaaaaaaaaaagaagtagatgtttccagtggactttcttaactttcttatatagtggttcagttgctgttggtttacatg

SEQ ID NO: 29050 - DNA, 201523 bp, Homo Sapiens
agtttatcttcaagaagacagaactgttctaggctctcaggaagtaaaacccacttggtacaacccaaaagaacactaaaactttacttaaatgaaatattttgcaatatcttggatggtttgtgggtttgtgtgctttagactattgactattcacacaagagcaaggtgcatgtgtgcacacacgagcccaaatatgtgtttgcctgcgtgtttgtgagcatgcgtgtatggtgcacatgtgcacgcatgggtgggtggagcgtgggggcagtacacaaagcctgtgggggagatctattgaccctatagatatattagcatcagggagacagggcaaaggtttcacccttcagttcagtccccaatccctgcttattatttccctaacagaagaccatcccccttgccactccctggtttttcttctctggcagcaatgaagcagctgctgacccagctctagttttcgggaagtcagatgaccttttccctcccgcggctctctacctctcgccgcccctagggaggacaccatgggcccactgatggttcttttttgcctgctgttcctgtacccaggtaggaggcagggaagggggaacgtcagggtcctgtgtgtgaggttggtgctcccagcttgaattcccatgtgtgaaacagtctcttttgctttccttttctcatctgtgtcttccttctttctccattgctgtctccttgttcccacggctctaggtctggcagactcggctccctcctgccctcagaacgtgaatatctcgggtggcaccttcaccctcagccatggctgggctcctgggagccttctcacctactcctgcccccagggcctgtacccatccccagcatcacggctgtgcaagagcagcggacagtggcagaccccaggagccacccggtctctgtctaaggcggtctgcaaacgtgaggctccctgtgggctttgctcagggtgctacaccaggggccaccccagaacttttgtttaggagttgctcagggtgggacttaacctgactagatggcaaagttgcttttgcagagggcttttcaaaatatccagaaaatgtcaattgccagtagcaaggaattgggaacaggtcttgatggagactgtggggtactaaagccagggatgactttttatgtacaattgactgcctagtagtgaccattcagaacagatgctgaatggtcctggagtcctctagacatctgaggatcccaaggggagtgtctggggaggccacggccctcaggagactgagggaagtggctatttatcaatcagttcgcttagactctgtgaaattggcaatattcaatcagttgccaaaaacagcaatttcacatgttgcaacctaatatttcagtgttttgacagccagttgaccattcccatgcattccagcataaaatcacctgcttaatccccagcccaggtgttatccatccagtcctatattccccacccacttcctctctctccagctgtgcgctgtccagcccctgtctcctttgagaatggcatttataccccacggctggggtcctatcccgtgggtggcaatgtgagcttcgagtgtgaggatggcttcatattgcggggctcgcctgtgcgtcagtgtcgccccaacggcatgtgggatggagaaacagctgtgtgtgataatgggggtgagttctctggctgatgggctacacagggggctggggtctcctggggaaccctggggcccaatgtgcatccaggaagcctctgtggggataggagtctgttgttcagtgtgccataataatattcctggattttggtaaattgaggtctacaggtcacacatcacaagtctgcaagggccaggccccaggcagctggtgctaagcttcagatgtagcataaagcctccacacactctgcctggcttttctaagtgcctcaaagcaagacttcatattcaggccccacagattgttgtagggaagatatgctgggagagagtcaagtactgtgctttaatgccttgcctttaaagccaggtttgggttccaagccctactctgactttgacagactttgggaaggctatttaacctttctagccctcagttttcccatctgtaagacaaggatagtgagtgctgacctgagattgccatctggattaaatgagttgacattagtaagcatatacaacagccctggagtgcggtggctcacgcctgtaatcccagcactttgggaggccaaggggggtggatcacaaggtcaggagtttgagaccagcttggccaacatggtgaaaccccgtctctagtaaaaatacaaaaattagccgggtgcggtggcgcatgcctgtaataccagctattcaggaggctgaggcaggagaatcatttgaaccaggaagtggagattgcagtgagccgagattgcatcattgcactccagcctgagtgacagagtaagactctgtctcaaaaaaaaaaaaaaaaaaaaaaaatgccagcctcggtgcctcacgcctgtaatcccagcactttgggaggctgaggtgggtggatcacctgaggtcaggagattgagaccagcctggtcaacgtggtgaaacctcgtctatactaaaaatacaaaaattagctgggcgtggttaatcccagctactcaggaggctgaggcaggagaatcacttgaacctgggaggcagaggttgcagtgagccgagatcgtgccactgcactccagcctgggtgacagagtgagactctgtctcaaaacaaacaaacaaacaaacaaacaaaaaacaaaaaaaacagcccctggaatctgataaatgccatgtacacttttttttttttttgagacggagtctagctcttgttgcccaggctggagtgcaatggcgcaatctcagctcaccgcaacatctgcctcccgggttcaagtgactctcctgcctcagcctcccaagaagctgggattacaggcatgcgccaccatgcctcggtaattttctattcttagtagggacagggtttctccatgttggccaggctggtctcaaactcctgacctcaggggattctgcccaccttggcctcccaaagtgctgggattacaggcgtgagccacggcatccggccttgtttttgtttctttaagagacaggatctcgctgtgttgccaaggctggcttcaaactcctgagctcaagtgatcttcctacctcagcctcctcagtagctgggaatgcaggcatgtgccaccacacctggccataagcacttttgtcatagttattgctgcccctgtgaatggtgaggggctctgcttggcagaagtagggctcctaggattccctggagctgcatttgcctgtgggtttgggagcttcttggatcatggttcttagcacatcatacagaagacacggagtccacaagatggcaggaccaccttcacctagtggcccagaccatggatccccactcatgcccttgggttttggcaaatggccatttattctgtaggagggtgaagtagatgcctggtaagactgtgataagtaatgcttgaattattagacgtgactctaacttattttaaaattgaggcataatttacctattgtaaaatgtacaaatcttaactattcagctcaatgatttgttacaatgcatccactcatctaatcaccacccaagacagaatgaggttccctcttgtcccctcccacaaggtaactgctcttctgacctctgtctccatggactaggtaccttgtgcttacatttcctgtaaatggaatcatgcgggatgtggtctgttgcttctggcatcctttgttctatattctgcctgtgagatttatccatgctgttgtgtgtatcagtactttgttcttttttattgctgtgtagtattccattatatgggtatattacaatttatccattcccctcctgatggacatttggattatttccagtttggggccattaggagtaaagctctaggaacattctttttttttttttttttttaattgatcattcttgggtgtttctcacagagggggatttggcagggtcacaggacaatagtggagggaaggtcagcagataaacaagtgaacaaaggtctctggttttcctaggcagaggaccctgcggccttccgcagtgtttgtgtccctgggtacttgagattagggagtggtgatgactcttaaggagcatgctgccttcaagcatctgtttaacaaagcacatcttgcaccgctcttaatccattcaaccctgagtggatacagcacatgtttcagagagcacagggttgggggtaaggtcaccgatcaacaggatcccaaggcagaagaatttttcttagtacagaacaaaatgaaaagtctcccaggtctacctctttctacacagacacggcaaccatccgatttctcaatcttttccccacctttcccccctttctattccacaaaaccgtcattgtcatcatggccccttctcaatgagctgttgggtacacctcccagacggggtggtggccgggcagaggggctcctcactttccagtaggcgcggccgggcagaggcgcccctcacctcccggacagggcggctggccgggcggggggctgacccccccacctccctcccggacggcgcggctggccgggcggggggctgatccccccacctccctcccggacggggcggctggccgggcggggggctgacccccccacctccctcccggacagagtggctggccgggcagaggggctcctcacttcccagcaggggcggccgggcagaggcgcccctcacttcccggatggggcggctggccgggcgaggggctgacccccccacctccctcccggacggggcggctggccgggcagagtggctcctcacttcccagtaggggcggccgggcagaggcgcccctcacttcccggacggggcggctggccgggctgggggctgacccccccacctccctcccggacggggcggctggccgggcggggggctgacccccccacctccctcccggaccaggtggctgctgggcggaggggctcctcacttctcagacagggcggctgccgggcggaggggctcctcacttctcagatggagcggttgccaggcagagggtctcctcacttctcagacggggcggccgggcagagacgctcctcacatcccggatggggcggccgggcagaggtgctccccacatctcagacgatgggcggcagggcagagacgctcctcacttcccagatgtgatggcggccgggaagaggcgctcctcacttcctagatgggatggcggccgggcagagacgctcctcactttccagactgggcagccaggcagaggggctcctcacatcccagacgatgggtggccaggcggagacgctcctcacttcccagacggggtggcggccgggcagaggctgcaatctcggcactttgggaggccaaggcaggctgctgggaggtggaggttgtagcgagccaagatcacgccactgcactccagcctgggcatcattgagcactgagtgaacgagactccgtctgcaatcccagcacctcgggaggccgaggctggtggatcactcgcggttaggagctggagaccagcccggccaacacagcgaaaccccgtctccactaacaaaatacgaaaaccagtcaggcgtggcggcgcgcgcctgcaatcgcaggcactcggcaagctgaggcaggagaatcaggcagggaggttgcagtgagccgagatggcagcagtaccgtccagcttcggctcggcatcagagggagaccgtggaaagagagggagagggagaccatggggagagggtgagggagagggagctctaggaacattcttgcatgtgattttggtacatgtatgcacttgcttctcttgagtaaatgatctaaatgtggaattgtcacatcacaggctggcatatgtttagttgtagtagaggctgagaaagtttcacccacgtacatgccagcaaggtaacagagtgccagtcgctctgcatcctctccaacacttggaattacctgttgtttcagtgttagccgttttgatgggtgtgtagggatgcctcactgtggtttatgaaatataaatgttctctgaaggagtggagggaccatcagctgacttcttccctgggtctctgggggctctgggacagacatgggtgcatccctgggttggaactgggaagcttctgctggcaactgaggccgctgaggaggcagagcctgatgggagggggctactcacctctgccttcctttgttcactcgcagctggccactgccccaacccaggcatttcactgggcgcagtgcggacaggcttccgctttggtcatggggacaaggtccgctatcgctgctcctcgaatcttgtgctcacggggtcttcggagcgggagtgccagggcaacggggtctggagtggaacggagcccatctgccgccgtgagtagctgccctgccctcctgagattcctcggcacacccggccactgccccggctgactcctgtgtggctctccccacagaaccctactcttatgacttccctgaggacgtggcccctgccctgggcacttccttctcccacatgcttggggccaccaatcccacccagaagacaaagggtgagtgtttgaggtggggtttctggttgagcagggtgctggatctgggccggagcaagggaggatgcaaccttcctggaggccaggagccttggtgggctcagccactgaaagggagggaggcagagaagctggacctgcttggcgagagcgcaggaaggaggtggggatctgaatcctccccttccacatttctccagaaagcctgggccgtaaaatccaaatccagcgctctggtcatctgaacctctacctgctcctggactgttcgcagagtgtgtcggaaaatgactttctcatcttcaaggagagcgcctccctcatggtggacagggtcaggaatcaggagtctgcctgcagcagaggccttcctgtgctcactatctctctctgtctccttcccctcctcagaaccccactcacagcccacctcctccaagaagtcttctcagattatactcatgccatgtaggaatcatgaattcaatttatacaatcataatttttattccacaagcactgttgggacactgtgctggggctgggcgacagcaaagatggaaaggctgaggtcttactttccaggaattcatcatctagaacagtggtctccacagaaaggtagtgagataacccacaggagtgaagcagaaaaatactggtgcccctgtggaataatttaaatcagattaataatttaatatttaataatttccttttaaaacttcaacattttgtgcaggctttaaaatgtgtgtgatagactgggcatggtggctagtgcctgtaatcccaacactttgggaggccgaggcaggtggatcacttgaggtcaggagtttgagaccagcctgaccaacatgatgaaaccctgtctatactaaaaatacaaaattagccacatgtgatggcgcacgcctgtaacccagctacttgggaggatgaggcaggagaatcgcttggatccgggaggtggaggttgcagtgggctgagatcacgccattgcactccagcctgggcaactagagcaaaactctgtctcaaaaaaataaataaaataaaataaaataaaataaaatatgtgtgatagaagtttggaagccactggtttaagttcctcgccagaactttgttttgtaattgtgcttttcacaatacttcatgtaacattatagatggttttccctcccagctacattttaaagagggcagtttctgtgctctcttgggactcaaaattaagtaactcattgcactgcgaggcggcaacacacaccagttggagcagtgattgagaatcatgtgacacattcagatcccacttccacctcctcctcatggtgtgatgggggaagggggacaaggcaacatacctcagtttccttatccataaaataggggtcatcatgcccctcacagggtggagtgaagagagtctgtcaaagagaaagatgttcaacaaaggtttcttccttagctgctgctgttccttatttttattattattattattattattatttttgagatagagtctctgtcacccaggctggagtacagtggtgcgatctcagctcactgcaaactttgcctcctgggttcaagtgattcttctgcctcagcctcctgagtagctgggattataggtgcttgccaccataccaggctaatttttgtatttttagtagagatgggttttgccatgttggtcaggctggtctcgaactcctgacctcaggtgatccacctgcctaaagtgttgggattcaggcatgagccaccgcgcccagcccctagcttcttcctaacagccatttcctagtgtctcccctggtccttgcctctgtcggtctcactccagtttctctgcctcctccagggccctttgtttgctctcttaccatctcccctttggcttcagggccctttacgctgcctctcacttgccccgcacagatcttcagctttgagatcaatgtgagcgttgccattatcacctttgcctcagagcccaaagtcctcatgtctgtcctgaacgacaactcccgggatatgactgaggtgatcagcagcctggaaaatgccaactataaaggtacgggtgtcatcacgtgatggtgatgagagaggagaagatggaccctctcagggcctgcaaacaaattctggatgagttaaaaagagagtgaggcctcttggtggcacctgagtcccacgagtctggggtagtttcaacgtccagggttatggtgggggagtccagctgcccccagctcatagctcattctgagatgctgcaggtccaaagacactgtgcaggtcttcaattccttccagttgccaaaaccacactgtctggtttgcatggctgcacactgccatctccccatgtcattagccacccatacaccatgtaaagtgcctggttggcacttagcaaatggctgaagccactcaaggttttggaaacctcatctttgaatcttgggactttagtgtggtcttggattggggttatgcaatgaacatttcttttttcttcttcttttttttttttttgaggtggagtctcgcactgtcacccaggcttgagtgcagtggcacgatcttggctcactgcaacctctgcctccagggttcaggcaattctcctgcctcagcttcccgagtagctgagatttcgggcacctgccaccatgcctggctaattttttatatttttagttgagatggggtttcactatgttggtcaggctggtctcgtgatcctgactttgtgatccgcccacctcagcctcccaaagtgctgggattacaggcgtgaaccaccttgcccggccctatgcaatgaacatttctaaggtggaaaggcttttaaagtttgaacaagcaatgatgccacatctctatctgaatggcaaatgtctgagtttatcaaaacaatcgataaattgcatttccaggccgggtgcagtggctcatgcctgtagtaatcccagcactttgggaggctgagatgggcggatcacttgaggtcaggaaaccagcttggccaacatggtgaaaccccatctctactaaaaatacaaaaaattagctgggcatggtggctggcacctgtaatcccagctacttgggagactgaggcatgagaatcacttgaactggggaggtggaggttgcagtcagccaagatcacgccactatactctagcctgggtggcagagcgagactctctcaaaaaaaaaaaaaaaattgcatttccaataattgggggaatagagtgattccctacccctaggtggtaggtgggaagtttctaagagagtccttccttttggcatattccagatcatgaaaatggaactgggactaacacctatgcggccttaaacagtgtctatctcatgatgaacaaccaaatgcgactcctcggcatggaaacgatggcctggcaggaaatccgacatgccatcatccttctgacagatggtgggtatcatggtctctgagtgtgtctggaatagtggaaggggcaccaatatggggtcagaagccctgaattctgattctccctctgcctgccactttgggccccagttttgtttttgtttttagagatggggccttgctatgttgcccagctgatctcaaactcctggcttcaagcaatcctcctgcctcagcctcccaaagtgctgggattacaggcatgagccaccacacctggcccagtttcttatttataaaatagggccagtgtggtggcttatgcctgtagtcccagcactttgggaggccaaagcgggtggatcacttgaggttaggagtttgagatcagactggctaacatggtgaaaccccgtctctactaaaaatacaaaaccattagctgggtgtggtggcaggcgcctgtaatcccagctacttgggaggctgaggcaggagaattgcttgaacctgggaggcagaggttgcagtgagccaagatcatgccactgcactccagcctgggtgacagaccaagatcctaccttgtctcaaaataaaataaataaataaatagaattagtgttgatgatgatgaccgtaaccacaatgacagcaatgatgatcatgatggctgtcctcctttccttacacaatttttatggaaagctatttaagttgcctgtgtgaaagtgctctgtgttagctcttgttaccatctgggaggtaacttggagatagatgaggaaacgtggctcttgagcaggaatgtcgaagggcacggatgcaaggaacagtctgtagtggatctggccttgtcatttgcctcttgctattgtccaaattacacagttcctccaggacttagtatataaaatgaggatacccactctacctggggtttcatgagaattaaatgagttaaagtataggaagcacctggcctggtgcctggaatgtagaacatttcagtaaaagtgtgtatatatatatatgtatgtatatatatatatatgtatacatacatatatatatatatatatttatttttttgagacagggtctcactctattgcccaggctggactacagtggtgcgatctcggctcactgcaacctctgcctcccaggctgaagcaattctcgtgcctcagcctccagagtagctgggactacaggcatgtgtcaccatgcctggctaatttttatttttattttttgagatggagtttcactcttgttgcccaggctggagtgcaatggcgcgatttcggctcaccgcaacctccgcctcccaggttcaagcgattctcctgcctcctgagtagctgggattacaggcatgtgccaccacacccggctaattttgtatatttagtagaggtgcggtttctccatgttggtcaagctggtctcaaactcccaacctcaggtgatccacctgccttggcctcccaaagtgctgggattacaggcatgagccaccatgcccggccacacctggctaattttttgtggttttagtagagacagggtttcaccatgttgcccaggctggtctggaactcctgagctcaggcaatccgccttcttcggtctcccaaagtgctaggattacaggtgtgagccaccatgcccagcctaaaagtatattttgaagctctcacaggcaatgtaaatgttgaggttcccaggctaaatgctttcctactcttccagggcctggggaaatcctgatattacctagaagaattctttattctctttgttctaggaaagtccaatatgggtggctctcccaagacagctgttgaccatatcagagagatcctgaacatcaaccagaagaggaatgactatctgggtgagcccctgccactgccaccacatttgttctgctcctgcagaggtcatgagatcttcagccagggatcccagcatcttagctatggtccagagccacatggttttatttctgcgttgttctgtacaaaggcaactcatgttgaagagcctggggtcaaactactgcccatggtctcaaccttaccttctttttttttttttttttttttaagacagtgtctcactgacactcagagtatattcctggaaagatgtccacccatgccggcccagaagctggtccagaaagtaacgatgtccaccatgccaccatgaagtgcagtggtgcaatcatagcttactgcagcctcaaattcctggtttcaagtgatcccctcaactcagcttcccaaagtggtaggattacaggtatgagccactatgctcagcccgtcttcacaaattttttaaaattaatttttaaattttttttgagacagaatcttgccgtgttgcccaggctggagtgcagtgactcgatctcaactcactgcaacctccacgtcctggcttcaaatgattctcctgcctcagcctccagagtagctgggattacaggtgtgtgccaccatgcccggctcatttttgcatttttaatagagacagagtttcaccatgttggcagtctggtgtcaaacccctggcctcaagtgatccgcctgccttggtctcccaaggtgctgggattacagataggcgtgagccactgtgcctggccaatttttaattttttaattattatttttaatcaacagctttagacagagaaccttggtttcatcttcagtgggctgtggccatgggcagtttcttcatctgcaaaaggggagtagtactaggacccagctcacaagctgacaggggaagatgctcagacaaacactgcctgcctggcatagaaaaatgcccagcatatgttagccatgaccacgaccgtcgtcgttatcatcatcatcatcatcatagcatctcatgtttcaggaaactttccaggaagaagggacctcgattccctctggggaatgtccctggtggttgctctttcagcagcacagctggctaactaaggctttggcagttgcagcctctaaaggaaaaattcctcaggttcagactaaacacaaattgcactgacctttgatcagaaagtaatttcagagagagagatgctcagacagggagggcagctggttttgagccccaacctttcatcttccccttagctcctctcctttccattcacactgccccctcccccatcacctggccctcgggggtaagctgattcctctttaaaactctggcccaaggaagacaaaatttaaagcccactcccttcctccttagcatcactggaccaaggtcaaatgctacaaaaacattttattgaaaataagcaggaaaccaaacgaaaatagtcaaagaaaacgcacaaggcacgatcgttgtctagctccaactgtaactgtttctatctgggccattgccagattgcctcctggctgaagatctcttggtccacctaagcaccttgctttttacacacaacgcggggctctctgagaacaaaaatgggccacaaggggtgcaaaggctgggagaggagtagactctgtggtctgtctgagggcagttctgactggcaccacagtcggaggacaggcgcggcctgttgtgtgggtccagggcctccagtgggaaaacgtggctttaggcccttctcccagatgctaccttttacagaggaagaccagatctgaggtttagtttccatgttgtgttctgagttctttctattcattcagtcatttaaaagtacttaccaaactaccacaaacctgggtggcttagaacacagaatttctttttcttacagttctggaggttagaagtctgaaatcaaggtgttggcagggccgtgcttcctcagaaggctcttgggaagaattctttcctgccttttccggctgccggcagctccaaccttggcttgcggcagcataaacccattctctgcctctgtcttcaactcgccttcttttctgtgtgtgcctctgtgtcattacatgctgttctcttatatagataggagacccactacctgtgtctttgtgtccaaattcctttcttctttttctgttcatttgtttgagacagagtctcgctctgtcacccagaagcccaggctgcagtgcagtggcgggatcccggctcactgtaacctctgcctcctgggttcaggtgattctcgtgcctcagtctcccaagaagctgggattacaggcatgtgccaccatgcccggcaaatttttgtatttttagtagagacatggtctcgccatgttggctaggctggtcttaaactcctggcctcaaggcgatctgcctgccttcgcctcaaaaaaactgccgggattacaggcatgagtcaccaccatgcccagccagttcacttttttttttttttttttttttgagatggagtcttgctctgttgcccaggctggagtgcagtggtgcaatctcggctcactgcaacatccgcctcccggttcaagcgattctcctgcctcagcctcctgagtagctgggattacaggtgtgtgccagcatgtctggctaatttttgtatttttagtagagacagggtttcaccatgttggtcaggctggtcttgaattcctgacctcgtgatctgcccgcctcagcctcccagagtgctgggattacaggtgtgagccaccgtgcccggctcacctcttctttttttttttttgagacggggttttgctcttgttgcccaggctggagtgcaatggcgcgatcttggctcaccacaaccaccgcctcctggtgattacaggtgtgagccaccacgcctggctctggcttacctcttcttataaggacctcagtcattggattagagctcaccctaatctagtatgacttaatcttaacttgattacatctgcaaagaccctttttccaaataaagtcacagatactggggattaggactcgaacacatctttctgggggacacaattccaccattacagggaataaacaggataagaaaaccatagaacccagcaggtggtaggtgacacaagctaaggggtgttgccatgttgcccaggctggtctcaaacttctggcttcaagggatcctcccaccttgcctcccaaagtggggatgaaagtttgtctggggcattgcagttttagacaggaagaccagggaaggcctcactgagaaggtgacatttgagccaagacttaaaaaggtacgaaagtgagccatgtggaagtctgggggggaggagtgaactaggcagaggcacagctgggcaaagggcctgaggtgtgaccatgcctatggatttgaggaacttcaaagaggctgtgtgctgcaggagagtgaagggcagggagtggcaggaaatgaaggcagacaggtagcagtggggaggacgcaggggtccagctcatgtaggtcttgattggacacagtgagtttcagatgacagcctcctgtctcatggggtagccccaaagccacaggagtctggtgatttccctcttccccaccagacatctatgccatcggggtgggcaagctggatgtggactggagagaactgaatgagctagggtccaagaaggatggtgagaggcatgccttcattctgcaggacacaaaggctctgcaccaggtctttgaacatatgctgggtgagtgagctttgccctccttggtgtggggaggatggtgaggagcccgccagaggcccgtgttgggaacctggacacagtgcccctcacttgcctccttccccatctgatcctcacacccacagatgtctccaagctcacagacaccatctgcggggtggggaacatgtcagcaaacgcctctgaccaggagaggacaccctggcatgtcactattaaggtaccaggaaggaggggcagggcttggattccagaggtaaaagcggccatgggccagacatactgcaatctctgaaaatcacctgttcccctgcagcccaagagccaagagacctgccggggggccctcatctccgaccaatgggtcctgacagcagctcattgcttccgcgatggcaacgaccactccctgtggagggtcaatgtgggtaaggcaggggatgcaccagcctcctgatcctgaagccacagatcctaccacctcacccagcctctggcccctgcaggagccctggtctagcctaatctagtgtatcatttccaggagaccccaaatcccagtggggcaaagaattccttattgagaaggcggtgatctccccagggtttgatgtctttgccaaaaagaaccagggaatcctggagttctatggtgatgacatagctctgctgaagctggcccagaaagtaaagatgtccacccatgccaggtgcctggagtctgggatgggagggtgccctgcagggaagagtgctctggagatccctggaagagatactggggacaggctggtgtgacccttgctcttctccccaggcccatctgccttccctgcacgatggaggccaatctggctctgcggagacctcaaggcagcacctgtagggaccatggtgagtgctgggacttatggtgcttgagagctggggccggggtttgggggtgataacaaggactaggctgcagtccccaagccaggaacctggattctgggtaaaaggaccagcaccaacatccccttctcttgactatagagaatgaactgctgaacaaacagagtgttcctgctcattttgtcgccttgaatgggagcaaactgaacattaaccttaagatgggagtggaggtgagggtctcaggttggggatgctgggatccccctgtgacagctcccagaatgtctctcttccttctccaggtctggctgctttctctctctgacgcgggtcacccctcctcccaagcctcacaaacctgctaggtgtccctgggtctgcttattctttttttgttgttattgagatggagtcttgctctgtctcccaggctggagtgcagtggcacgacctcagctcactgcaacttctgcctcctgggttcaagcgattctcctacttcagcctcccgagtagctgagattacaggtgcccaccaccacaccagctaatttttgtatttttagtagagacgggatttcgccatgttggccaggatggtcttgaactcctgacctcaagtgatctgcctgcctcaacctcccaaagtgctgagattacaggcgtgagccactgcacccacccgggtctgcttattctacccttctctctggttccacccctgctgcagtggacaagctgtgccgaggttgtctcccaagaaaaaaccatgttccccaacttgacagatgtcagggaggtggtgacagaccagttcctatgcagtgggacccaggaggatgagagtccctgcaagggtgagtccctcaccatgcctggattcccaaggggaaggccacctgtgtctctgtggccagcatgcatgccagaacaccagtccactgccctagatgacactgtctcctgtcaccctttgctggcaggagaatctgggggagcagttttccttgagcggagattcaggttttttcaggtgagaaggtagaagcttgcaggacccaggggttacaggatctcagccttgttggggggatgagggaggcctttgagggatctagggaggttggggcttacagttggggctgtggcagcctcccagccagttctctccttttctccaggtgggtctggtgagctggggtctttacaacccctgccttggctctgctgacaaaaactcccgcaaaagggcccctcgtagcaaggtcccgccgccacgagactttcacatcaatctcttccgcatgcagccctggctgaggcagcacctgggggatgtcctgaattttttacccctctagccatggccactgagccctctgctgccctgccagaatctgccgcccctccatcttctacctctgaatggccacccttagaccctgtgatccatcctctctcctagctgagtaaatccgggtctctaggatgccagaggcagcgcacacaagctgggaaatcctcagggctcctaccagcaggactgcctcgctgccccacctcccgctccttggcctgtccccagattccttccctggttgacttgactcatgcttgtttcactttcacatggaatttcccagttatgaaattaataaaaatcaatggtttccacatctctcagtgcctctatctggaggccaggtagggctggccttgggggagggggaggccagaatgactccaagagctacaggaaggcaggtcagagaccccactggacaaacagtggctggactctgcaccataacacacaatcaacaggggagtgagctggatccttatttctggtccctaagtgggtggtttgggcttactggggaggagctaaggccggagaggaggtactgaaggggagagtcctggacctttggcagcaaagggtgggacttctgcagtttctgtttccttgactggcagctcagcggggccctcccgcttggatgttccgggaaagtgatgtgggtaggacaggcggggcgagccgcaggtgccagaacacagattgtataaaaggctgggggctggtggggagcaggggaagggaatgtgaccaggtctaggtctggagtttcagcttggacactgagccaagcagacaagcaaagcaagccaggacacaccatcctgccccaggcccagcttctctcctgccttccaacgccatggggagcaatctcagcccccaactctgcctgatgccctttatcttgggcctcttgtctggaggtaagcgagggtaaccttcccttcctgctgtctccagcatccctccttggccttttggggccaggcttcatcagcctttctcttcaggtgtgaccaccactccatggtctttggcccggccccagggatcctgctctctggagggggtagagatcaaaggcggctccttccgacttctccaagagggccaggcactggagtacgtgtgtccttctggcttctacccgtaccctgtgcagacacgtacctgcagatctacggggtcctggagcaccctgaagactcaagaccaaaagactgtcaggaaggcagagtgcagaggtttgagggcaatgagtgtgggcagtggcctaaggcagaaacagggcaggcggcagcaaggtcaggactaggatgagactaggcagggtgacaaggtgggctgaccgggagtaggagcagttttagggtggcaggcggaaagggggcaagaaaaagcggagttaacccttactaagcatttaccctgggcttccaggcagccctggaagtcaagagaacactcagaaatggggagggagaagcagtggaaatccatatgggttgaggagtaggtaagatgctgcttctgcgggactgggaatgcgctgtttctcagtgacatggtctccgagaccaggagggatacacctaaggcagcctttccctcttgatgacttctacttgtccccccttctcaaagcaatccactgtccaagaccacacgacttcgagaacggggaatactggccccggtctccctactacaatgtgagtgatgagatctctttccactgctatgacggttacactctccggggctctgccaatcgcacctgccaagtgaatggccgatggagtgggcagacagcgatctgtgacaacggaggtgagaagcatcccctccccctacattgctgtctccctgacggcgcccagcccgaggagtgggcactcggctccggacactgtaactcttgctctctaccttgctcacggggcctcaggcttcagtgcttacctcgatgtctcatacctctgcagcggggtactgctccaacccgggcatccccattggcacaaggaaggtgggcagccagtaccgccttgaagacagcgtcacctaccactgcagccgggggcttaccctgcgtggctcccagcggcgaacgtgtcaggaaggtggctcttggagcgggacggagccttcctgccaaggtgacctttgacctgtacccccaggtcagatcctggtcttccatcctactgtcttctctccccacctcaaccctgctctttcctcactttgtttaaacctccctgtacaactatctcacttctgagccttttataccctggaaacccatgatcccccgtctctttggtcactgtatccctgacactcccagacatttgacctcatttctgactctcccagactccttcatgtacgacacccctcaagaggtggccgaagctttcctgtcttccctgacagagaccatagaaggagtcgatgctgaggatgggcacggcccaggtttgaagacagagaagggaggcagggcagggaactgggggaaaatggagaagggacagaactgttaatgctggagcctgagccactctcctggcacccaggggaacaacagaagcggaagatcgtcctggacccttcaggctccatgaacatctacctggtgctagatggatcagacagcattggggccagcaacttcacaggagccaaaaagtgtctagtcaacttaattgagaaggtggaatcctcctatccctgaactcgggggaatggaatctcgctgatcttccaggactagctccctgatcattccagcccctctgaacaacagggccccaggaaaatctccaggtcctattctgtcctccttcccttttacttgaagcagtttcttgactggtaattcctccatgaacctcagcccttgagcctcttactgagagcctccctgtcccagcaaagtcgctgaaatctcccaatcacagtattctattttcaatgccatggcgccttgttctcctcacccacaggtggcaagttatggtgtgaagccaagatatggtctagtgacatatgccacataccccaaaatttgggtcaaagtgtctgaagcagacagcagtaatgcagactgggtcacgaagcagctcaatgaaatcaattatgaaggtcagaggttagggaatggtgggaggttcactttggggtcaggaggttcagggtggagggggtcatgagactaccttgagggcgacagggaggaccactttgtagtcaaaagttgaacagcaggatcgttgggcaatggaggttagtgggaacctgttgggggctggaagggccactttgtggtcaaagggaagtccgtgtaatgatgattaacttaaaaagttgaaagatgtgggatttcagttgcagattggtctctggggttaaaagatggcttggaagaccaggtgaggtgatggtctcttccctctccacagaccacaagttgaagtcagggactaacaccaagaaggccctccaggcagtgtacagcatgatgagctggccagatgacgtccctcctgaaggctggaaccgcacccgccatgtcatcatcctcatgactgatggtcagaagggacctctctcctgtcccagcctccccaccttctcagaccagcatgtggcccttaagtccacttgtaacactatacccatggttggggccctgaatgtgactcatagctggctgttcatctctcctgtgacccttcataaggaattcttcctaagccctgtgatcaactatctctaacccttcctcaacttgctcaccctgccatgtgtatccctgcctttagccagtttatcttccttatctcctaccctcatggtcctgtctcttctgcaggattgcacaacatgggcggggacccaattactgtcattgatgagatccgggacttgctatacattggcaaggatcgcaaaaacccaagggaggattatctgggtgagtaacctgcctaggacccagcaccccacttcctcagggcttggaccctcatccttcctttttatccctcagatgtctatgtgtttggggtcgggcctttggtgaaccaagtgaacatcaatgctttggcttccaagaaagacaatgagcaacatgtgttcaaagtcaaggatatggaaaacctggaagatgttttctaccaaatgatcggtagggagatacaagggaataaagaacacaactctcctcaggttcccctgaagtaattcattcttcctctacacctgaagctctagttgcctggaaagccttcttcattcctccttctctacctcagtgtcactattcttgtttcctggcactgttcacttaaccttagaatcacagagctctgagcacttcagagatctttctatagtcctacatttgacacgtggaaacagaagccaaaggaggtcaagggacagcaagttagcaacaagggtgggcttgaaaacagccaggcctctgacagcttgatcccaagttctttcccttttcagtccaccatagcagttttctcctaacacgaggaaacaaatacccgtggtctttccctttctccttttgggcctttgctccccatagactcctacccaaaaggctgctgccatttgggaatgaagtgttccgagttttcagcacattctccttctctgccagatgaaagccagtctctgagtctctgtggcatggtttgggaacacaggaagggtaccgattaccacaagcaaccatggcaggccaagatctcagtcattgtaagcacagaatcccagtagtggggacttgggggaggtgaggtcaaggtgaaatgggagtaggggaaggaaaaaatggccataagagatggtggtttgtgaaagttgagctttccctctctactgttgtgtccccagcgcccttcaaagggacacgagagctgtatgggggctgtggtgtctgagtactttgtgctgacagcagcacattgtttcactgtggatgacaaggaacactcaatcaaggtcagcgtaggtaaggatgcaactgaaggtcctgggctgcacctatgctctccaggcaacacctcccactttctacagatcctacactccacccatcctcaatgcagccccattccttgcaccccagaccagtcagggatgggggaagacgtgaagttaggaatgacacggggccagaggcaggaagctgcccacaaagaggtggtacctactctcctacttcaggaggggagaagcgggacctggagatagaagtagtcctatttcaccccaactacaacattaatgggaaaaaagaagcaggaattcctgaattttatgactatgacgttgccctgatcaagctcaagaataagctgaaatatggccagactatcaggtgagagcgtccagatccctgaggaaaggctgggaaaggctggaggactggggtgaggagcaggcctggtttgctgttctccttgtcctttataggcccatttgtctcccctgcaccgagggaacaactcgagctttgaggcttcctccaactaccacttgccagcaacaaagtaagacatacttggcaagaggataaggatgagatcccaagagacaagtggggcatgagagggaggtgcaataggaagagatgatgcctggcccagaacctagctctagaagggcttaggggacatctactgagtgacaaaggcaatggggagatgacagtggtgggagcagctgaagtgacgcagtctattcgtccagaggaagagctgctccctgcacaggatatcaaagctctgtttgtgtctgaggaggagaaaaagctgactcggaaggaggtctacatcaagaatggggataaggtgagaaacgggcatcctaaggaggcactctaggccccaatccttcctaagccacttctgttcattacttctccatgcttcccacctcccctacagaaaggcagctgtgagagagatgctcaatatgccccaggctatgacaaagtcaaggacatctcagaggtggtcacccctcggttcctttgtactggaggagtgagtccctatgctgaccccaatacttgcagaggtgagagaatgctctttggttgtgctacaagtgcccaaggcccaacagtccttttctctacagcttctcctctccttgcaggtgattctggcggccccttgatagttcacaagagaagtcgtttcattcaagtgagtcctccctttcctatctggggagatgccaagtggtcagcatgggccccaaagcaggaaagctcaatgcatgtggctagtaattcgaggtaggcagagcctgcctcaccttaggaccgcatgtcttgcctgcgtgtgtcaagaacgaggctgagctgggtccctagtctgattcctttaggtcagctaagacacaagcaggaacagccatgcttccaggattaggaattctactgaatgatccatggcaccccactgcctctgcaggttggtgtaatcagctggggagtagtggatgtctgcaaaaaccagaagcggcaaaagcaggtacctgctcacgcccgagactttcacatcaacctctttcaagtgctgccctggctgaaggagaaactccaagatgaggatttgggttttctataaggggtttcctgctggacaggggcgtgggattgaattaaaacagctgcgacaacacctgtgttccagatccttttggggcaagggagtggggaacaggcactggccatgttgttacactgagatcaaacctgacagccgtttttaaaggtttaaccccaatcccaagtgctgaaaaaccagaggctgagggagatgtgtaagcttccacctcagtgttttactgagaccagcattggggcatatgaggcacaaggaatccagctctgttccctagaagccatccacaaggttttccttgtagacgtcatcactgtagacaatctgggtcctcttgtcccggtggcaacccttagggctgttctggacagctagggagggaggagaggaacagttaaggtctaaaggagatcatagaacagaccctgaggctgactcctgaccacctcactcctggccactggcccctggaagcccagtttccacgctgccctctggtggccaggatggcctgtcttccttagctcctttgtgccaacccatggccaagaaaagtataagtggacattttgatgaatgttttgttcttagaaaaatcccaaatgtcattgttgagacacgtgaatgatattaacccactacttacagtcagtatgtcagaagctaaaaactagaaaacctctgtagcccttttttgacatgctggtcaattctagttcctttcttttgcctgaagggccactgtagctgagcccttctttctgctcactcctttcccaggaaaatctactttcagggaaaatggattattcacactaagaaatgctactagctccaccagaactcattcagggtgtagctttggccctcaccattctctctcaagcctctagctgtttcttccccttcctctttcctccctccaccagacatgttactctcttcaccccatccaatggttccatccccaccacccttgagctacagagaatctctctcacccactcccatcctgtgatctctgtgcctcaacactgctggctactccctctttctcaaagtgtgtgtccttttgcttcagtggcccaggcccctgcggtgctgctcccagccctccgacccctcctcctgtctcctttgctaacgttaggctcaacgttagcctaacatgtcaggacagctggggacatgtggggtgtgaggtgaacagtcctgtttcctaacatagtcccagagtactcctcaaactgagtcctgggtcgtttttttttctctgaaatcagagtctccctgatgatcctattgtttggcagccaccctgtgatgtggatgacttaatctatgttttccttccttacctcacacctgagttccagatccctgatttcgaatacttatgaaactcactctactccatctcaaaatgaacaagccccatgagacactcatcttcctcaccaatctcactccagctcccactttcttccctgttccagtcactgctttggaagctgttttcaatccttttctctcctttctttacctctaactgacagaggatctgaaattttccttcccattcccatagcctccgcacacactctgacctcgatcatctctaggaaacccaaggatgtgtgggggaaccaaaaggaatggcctgtgggggagaggatgggaaaggaagaatcccattcttaccgagggagccccagacagacttgccagtagcggcatccagcatgggctgttttcgggctatgttgactttgagctgtacagactccacctgggtcccgttgagctgaagcagaagaggggaggcagaggatggggaggaaaacattacagataaaccaaagaagttattccaggagttgctatcctaggaggagactgaataaggaatctgagaatgtgagtttttctgtgtgaatagggagaggctttctttatcaagaggaaccaacttcttcctggcatctagtattttgaggagaacacatgagaacagcagaagcgatgggaagaacagatttgggaagttccaacctcagcaacggcctgatctgctgactccatcttttcataggtgacgaaggcacagctgggataagagaaaacacggtcagtggagagccaaggggctcttctggacccaaccaaacccagtgataataggcggctgcagggagggcagcttcttccctcaggtctcacaccccaggattctcccaggacttctcatcatgccctgttgtcatccttactttctgggtgggtccatggagaggtcaatgatgtttccaaaaggagagaaggccccacggagaagggtgggtgtcatgtcttctccatatacatagagagtattccctttcctaggggctcgccgttcagggaatgaatccgaccctttgggagcacaaatcatagtcacaagacatagaccatgccacatttcacttagtaggacccacataaacctcagttaaggtcaccttgacctccagccaaaatcactcactgcggaaaggaccctctcggtctcggtctcgatcccgctcccgatccctgtcccgttcccggtctcgatctcgatcccgatcccgatccctgtcccgctctctgtctctgtctcgatcccggtctcgatcccgctcccgatctcggtctctgtcccggttcctctcatggctgcggtcccggctgcggcttcggggaggggaggctgaggagtgggcaccactgcgttcttcatagccccagtcaaagcttcgagggggaccatcaccagcccctgggccctctgcctcttctccatctggtcctagttctcgaagtcgatcactagaagacacaaagctggggagatgcagactgaagatcaaaggggggttttaccttctcccctcagaccctgtggagactcaatattccctctatagcccagctcctacagcccaaacctcccaaggactcaggcaatcaactccaccaaatgggcccagccttatctctactctctaacctctcatacagagatttcctctggggacgtctggatgactgtaaaagagaccaagaacagttaagatgatttccagttgctgacatgtggtccaaaatatatttgtctctcatattcctccatccccaacccctcagggacagaaattaggagcctttacctcttgcaggtcatcatcagcagatatgctcctctggaacggctggaaagtggggactggtcccttctcggggtcctggagtggtgagagacctacctcagtgtggagcaggaggttgcccaaccatggaccagaggtgttcctcttccctcaccctcttctaggtttcctctgatcttttcttcccttttaattctacatacatttcttatttgacgtggttttacttattttttttttttttttttgagacacggtcctgctctgttgtccaggctggagtgcaatagagcaatcgtagcttgctgcagccttgacctcccatgctcaagcaatcctcctacctcagcctccctagtagctgggactagagatgtgctctaccatgcttggctaatttctgtatttttttttttttttgtagagatagggtttcactatgttgccagggctggtctcaaactcctgggctcaagcaatcctcctacctcggcctcctaaagtgctgaaattaaccaggaatgagccattgccgcacctgccattgtggcttgttttgttttgtttttgagacagaatcttgctctgtcgtccaggctggagtgcagtggtgtgatctccactcactgcaacctctgcctcctgggttcaagtgattctctggcctcagcctcctcagtaactgggactataagtgtgcaccaccacattctgctaattttttttttttttgagacggagtctcgctgtcacccaggctggagtgcagtggcacaatctcgactcactgcaagctccgcctcctgggttcaagcaattctcctgcctcagcctcccaagtagctgggactacaggcgcccgccaccacgcccggctaatttttgtatttttagtagagatggggtttcaccttgttagccaggatggtctcgatctcctgacctcgtgatccgcctgcctcggcctcccaaagtgctgggattacaggtgtgagccaccgcgcccggcctcacaccctgctgatttttgtatttttagtagagacggggttttaccatgttggccaggttggtcttaaactcctaatctcaagtgatctgcccacctcagcctcccaaagtgctgggattacaggcatgagccaccacgcccagctggtattttttataagtgactcgatatattatgtattcagtttatttgaacctctcttgaacctgataacattttcagccctttccatcccttagggcaacatattccaagagctccaatccaaggtggattagaaccacagaatttgtaaaatggagaattcaggagtcgtctagttttttcattttatacatgagaggtgaaactcagaatggtacagcaatttgccagtgcttgagtatgcatatttttccccaaacccatctacattccaacttggagggatgccctttaaacaatctttctgcttgtgctcacctttaacttcccctcaagggttcgagaacgcttgaagcctgagttcttggtctcagccttgatggcactgatggctcctgacttcaccagctgctttgcctgctctgttgctgtggctgtgtccatgacaggctgctctgatagtgctggagagacaaggggaagaggcattatgttggccaagccatgatgaaggtcagctccatgctgcccacttccagtccatccccatttcccctgtcactcacagcgtttgacaccaccttggctggttgtgctgctgctactttgcttcttcagagccagcaatgcctttttctgggaacaagggtgagaagagagaggtaagtgagggccagcccctagccggttcctctcctaaggcccctgggcacatcactccagggaccgtctttcttgatgccctcagagtggtacactgatgtgctctgcctcttgcctctggtcccctagatcatgtatgatgctggaaattcctaatctaaccaaaccacggaacccagaggttttccagagtgttacatttttgaagttgaagacaaataactcaatcatggactagaatcctaggatataagctgcaagtaagtataagtttatgtgcctttcctggaagcttcatccatctatttcctgcatattgaatgaggcccagccatgacttcgtaacagggatatccaggaggctaatgcattgttcctaccctcaagaagcttacagtctgagaaataaaatacattgagttagcaatacaattataagaggtgcagattattcatagctgaaagctagtaagattttctgatgtttaatggctattaaactaggccctctcccgtatctctgcacaacacagagaggagaagggtattttagaaaaagaaaacagggtggcaaagatgcagagataagaaggctttgggaatgcatcttttggaagtagtgaatagttctactttactagacaaggctgccaaactaaggttttgaggcttttttatagacaatgtgaagccatttatggtttttgagaaacagagggagcagaattttgtgttttcaatggatcatttgaacaggagtgaagaagtctgttcaaaaaaaaagactgagaaatttgttgagagaccattacaatggcccacatgaatgtcaataaagccctgctcgggggaatgcacagtgaagaataaacaggaaaaattacttcaaaagaagaaacaataagacttggcaaaggtttgactatgcaaatagtggggaagtcagagttttgagtccaaacatgtggcagaattggtgtagtcaatcttatttggaagatcaagaatagaaagatgatagcttcaacactgagtatctgaagtttttcagtataacactggatagaactggaaaaaacaaacttggggatcatcagctcttaagcggtactaaaagccatgggaaaggaagacaatccatggcaaattgcatagaaaagacagaaggtccacaccaaggcttgggaaagcccacctctcgaagctacactgtgaggtgatatgtctctaggtatgggccagaaaaacttccccattcgctcacactcaccccatatcttctcagagtgcagagtctgtgaaaggttaggccatgtccacacacagtccctcacctttttcttgagcttgttgaatttcttctgcagagcctcctcttcctcgctcagtccggggggtatcaccaacatggtggctcctagttcaggggcagggcccaagacatctttctccactgttaccacccggggttcacacgccgtccacactgtacccaaccccaccccttcaggtctgcctactcttgtctttggctttccctaccccttgcttaaaccaggctgctgtccaagctcccgctggtcgggatcatccagcattccctcctgtctccagggatcacagacaccagcacctttaggtaccatgtggttcaaggagggacaaatatccactccgtcggaaagacgatggcacccgacccccctaccctcgctagggtaaggacaaccgcggggtttgaacggcagagaaggcggtggagccagcgtagcgcccgcagagcaacgcaaagaggaagaacagagaaacggctatgagaaaaagggccgaagagtgagaagcagagggccttacccgagggggcggcaaccgggggccccacggtctccggccgcgcccgcgctggccgctgatagcgggctcacaacgatgacgtagcgaggagcggaaaacgcggtaaccaaggcggccccaggcgcgcacttccgcccggccttccaccggtccaggtctgcccctccgcagcgatagttcacgctctcggcggggctgtaccggaagttgcctctacttccgcccgttccggggcggggcttacttcgcagcgactacttgccgcacttccgggctgccaggcagctgctgtggctccaggatgatggagacagagcgacttggtgagggggaggggagggaaatggaacggagtagccgatatggaatgaactttgacccctgacttttgacctttccccgtagtgctaccccctccagatcccctggacctaccccttcgggccgtggagctcggatgcacggggcactgggagctgctgaacttgcctggagctccagagagtagcgtgagtgacttttgaccctaacctttgacccgcattgagtccaaacctccttcaccctcctcacagtaggatctagcttaaccttgttcatctgtgcctgtactcctgtccatcccagcctgaaggggtgctggacagattacagcccagtgtacctgcagtacatgtgaggacagagcagaaagggctggggatatttttgctttgagagctgctctttcaaatgtggcatttctccgtggagctcccttctgtatccaagcaccagggcacttggtgactgagatgataggctttgagcctccaacctttcatccttaggtctgggacccctttttctaaaatcagtgagtctccaatttcagtgtgcttcatgattagccagggagctttttaaaaatgcacattcctaggtccagcctccatgtttctgaaatccaaaatctgccccaggtaattcagtagcaggtagtttttggccaagcctgattgtcctagtctgtttgacacatctgccatttctgatctgaacacaagtcccatcatctcttttgtctgcattttatcctctttccttacctaatgcctctcatcttgcccttgtttcagcttccccatggcctccctccttgtgccccagatctgcagcaagaagcagaacagttgtttctgtcatccccagcctggctgcctctgcatggtgtggagcactcagcccggtgaggagtctggaggggcttagactagggtgatgggttcctgaaggaagctgggacagaggaagaaagaagacccaaaagttactatttttctctccagaaaatggcagaggaagacggatccctggtctcttttggctgtcctgggagccccagtcccatccgacctacaggcccaaagacacccaaccacaggccagatactgggttacaaagaggtaggaggtcaggggtcatgagaaacagttggggagaaggggaggtggtcagagacaagctcagcctcattggggctctgatctcttgccttaggtcttgctggagaacacaaatctctcggctacaacctccttgtctcttcgccggcctccagggccagcctcccagtccttatggggaaatccaactcagtatcccttctggccaggtgactcttgtggagatgggatggtagaagagggtgtctttaatctccagggaagggttccccacctatctcgtattaccctcatcccatgaatccctgtctgtcctgtctcttcccaggggggatggatgaacccaccataacagatctgaacacacgggaggaggctgaggaggagatagactttgagaaaggtaaggtggggctctgagtctgagccttgaggaggaagagcccaggctatcactgggctactgctagccctcccatgtttttgagaaaattagaaaaagatattctgtccataacaacctttactgtcatctgctgggaaatttctacaacaacctttactgtcatctgttgggaaagtgtcatagcaaacatccctatctacagcatctgtcctgtaaatggtatcttttaggtttatataatgtacacaatttgttcaccagtgtgcagtgacctgatttcatgtccctatcctacagatcttcttactattccacctggtttcaagaaaggcatggactttgcaccaaaaggttagttttagtttttgagtggggtgtaggagaagtcatgtccttctcctaaggaacagagatggacatgacaaggttgaccttgttggcttgctcctcagattgtccaactccagctcctggactactaagccttagctgtatgttggagcctctggatttgggtgggggtgacgaggatgagaatgaggcagtgggacagccaggaggtcccagaggggacactgtttcagcctctccctgcagtgctcccctggcccgagcaagcagcttggaagacctagtgttgaaggttggtggttctgtgtagtggaggcaagaaagagccttgccaccaggatgtgggctggctaggatgggtctgaggggaagaaagggacatcttttgggaggagtgctaattgagagccctctggttgtatctttatcactgctacccctgactcttccaggaagcgtccacagctgtatccaccccagaggccccagagcctccatctcaggagcagtgggccatccctgtggacgccacctcccctgttggtgatttctatcgcctcattccccagccagccttccaggtactttggccccatcttcacacgctcctctacctctttctgggtcacactcccagccgaccccttgtctcctctattggccagaggtcagatccatcccaggccagtcttggtactcagtcccagcctcggctggctccggccttcatccgcccgccctgcgtgctccatgagcaggaggcagcaaggccccgctcctttcttcagctcctgtctatttctctctcccatagtgggcatttgagccagatgtgtttcagaaacaggccatcctgcacttggaacggcatgactctgtctttgtcgcagctcacacatctgcaggaaaaacagttgtggctgaatatgccattgccctggcccagaaacacatgacacggtatgagttcctttgccaacctcccccttcaccagccagccccattttctcctgcatcctttgaaaatctcatctcttcccccacctctctagctcatcctttaagtgagaggttcagggctaagactgagacaagagcccagagagaaatgaaaagacatggtggggagaaagtttagaagaatgacctgggttagtttaggaaggggttggggacagaatttttctggggttatatcatgcaggagaatgtaagggcagtttgggtgaagaagaggagcacctgagcttctggggcatgcttccacgagggctccatgtgggagaggaagtgcgggccatgagtctgcggagggactggctaacttcatgctctcttcccagcaccatctacacttcgcccatcaaggccctgagcaaccagaagttccgggacttccgaaacacattcggggatgtggggctgctcaccggggatgtacagctgcatccggaggcctcctgcctcatcatgaccacagagatccttcggtgagagatggacactcaatacaggggagttttggctgggaagatgtggccgttgtggagagtgtgctgtctgaggagggggtggagacgagccactggggagtcaatccttggcctcttctccccagctccatgctgtacagtggctcagatgttattcgggacctggagtgggtcatctttgatgaggttcactatatcaacgatgtcgaggtaagggccatgggctccccagaacccggcagtcctctcctttgggaccagttgagcgtctcccttattccacacactcagggccccttactgctttctttacccccatatggaatcctgtgcctctttatgggcagaagggcggcccctgccctcatgtgacctcccttccctctctgtgcccagcgtggggtcgtgtgggaggaggtgcttatcatgctacctgaccacgtttctatcatccttctgagtgccaccgtccccaacgcccttgagtttgctgactggattgggtgagacgtgtgtcccgggttgcctgggtgaagggggctacagtactccttgattcgggtgggggactaagtctaccacagcaaggagagcggtcaggccttaggggtgatgctggggaacatgtcccacctggtggctgtgggatcccctttgggtccagattactttgcatgttgaaatgggatgagatgttgggggatagccttccattctgggtctcagaaaagactgggtaaagttggaggggtagggaagggggtggggatgtgggttccttcccacgttcccacccctgacctgcttccctctcctttcttcaggcggctgaagcgtcgtcagatctatgtgattagcactgtaacccgccccgtgcccctggagcactatcttttcacagggaacagctccaagacccagggggagctctttttgttgctggactcccgaggagccttccatacaaaagggtaagcctcgagatgggggaaagagttagggctgggcccccagctggacattgtggctacccctccctgtgccccaggtactatgcagctgtggaggccaagaaggagagaatgagcaaacacgcccagacctttggggccaagcagcccacacatcaggggggccctgcacaggtgagaactgggagggttttgtacctgccagcacctgtttttcctcctatcttttttttccccttgtcccccaggggttttgacttgagctttgagcactgccccagttaacactagctcacctctcattggttcaggaactcaacctctgctccttccccttccccttccttctccaggaccgcggagtgtacctgtccctcctggcctccctccgcacacgtgcccagttgcccgtggtggtgttcaccttctcccggggccgctgtgatgagcaggcctcaggcctcacctcccttgacctcaccaccagttcggagaagagcgagatccacctcttcctgcagcgctgccttgctcgcctccgtggctctgaccgccagctgccccaggtgcgtctgtgtgcgtctgtgtgcgtgcatgcacacatttggcagactggtggggatagggtgttccgagactccatccctgaccatgggcctcctcccaccaaaggtcctgcacatgtcagagctcctgaatcgcggcctgggtgtgcaccatagcggcatcctgcccatcctcaaggagatcgtggagatgctcttcagccgtggcctggtcaaggtgcatgtggtggtggaaagggactcctcagggtgcttgttgcccacttaggggctgcccagagggcagaggggcagaggtttaggcaggccagtgctgtggttaagaatctgggctctggattcagactacctgggtttgaatcccaggtacaccatgtattcacagtatcatcctggaccaattatttaaccttcctgaactttaggtttcccatcttaaaatggggatgcataagatatgaatacgtaggtctcagaaaagaaacccaggaagctagcaagcattcgaaaagttattagtaatcagaaatatacaaattgaagtactcacaagatacgactttacagctattagactggtaaaatttaggaaactagttcatgccgagtgttgccagagatataggaggttgtagggttctgggaatcctttacgggatgcctagccagtttggaatgcacgctggcactatttagacaaaataactatattggccgggcatggtggctcacacctgtaatcccagcactttgggaggctgaggtgggtggatcacaaggtcaagagatcgagaccatcctggccaacatggtgaaaccctgtctctactaaaaatacaaaaattagctgggcatggtggcaggtgcctgtagtcccagctacttgggaggctgaggcaggagaattgcttgaacccaggaggcagagattgcagtgagccaagatagcaccgctgcactccagcctgggcaacagagggagactccatctcaaaacaaaaacaaacaaagaaacaaacaaaaactatatcatactctgagcttatatttcattcctgggtatatatcacaaagaaattctcaccctggtctgtgagagaacatgtacacccatcctttgtttgtggtggcatggtgttggtagtaccagggtgcccttcactgggagagagggaaggttagtgtgggggatgcacccatagagtgttctgcagcagttggaagcagtgggttagatgtggccacaggaacatggacagatgttgaaacactaggtggagaaaaagaagcaaaaaaaaatcagatatataaccactttttatatgaattataaactacaagctcacaaaagaagacatgttctataagatcatatttatataaaaagatatttgttggatacattggaatgattgcagtcagggatgggaatgggatatgaaggtaaaagttaagaaatagaaataagtagctacataagtaaaatgaggaaaacaataatacctgccctatagatttgcctggagagttcagtgagatcccataagtaacaactgggatggtgccttatgcctacaaagtaaggtgggcttggccagggctgggggtgtgtgtatgtagagcctttgctgatcctttctgttctcctctgtcccaggtcttgtttgccacagagacctttgccatgggagtaaacatgcctgctcgtacagtagtgtttgactccatgcgcaaacacgatggctccaccttccgggacctgctccctggggagtatgtgcagatggcaggccgggcagggcggaggggcctggaccccacaggcaccgttatcctgctctgcaagggccgagtgcccgagatggcagacctgcaccgcatgatgatggtgagcgggccagcatgctcggcagggccccagctccaggaccttgctggattctgtcttcgattctcctctcttctttttcttcttccttttttttttggagacagggtcttgctctgttacctaggctggagtgcagtggcacaatctcgggtcaccgcaacctctgccttccaggctcaagggatcctcccacctcagcctcccaagtaggtgggattccaggcacatgccacacaggcctggctaattttttttttttttttatgctttgtagagatgaggttttgctatgttgcacaggttggtcttgaacttctgggctcaagcagtctgtctgcctcagcttcccaaagtactgggattataggtgtgggccacagcgcccaacttcctccgacttttttgttttgcctgggagaagctgaggtaggagtgagtgaatccaaggatgagattggagcccatctcttccagttttctcccatgtgaatatggagctagatggggcctttgagtccatttatttcagtttgctcccttatgttacagaagaggtgagcaagtggtttgtccaaggccccatggttgcagagctaggaccggatctgacgggagtaggcccagtccagaagactggctggggttcagtaggtcccaccctgatctcagtgacttctgtgacctgactccaggggaagccgtcccagctgcagtcccagttccgcctcacgtacactatgatcctcaacttgctgcgagtggatgccctcagggtggaggacatgatgaagaggagcttctctgagtttccctcccgcaaagacagcaaggtaaggagcctggggtaaccagtgtgtggagcaggaggttggccaaagacaggctgggaataggtaggcatccagaggccagtgtgttgagggtggggagtgtgacagattgggcctggagactcccctttcacagcttcccctgctcccacccaaggcccatgaacaggccctggctgaactgaccaagaggctgggagctttggaggagcctgacatgactggccaactggtcgacctgcctgaatattacagctggggggaggaactgacagagacccagcacatgatccaggtgagcaagtgtgagtgctgaggaggtgataggagaagggaagagaagatcgtgttactctaggtgctactaaacttagtccaagtgtctgtccctgtgatgcctcctcccatctgtcctttgctcttcagcgacgcatcatggagtctgtgaacgggctgaagtctctctcagcaggaagggtggtggttgtgaagaatcaggagcatcacaacgcattgggagtgatcctacaggtgagggtgatgggaatttggactccagagggtgggagggagcaagccctctctccattttccccacttggccagggcaggttgcgtcatcatagggccctcattttcccctcttgccctccttttcaccctctcccttcccatcaccacatcatgctcactccttcctcccaccaccccaagaagtctgctctgatcgcttgacttggttgcccctctctactggtgagctctgcatggttgcttcctgattcctgcccaagggtgggtatctggtctctgcctttgatgtctactcatcacacccccctctcctggcctctctgaccacccccaggtctcctcgaactccaccagcagagtattcacaaccctggtcttgtgtgataagcccttgtcccaggacccacaggacagggggccagccactgcagaggtgccctatccagatgacctcgtgggattcaagctgttcctgcctgaaggtgagagtgtggcagatgtctgttttctgccagcagtataagcaggatgcctgggtccatggcaatgtctgccctgctctccccttttcacagggccttgtgaccacaccgtggtcaagctccagccaggagatatggctgccatcaccaccaaggtgctccgggtgaatggggagaagatcttggaggacttcagcaagaggcagcagccaaaattcaagtcagagatgctagggaggcccttctcctccagaggggcacgtagaggcagggaggggcagtggtctgggagtttcctccagcctgagggagaccatgaagtggtggggttgtagtgagggggctcccccagcctaagggagactgtgaagtggaggttgtagtaagagggcttccacagcctgagggaggcttctgggggagagaagatcttaccccagatcttaagatctgctccctcttcaggaaggatcctccccttgcagccgtgaccactgctgtccaggaactgctgcgtctggctcaggcccacccagccggacctcccaccctcgaccctgtcaatgacctgcagctcaaagatatgtcagttgtagagggtgggctccgggcccggaagctggaggagctgatccagggggctcagtgtgtacacagcccccgttttcctgcccaggtaggaccctgggtggtaactcccaagctgggagtaggggcttttcctctgtggtcccctgtagactgaccgcccccatctcagcccttgtcctcagtgcacccctgctaaggggcaaggagaaggctgacgggtggctctctgcagtacctgaagctgcgggagcgaatgcagatacagaaggagatggagcggctgcgcttcctactgtcggatcagtcattgctgctgcttcctgagtaccatcagcgagtagaggtgggtggggcagtggttggggcaggggggctaggggacagcagtgtgtccaatgcccaccctttttcttgcaggtgctccgaaccctgggttatgtggacgaggcgggcactgtgaagctggcagggcgggtggcttgtgccatgagcagccatgagttgctcctcactgagctcatgtttgacaatgcactgagcaccctgcggcctgaggagattgctgccttgctctctggcctggtctgccagagccctggggacgctggggatcagctcccaaacaccctcaagcaggtaggggacaccacccctttctccctgccagggctgtggcattcctgaccttcaccttcaggtagtcccccaggtgaccccctccagccctgtaagtgccccaaggatggaaaatggctgccttcttgatctggtccttccctgtcctggagcaggaaggcaggccttaacctctccttctttcctgcagggaatagaacgtgtccgggctgtggccaagcggattggtgaggtccaggtggcttgtggcctgaaccagacggtggaggaatttgtgggggagctgaattttgggctggttgaggttgtatatgagtgggcccggggcatggtgagtacctgaggtttgggattttgcagacggctggctggggagaacctgcccaggctgagtgcatccagtcctcaccctactttccccacagcccttctccgagttggcagggctctcagggacccctgagggcctggtggtccgctgcattcagcgcctggctgagatgtgtcgctcactgcggggggcagcccgcctggtaggagagcctgtgctgggtgccaagatggagacagcggctaccttgctacggcgggacatcgtatttgcggccagcctctacacccagtgaatgccccatgtaaaaacatgatgataaaacagcaaagcactgttgtgtgcttgagttgctggacagggatgactcagctaagaagacagcgagagaacctcttagaaatatgcttttattatctgcacacagagatatgactgcctccctctaaagcattactatttgggagagggagtcttggggggtgatgggaggtcctgagtcatagcttccacataccatatgggcaggaaggcgtaaggtgcatcttggtgtacagacacggtgactgggccgccaggctcccaagagaagagatgaacgagcctggggggcagatggaggcatcagttgagggccagaggctggatcctgggatccagaggggagggacagagctgaatgcctcacctggggtcatcctggacaaccgtgctctgggcaaagctaaggaaggcggcacagaagttcatgcacacagagggattccagccgtcacggtcattctggagcaggcagaggaggaggcagaagatgggcagtgggggtggtgggaggagagaaggcaggctgttgccctggatgctagacctgtggtcttggtgtttggggatacgggtgggagctgcaacatcgttcccttaccctgacatattcaaacatcttcatggtaggaaaggtcttgagggaagagacaaaaccgtctgggttacggaagccagcaacaacattcgggacccctgggaggaatgactgagcccaccatttcaggagcttgtgtctgacaggaaaagcaagggatcagtgggacccctcgtgcaccctccattctgccttcaccctcctccccaagtccctttcccagccttcaagcctaagctctcgccctgcccaccccgatcctgaacctgtagaaactcctccattggccagggctgtgcatctccttggaggtcttgagctccacatagcaggttgggggctgtgtggatggggcttgggggtctgtgcagtctacctcccctgagaagagcagagggtggcttcccaggcggctgcgtagcacagagcagaaggccacgttggtgttaacctccccagaggggtctggggagcttccaggtttgtctgcacaaggagagaagcagcagcaggcgtggggggctctcaacctctgggaaggggaagggggctatgaagcaggggcaactcacctgcacacatgtactgctcaaatttgtatcccatgtacataagctcccggaggagcggtggccgagcaagcctctgggcccgagcgttcggtgtctccacttcactcaggtatagtgttccctggaaccgggaggctgccagctgccagccctcctgccgctcatacggtgtcgtcagcagttttgtcaggtgcccccgccacgtcactatggcctctgccagccagcctggacccctgagaggcaggagttacaggctgaaggtctgacacaagcattagtgagatgctcccctcgaagaatagtcttgtttcttctaaggactgattctcaccccggctttggctctcctaattttagagggtaggtacgggtctccagatatactgcctaccacgctttgctcacccctccaaccggcctcggtgttccaggagccagcacagcaggtggtccagcctttcctggacctcctcgtcccggggctggtatcgatccgggtatccgtctctgaggtcaaagttggggcctggaccgttagtggggggtgggctatagtagcgcagggctcgggcatctccatggtactggcgttgagcatccagggagaagcagcccagttccgaagggcgccggtagaaaggaaagggcccagagtagagggcagggtctgtgggcagagaaggtgctggacgaggtagtttgttccgaggctcagctacctctgtcttctcagctcctctcttggtccccctgggatccatgaggtcctaagacaagcaggggtacagagtttccattctacagaggaggcctggagaaggatgactggtttaggactaagcgagccacctgatcgccaggctctggccttgaaacattcaggcccctcagacgccaccgcggccaagctctcatcctgcctctttccttgcccttcacccaccctccctccaggtcctccaaatgcagtgaggttaggaaggacgtctgcgctcagatcaagaatccagttacctcaaagctccccaacttccacctccgcagagctatgacgtcatggcaggcacgccagaggccgaaggatgcaaaagtggttttctgctttcgatgatgcaatcattcagcgacagtggcgggcaaacccctcccggggcgggggaggtgtgagcttcacgaaggaggttgacaccaacgtggccaccggcgcccctccacgccgccaacgagtccccgggcgtgcgtgcccttggagggagccaatccgcggccggcgtggggcccggcctggcggaggtgatgctggtatgtgcgtcgccaccgcccctcccagcactgacgggcctgagggacgacaagttgacgctcctttcgtcatcacctggtctaggagggacgcccggggagaccgtacgtcactgctctgcgccggaagaccctattttcaggttctcttccctccattcctaccccttccccggtaccataaaatcccgggatatgagctggaagaggcatcacctgatcccggagacctttggagttaagaggcggcggaagcgagggcctgtggagtcggatcctcttcggggtgagccaggtaaccatggcaaccccgggggtggggcctcgcttccggtagccgagagttttgttagaaccgcgtccccgccccagttccctgtccgtgagccgatttatctgcccagggtcggcgcgcgcggctgtctcagaactcatgcagctgttcccgcgaggcctgtttgaggacgcgctgccgcccatcgtgctgaggagccaggtgtacagccttgtgcctgacaggaccgtggccgaccggcagctggtgaggggcgtcggtgcgaccgccggaagcccctttcctaactcctggaattccctgtcactcagtcactccgccagccgttcagcaagcattaggcctttcaggcgagggcactgtgccaggcactggggtgccacagagaccctgttaaaagtcccgcaggtagtacagggcatttcaaatcatggaggtagaagaacgaggcttttggggaaaccgagtcatggggcatggttcgaacatacagcgctgggagtgcagtcagacgtcagatcatgacaggccttgtacatcagtgttgtttccatcttacactgaggcgatgggctggtagagaatatcatagagagagggaatggtgtattggagatagtggatgaggcagggaggtcagctaagaagatactgcatctgagaagtggtgaaggcctaaattaggtcagtgcagtagggagggagaggagagtgaggaagagggaggagtccaggacaactcagactttccagatgactgcgtggctggtggtattaggagcacatttagttgttggactacagataatgtgtttaattttatacaagttgagttgatggtgcatgtggagcatccaaagacaaaggtattagacagttggatatgagagttggagagaattctgggccagtgataatagaattacaagtcatggaggtgtgaatagcaagtggttaattctgtgatgtggtgagatccagtaggaagagtgggtagaggagtgatttctaacctttttgtaatctttagaaggtgataaaagctatggctatctctctccagaaaaatgcacgtttgccacatatacatagggtgtatgtatagttaggggggaaatattttactaatcctgcgaggtccgtggttaaggactccaggtttagagtggaagttaatagggtcaaatccacaatgctgggaaacaccatcatttaaggcagtgttactgaatatatgagctgagttattatgcctgtgtcaaaattacgtgggctgcttgttaaaaaaaatacaggttcctgggactcatccaaggttaatgaattacgctctcttggggcgggatttgggactctacatttttgaactgcctcaagtgctttttaagtgtgccttaaaatttgagatccactgacataaagggaaagcagaagaagaggaatctgtgacagaggcagagagggacttgcctgagttaagaggaacccagaggccggcgcggtggctcacacctgtaatcccagcactttgggaggccgaggtgggtggatctcttgagctcatgagtttgataccagcatgggcaacatgacataaccccatctctacaaaaaatacaaaaattagccaggcgtggtggtacgcgcctatagagctactggggaggctgaggtgggaggattgcttgagctggggaggcggaggttgcagtgagctgagatagcaccgctgcaccccaccctgggtgatagagctagactttgtctcaaaaaaaaaaaaaaaaaaagtaacccaggaagaggcctactgtgaaagtaaagagatttttgagaaagtgaagtagttggcagtattagaacctgtgattcaagacagtggtctaagaagagggaagaggtaaagtaaaatataaactgaaatctaggctgagtgtggtggctcatgcctgtactcccaccactttgggagactgaggcaggagtatagcttgaaaccaaaagtttgagaccagcctgggcaacaaagtgagaccccatctttactaaataactgagatcccatctctactaaataaataaattaaaacacaaaaattcttagctgggcatggtggtgtgcacctattgttctagctgtttgggaagttgaggcagaaggagtgcttgagcccaggaatttgaggctgcagtgagctatgattgcacgactgcactccaggctgggtaacagagggagaccctgtctctaaaaaaatgaaaacaacaacaaaaaaacccagaactgaaatctgtccattggatttagcaggtagaaggttaatagtgatctttcaagaaaagaggaaagaaaaggaaggcagtctagcactcacttgaggtgagctagtctccctgactaggtctcccgtgaggaagcatgccagatggaaccactccttaaggagtatttgttgattttaatgtattggtgttagcttttgtttttaaaaacctttaaaagttgcagaatgaaaatataaacatatataatttaaatgatgtttataaagcagatacctatctagccactccctaggtcaaactatagaatatgaccagtatcccacatatatccctctctgatcaaaatgtctctgatcagaatgtccctgggaggtgactgctgtggtcattgttgccttagttttcccttttttttttttttttttgaggtggagtgtcgctctgttgcccaggctggagtgcagtggtgtgatctcaactcactgcaacctctgcctcctgggttcaagcaattctcctgcctcactgtcctgattagctgagactacaggcacgcgccaccatgcccagctaattttggtatttttagtagagatgggggtttcatcatgttggccataatggtcttgatctcctgacctcgtgatctgccctcctcggcctcccaaagtgctgggattacaggcatgatccaccgcacccggcctaattttgtatttttatagggatggggtttcaccctgttggccaggctggtctcaaactcctgactcagatgatctgcctgcctcggcctcccaaagtgctgttttttttttttttaattgtctttttgataattccactatttttttttttttttgaaaagtctcccatgtctacctctttccacacagacacggcaaccatccgatttctcaatcttttccccaccttttcccgctttctagtccacaaaaccaccattgtcatcgtggcccgttctcaatgagctgttgggcacacctcccagatggggtggtggccgggcagaggggctcctcacttcccagcaggggcggccgggcagaggcgcccctcacctcccggacagggcggctggccgggcggggggctgacccccccacctccctcccggacggggcggctggccgggcagaggggctcctcacttcccagtaggggcggccgggcagaggcgcccctcacctcccggacgaggcggctggccgggcggggggggctgaccccaccacctccctcccagacggggcggctggccgggtggggggctgaccccccacctccctcccggacggggcggctggctgcgtggggggctgacccccccacctccctcccggacagggcggctggccgggcagaggggctcctcacttcccagtaggggtggctgggcaggggcgcccctcacctcccggacggggtggctggccgggcagggggctgacccccccacctccctcctggagggggcggctgccgggcggagatgctcctcacttctcagacggggcggctgccgggcggagggtctcctcccttctcagacggggaggctgggcagagaccctcctcacctcccagacggggtcgcggccgggcagaggcgctcctcacatcccagacggggcggcggggcaaaggcgctccccacatctcagacgatgagcggccgggcagagacgctcctcacttcctagatgggatggcggccgggcagagacactcctcactttccagactgggcagccaggcagaggggctcctcacatcccagacgatgggcggccaggcagagacgcccctcacttcccagacggggtggcggccgggcagaggctgcactctgggcactttgggaggccaaggcaggcggctgggaggtggaggttgtagcaagccgagatcccgccactgcactccagcctgggcaccattgagcactgagtgaaccagacaccgtctgcaatcgcggcacctccggaggccgaggctggcggatcactcgcggttaggagctggagaccagcccggccaacacagcgaaaccccgtctccactaacaaaatacgaaaaccagtcaggcgtggcggcgcgcgcctgcaatcgcaggcactcggcaggctgaggcaggagagtcaggcagggaggttgcagtgagctgagatggcagcagtacagtccagcttcggctcggcatcagagggagaccgtggaaaggataattccactattacttgtcttttggggtttgtttttattctctctttgagttttgtttccttatgcgcccagttacttttgaaaatgttctgggcagatttgcctagattaataaatgccctccatgttccaattacttttttttttttgagacagtgtcttaccctgtcaccaagctggagtgcagtggtatgatcttggctcactgcaacctctgcctcctgagttcaagtgattctcctgcctcagcctcccaagtagctggcattacaggcacctgacaccacgcccagctaattttttttttttttttttttttgagacggagtctcgctctgtcacccaggctggagttcagtggcatgatcttggcttactgcaagctctgcctcctgggttcacccattctcccgcctcagcctcccgagtagctgggactacaggtgcccgccactatgcctggctaattgtttttttttttgtatttttagtagagatggggtttcaccgtgttagccaggatggtcttgatctccggacctcgtgatccacccgtctcagcctgccaaagtgctgggattacaggcatgagccaccgcatctggcctatttttgtatttttaatggagaccgggtttcatcatgttggccaggctggtcttgaacttgaacttctgacctcaagtgatccacccttagcgtcccaaagtgctgggattacaggcatgagccaccgtgcccggccccagttatttttatttttattttttgagttagagtctcactctgtcacccaggctggagcgcagtggcatgatctcggctcacagcaactttctgggttcaagcagttctcctgtgtcagcctcctgagtagctgggactacaggcacacatcaccacgcccggctaatttttgtagttttagtagagacggggttttaccatattggtcaggctgatattgaactcctgacctcaggtgatccacccacgtcagcctcccaaagtgccgggattacaggcttgagccatctcgcccggcctacttagatgttatattagtggtaattcctgttatcctgtgagctctttagtgtctaaacaattttttttaagagatggggtctcactgtgttgcccagttgcaatcatatcttactgcagcctcaaactcctgggtcaagtgatcctcttgccttagtctcccaagtagctaggaccataggtgtctgcccccacgcctggctgtttttacattttttgtagagatgtggcgggtgggggggtctcactgtgttgcccagactggtctcgaactcctgtcctcaattgatcctgctacctcagcctcccaaaatgctgaattacaggcatgagccactgtacctggtcttaaacaattttaaaataacatttttatccaggattttagttaattttcaacaggtggattagttcttgctgtattctcgtaaacagaagtcctggtttatttttatttgttttaaacattgaatcccatactcctccccaccttaccctacccagaatttagactgttaatgttttgaagccacagcctgcatcttaatcactattttatcttagtgcctggtcttagaaattatattgactctttgatagaccatatataaggcaggtggatgagaatgtgggtagctagttggaaaaggctgcttggtcatttgcttgattattttctcacacagtttttcctttactaagagaaaatgcccccatattggcaaacaaaatctccctgcctgagagcgcccagagtatagcagagcatcttaccctgatacgcctcttttcactctcttctctgtggagacagaaggagcttcaagagcagggggagatcagaatcgtccagctgggcttcgacttggatgcccatggaattatcttcactgaggactacaggaccagagtatgtgactgtgtgcgtcaggggtgctggggggagggcacaggttgggggagacagggaacttgggaaacagaaataaaaacaaaagaaagaatttccctgcccccacatcccatggagagggcacagggccctggtaaatagtaatatgagggagagagacaggagggaaagagggaggagtgagagggtaaagagggggggagaggagggggaggaggaggaaggaaggagggggaggaggagggggggaggaagagggggaggaggatgaagaggaggaggaagaagaagggtatgagaggtggaaggatctgagcaagaggtaagacaggaagagaaatgctgtcctgggggtggaggttggtagagagtgagggtggggatggaccatgtctctcatctctgcttgtaggtcctcaaggcctgtgatggccgaccgtatgctggggcagtgcagaaatttctagcttcagtacttccagcctgtggggaccttagtttccagcaggaccaaatgacacagacctttggcttcagggactcagaaatcacgtgagacttgtggaaccaaccaaagtcaggcatctggtgcttccctgcctccctccagttccatccagcctgtcctcctgtttttttggtgaacctgccagaaaagctgccaaaaagctgactcttcttgttaataaaatgacccaagtttgtattcctccccacaagagaggaggcctatcttacctgggccttagaaagagccctgaaatagaattcagttcttggtggcttatcaaaagcacacaggggcctggcaggaagtgtaaaagcttgatgttaatcatactgggactaagaggatagagaatggtaggagctgggatacccctaaacattcacattaaaacaaaaaaaacccaaagctaaaaaacaactgggcaggagctaaataaaaatctaattttgagaggctgtatctggctcaggcctcctactttgtaacccatggaatatgtgaaagcatttgaaaaactatagcactgatctcacatgggcagacacactctcagagagatgtggtgggagccatggcgcagtctgcctaggcagtggcaggagcgcagaagactctgattcctctcctcggtcctaagaccgaatgtgtgtcaggacatgtggtcagggaagagaagctatttaactgaaccagtaatagtagcaggaaaagaaaaagtggagggagggcagtccaggtagggggcctggaacaagcaactgcaccaacagaggcagttggtgcgagcacagaaccaccccaggctgggattttgttatccagtctctcttgcatggttgcccgtgtttctggagacttgtgtaaacattaatggatgaggaggagagatggttctcagagcccagccctcatctctgctggcttcccactgccctcaggcatctggtgaatgctggagtcctcaccgtccgagatgctgggagctggtggctagctgtgcctggagctgggagattcatcaagtactttgttaaaggtatcccatctgcagctcaagcctgcagcccctcaccttttggtggctcctcaggcctctaggccttattcacctttcccctttcctgtgccacttctcctctagggcgccaggctgtccttagcatggtccggaaggcaaagtaccgggaactgctcctatcagagctcctgggccggcgggcgcctgtcgtggtgcggcttggcctcacctaccatgtgcacgacctcattggggcccagctagtggactggtgagtctttccctggcctctggcagattatggagcaatgacccaaagtgggatttcctcccagctcatgcttagtttcctagtgaaggccagtggctctcattcttctctggaacccgggagcaccccttcccaagttctaagttctcctcacagcttgagcctaggcgtctggctccagccttgtctttctcctgcacagcatctctaccacttcaggaaccctcctccgcctgccagagacatgaagattctgctcatcattgctcagctcctcagagtgggccgggaggggactagaagagctgcatgatggtggctgagacagggtcaccttgggaaggcttgggagccaggatgagtgtcgggctctcgtgtgtgcaaaaggtcagatgtgactgctgctgtttgcctggtttctgacccagtggtggggtttgagcaatgcttctctgcccttccatggaaagtggaaccagaaatggtgccaaggctgtggctgttccctttcgtgtaaaatggtgctgttattactctgtcttgaaataggaaggtgggatttctggggaggctggtgaaggagggcagggttcttttctctacgtgtcatgttaaaattgccaaataaagtacctctgcctgtgatattttctggatgtcctttatttactgtgacgtgtgtttgggtgccttgtttaggggtagaggtgaagtctgagctttgcctcattcagagaggaaaggggtcaggggttcactctgacgttcaggccattctccctgtggagtggtgagggtgtacctaatctcctaaaccacggaatttctgttagggcctaaaaaagcaaaagcctagtatagttcaatttgtgttggaatgaaagtaagagacaagtgtcttagaagcctgtcattgttttgtgagggcctttaaatatcctgtactcgtgggccatgttgggcccttgtacgcccaggtatacatgagcttgtgtgcacctataccctgatacagatatacctggtagggggaggtgctcaggcactggaatgagaggagttaacggggaaggacagggttatttctgggccaagattcagagtttcccatggacacccaggtgtccggggtgcccccacaactctgggcctgaggccagttgcacttcttggctgtcacgtggtttcccagcttagctgggctgggggaggagcaaggtccagagtcaactctgccccgaggcctagcttggccagaaggtagcagacagacagacggatctaacctctcttggatcctccagccatgaggctgctctgggggctgatctgggcatccagcttcttcaccttatctctgcagaagcccaggtcctggaggcgggatgctgggtgcttggattggggcagggctggcatcgggacccgattcaggagtgagggagagcaggggtggaggtgtcagagcgaagtctgactgctgatcctgtctgttctccccaggttgctcttgttctctccttctgtggttcatctgggggtccccctatcggtgggggtgcagctccaggatgtgccccgaggacaggtagtgaaaggatcagtgttcctgagaaacccatctcgtaataatgtcccctgctccccaaaggtggacttcacccttagctcagaaagagacttcgcactcctcagtctccaggtaaccagaccccatgccctcctgctgcttgtgggggcctcctgccctgttcccatctgtcttgtaagtgtcatcatcttcccactggcctcctcccctcctgtcttcccaccctggcattctccttccacgtttctcccttggtctctgtcctttttggtcagctgtctcttgctctgtgacccgctccctctccctctccctctcctgacaggtgcccttgaaagatgcgaagagctgtggcctccatcaactcctcagaggccctgaggtccagctggtggcccattcgccatggctaaaggactctctgtccagaacgacaaacatccagggtatcaacctgctcttctcctctcgccgggggcacctctttttgcagacggaccagcccatttacaaccctggccagcggggtgagtctcagccccagggcctcaacctttaaccccctccgagccctctcaggatgagtttggtgccccctaagtgagataacctgaaagaaagtgccacacagaaggggtgcttaggaaacatttgtcccctgctccctctgtggagtttgacccaccctccccttgcacatggacccctgctcacctctctcctcctccactcccagttcggtaccgggtctttgctctggatcagaagatgcgcccgagcactgacaccatcacagtcatggtggaggtgagtccccgacctctggccttcctgatcctggccactgatgtgacctcctgcctgtgagcacttctccccttgcagaactctcacggcctccgcgtgcggaagaaggaggtgtacatgccctcgtccatcttccaggatgactttgtgatcccagacatctcagagtgagcgctcccaatgtgggggctgcccccaagctacaccaccccaattcctgttaggctctccacctcccacacagaggcacgtccccagatgccctgaccctcagcctcctgagcctctggttaacccccacagtcctcttcccagggaagcaggctgctggctctccgtgccccactgtacagatgggctgagccccttccttgtccattctcaggccagggacctggaagatctcagcccgattctcagatggcctggaatccaacagcagcacccagtttgaggtgaagaaatatggtgagagctggaaactggagggacaggcagctgctttcctgaaggaaataagggtggaaggagaggtactgggagcagctcagggcagggagatatgggtgccacagccctgagcagaggggagtctttgagctggagtctgacctgcctatcccttcaccctgggtcagtccttcccaactttgaggtgaagatcacccctggaaagccctacatcctgacggtgccaggccatcttgatgaaatgcagttagacatccaggccaggtaatacctccctccccacctctgcccaccagcaccgggtcctgctccctactcagtatgaatgggctcctgcttccctgccctcgggccattattccccccagcccttggcccaccctcttctctctgccacgacaggtacatctatgggaagccagtgcagggggtggcatatgtgcgctttgggctcctagatgaggatggtaagaagactttctttcgggggctggagagtcagaccaaggtaggaaggagaataggggctggggaggggaaggggcaagggaggtgaggtgggagactcagtctcaccctatgtcctgtttctttctatgccccagctggtgaatggacagagccacatttccctctcaaaggcagagttccaggacgccctggagaagctgaatatgggcattactgacctccaggggctgcgcctctacgttgctgcagccatcattgagtctccaggtgggtgactttcccttattgtaaccccagacccttgcctctgacctctgagctaaccctctgtcctccggcaccaacaccaccccacttctcacatctcatctcagactcaaaaccaggaaacacccaggagacctggtttctctccaactctgtctctgtgactcggcccttttccctggctgagtttatttatttctttgctcgttctgctcattccttcactcctccagtggacatgtgttgttcaatgccccgtgctaggcctcagcatgcacagacatgttggggaccagcctcaacgccacccgtagggttcctgaagtccattggtgacacaggaatgagaagagacaggttaagagttcataaagagtgggggccagggggccaattgcaaaatggaggctgcaaaaggctcagagctctggtctccacactattttttgagtacagtcactcagatctaagaagcagatgttcagggagaaacagtgaaagggaggcagtgggtcataggcgtaatctatagcaatagagttttaaatgaatctcctttgtgctcaaacagcatgtctttaaattatcggagagtagctggtggaagtgggcttagctagaagactgcatgtctgtccaatgcttcaaaggagggtctttctccttgaacagagtgtttacagataagacagggggtctcactctgagcatgggaacatgatggcaattaggaggcttttcttctcagaggcctcttgtggctttccacaacttattgtctcatatttttatggacagtttatacaggcaccccacaagtccttttcccaacatgcccccctccctttttttttttttaaccgctattgctattatggcttatttgtggtgtttggtctgttttcagaagtgtcttttgcatctgtagactaaaagtaaacagcataaacagatacacattaaagtaaaatttgtaatagttgatcctttaatggtcttaatctgtttaagaggatttatgtttgaaagtccgtcagtagctccaatgagaatgtcagtctcaggcaggagggttaaatgagcctgagatgctttaaaaacctgtttttttaaaatttggttatatttaatgttaaatttttatttttttcttttagatgatgtctaactttttaaaaatgatgtttagtagtattatacgaatggggagttatgtagaaattggaagtatttcaattacattgtacttctaattgatgttttaagtttattgtacgatcttccatttaaataacagtctgtctaagatcatttgtttgatttgtcaattgttggtctatttgggtctgagaattccacaattttgaggaattttttgttaactatttatatattttgtagtttgaacagaggagtgtaaagcaattccagcagccgcagcagtagctgtgactgcaataaggcccataagactgttataagggtaaaaataaatctctttgttttggtaaacacttttttttaaaacatttttgtgacaatatgaatggaaggagaggctttctaaggtctattgagggaaaccagtatccaaactcctttcttagtttttatcagtaacacagatgtttttacaccgaacgtggaattaatacaggtgaaaaggtgacagttttgacaagtaatagtttgagaattaggtcgaatgtcaatatttttgaccattaacataaaaggagggttgacacaactctgaatgggcactgttttgttggaagaaaactgatacgcaaattgaagtttttaaccttttttttttaaagataatatatttttttctaaacttaaatatgagattgggccattattaactttcataatttggagtgtttagggcctattattggattaattattttgggatgtgggccagctgtactaaaattggtccaaattatgggaaaatgagcacgtttttcagtgtaagtagtgttacctttttgatagtatagtttctgttttagttttgtcttgtatttattattttgatgggtacaattaactgtaaaggtcccctcaggggaccaattaatgacaatttcataggaattattttgtagtaccatagtgtgatcagagatgtaattttttttaattaatatttttaaattatttgaccattgttaaggttgttggcacctcttttttgggggcttaaactgttaattgaattgaactctgtgaatgatccgggctccatccagaaaataaatgataggatactggtctttgattatgacctggaattttaactagtcaatgttgtcggtagccttttaggcaaccgatagttggccttatgtaaagaggggggaactgataacctatggacacatttattaacttttttttttttcctttgggtgagagggcccatgagtatttgtaggcttagggatccaaacgctattattaacataaacttcaactgggggttttaaccatgtgacaggcctaattaaaggcaggaatgggacacatgcccaataggtataattttgggctgttgtagccacaggtttgttaggcgaggaggtcactgtttttattttggctttgtattctaggattagtaaataacagaagacaaacatgagtataattagtaacttttttttttagtaaaagagtgacctgtagtgttacttggcatcttagtttactatatgttattaatgaggaaccccactgggggtatgttaatttattctagctaagcagttatgttattagaagctgagaagggggtgtttgttaaagtaacagggcagaagaaaggcggatttaagatacgagcttaatacagtgtagcaggtataggtagtaggcaaagtgagagaattaaaaatgaataaattatttggcttagacttttgtttttttagtataatgtctgaggcctgtgttgtttgtggaagtcgcattgttgaggctgtagttcctgtagggtcttttttaggctggttcaaatgtttttttattttttaattttttatcctttgatgaggatgtagtctttaggctggtactggaaattttaggagtggcgtctgtgttaagagactttttacaatttttaaagagcaggttagtgttttaagaaaaacttgtgttttattttaatgtttagtttatagaaaactggatgatatctttttaactttagtaaatacgtttacacacggaattttttacaattatcattttaaaacttgtttagatctttaaaacaaaattaaacaaccttttttgtataaattttttataactttttttatgacttttacagacaatttttaacatgtcttaactttttatgttttataatttttttactaaaggtacatttttataactttttaaatttttttacttttttgtatttttttgatttttgtcttagtcttttttttacttttatttttttaaatgtgtaataattagatgagtgttggtaacaatggatgtatgtacatattttagtttttaaaatttagggatgtgtttaacatctgtttgccagaactgactaggttccaattctttacggttaacacctattgaaggagggtatgtgcctgtgagctggtaatctgggcattgtgggataatttgtttagccagcctctgtgtaagttgaaattatttagataagtttctccaattttggtggaataatcgatgtgattgggtggcttggtcaagcagtgatgtcataacctgaaggtctgcttgattattgccgtaagccaatgggccaggcagagagctgtgggctcgaatgtgtgtaataaaagtaggatgtgtaccttggtctagtaattgttgaagttgaagaaaaagaccacacagagtgggctccagagcaaacttaaggctgtaatagtttttaaataaatacacagaataaccttagctctctgaatgttagtaaattcagatcaagtgattggattatgtggtctccaccagactgttgctttttcatgtttaccagacccaccagtaaaaacagctatggctccttccaaaggggcatcacaagtaatttttggaagaacctatgtagttaattttaagaattgaaaagtttttaggataatgattattaatacatccaacaaattttgttaaattaatctgtcatgtaactgagttaataaatgcctgtttaacctgatttttatttattggaactataatttttattgggctcagtgccacaaaatttaataattcatatatgagcctgtccaattagaattgccatctgatttaagtatactgtaagtgcttttatggtattatgtggcaaaaaggaccatttaactaaatcatcattttgaacaataacccccattattgtgtggttagtgtgaagtagggaacacaatgaattataaaggcaagtctgagtcaatcctactgacctgggcttgctgaattttgttttcaattactgataactctttcatggcctcgggtgttagttctctgttactgcgtaagttggtatttcccctcaatattgagaagagattagacatagcataagtaggaattgctaaattgggccaaatccaattaatatcttctaacaatttttgaaaattatttaaggttttgaaagaatctcttctaatttgaaccttttgaggcttaatggctctatcctgtacttgtattttcaaatactgaaaaggagtggttgtttgaattttgtcaggtgctataagtaattcagcatttgtaattgtcttttgcaaagattaataatattgaataagttggtctctactttttgctgcacaaatctggaaactgatctctaacaggctggatagttctgcctacaaaagtttgacaaactgtgggactatttaacataccctggggcaaaactttccaatgatatttggctgcaggttttttgttattaacggcaggaatggtaaaggcaaattttttgaaatctgcctctgctaaaggaattgtaaaaaagcagtcttttaaatctataataacaagcggtcagtctttagggagcacagtgggggatgggagcccaggttgtaaggctcccatcggttgaattacagcgttgacgccatctaccggactttttcttaattacaaatactggggaattccaaggagagaaagtgggtgaaatatatcctttttttagtagtttattttataaagcacccccaacttttccttagggagcggccactgttcaacccagacggggcgccgggtcatccattttaagggaaattgctccttcactgtaataactgtagggtgaacctgaattgccccatctccataatgaactgtgggtcgggcaataatgggcacggtgagccaagtctcgggctccctccccctgcacccactcggctgaggaggaggtggccattctggacatttctctacaggaaccgtgggctgaacaattttttgagtaggtttagggagactggggagattggcataaatcatcttcagactctcctttttgttagtactcggtagaggtggttcagagttctgattatcaaactcctctctctcctcctctgactcagcctcattatctgtctgaaaaggctccagtgctgcatgcaccaatgaccaaagcgaccaaacaggcaaaggaatttcctttccttctctatatgctcttttaaggtcctttccaactccttcttaatgttttaatttcaaagtttcctgttttgggaaccaagggcaaaattgttccatagcatgaaacaaatccataagattttccgtatcaacttttaccccaccatgcatgcttgaagagctgccgtaggaagctcaaatacgtggtgtacttactttcagtttttcccattgtgtccctagctttctctgggcgccccgcttacctgtagaggttaaaacttttatgtccttgggagtcctttgttcgttggtcctctgtttcacatgcttgagcgtttcctcaccagattcttttgggccccacgttgggcgccagaatgttggggaccagcctcaacaccacctgtagggtacctgaagtctggtggtgacaaaggaatgagaagagacaggttaagagttcataaagagtggaggccagggggccaattgcaaaatggaggctgcaaaaggctcagagctctggtctccacactatttattgagtacaataacttagatctaagaagcagatgttcagggcaaaacagtgaaagggtagcagtgcgtcacaggcataatctacagcagaagcgctttaaatgaatctcctttgtgctcaaacagcatatctttaacttatcggagagtagctagtgggagtgggcttaactaggagcctgcacgtctgtccacattccaatgcttcaaaggagggtctttctccttgaatacagtgtttacagataagagagagcaggtctcgctctgagcatggcaattaggaggcttttctcctcagaggcctcttgtggctttccacaacttattgtcccatatttttatggccagtttatacaggcaccccacaagtccttttcccaacacagacaggaatacggcagcctgtgccctgggagctcactgtcttgtgggagggaaccactcaagccactccccacttgtcctcctgtccctctcttcttgggctctgtcccccacctctctctgtcctttgtcttgcaggtggggagatggaggaggcagagctcacatcctggtattttgtgtcatctcccttctccttggatcttagcaagaccaagcgacaccttgtgcctggggcccccttcctgctgcaggtttcttccagaggggaaggatgagtagggaggatgtggtagttaggagggctcagggtctgaccactctcttttgcctgccctcctttacctgcctaggccttggtccgtgagatgtcaggctccccagcttctggcattcctgtcaaagtttctgccacggtgtcttctcctgggtctgttcctgaagtccaggacattcagcaaaacacagacgggagcggccaagtcagcattccaataattatccctcagaccatctcagagctgcagctctcagtaggactcctcggacccctgggagatggtgggggaaggggaggagggtgagctggggtcccaaggatccatggcctgacttggggggaaggtggggtacttggctctgagctactaccctattcgcacctgaccccctctccaggtatctgcaggctccccacatccagcgatagccaggctcactgtggcagccccaccttcaggaggccccgggtttctgtctattgagcggccggattctcgacctcctcgtgttggggacactctgaacctgaacttgcgagccgtgggcagtggggccaccttttctcattactactacatggtgtgcatgagctggggagtcacggagggctggggtgcagggaagagccctctgggtggggctgggggggttcaaggctgaggctgtcccatgaagaggcaaccactcttgtccctcccattcttggcccagatcctatcccgagggcagatcgtgttcatgaatcgagagcccaagaggaccctgacctcggtctcggtgtttgtggaccatcacctggcaccctccttctactttgtggccttctactaccatggagaccacccagtggccaactccctgcgagtggatgtccaggctggggcctgcgagggcaaggtgaccggggtcaggagagatggcacttgtgccgagggggttgaggacagggtgattgccaacagggcatggatttagcttgggggcagtgaggataccgggactgaaggaagctctcccactctgaccgcccccacctgccgcccctgccagctggagctcagcgtggacggtgccaagcagtaccggaacggggagtccgtgaagctccacttagaaaccgactccctagccctggtggcgctgggagccttggacacagctctgtatgctgcaggcagcaagtcccacaagcccctcaacatgggcaaggtttgtccagaccctctccacagctctctcacccctccatggctcatccccctgcttccctgagccttgggcgcagcccctggatcccactgaggctccccacagtctcttccccacttggccctgtggtctccatctcctggctctgtatcctttcctatccccccatgtgctgccctctcacctgtgccgagtgctcagtcctgcccctcagccacacttggctcctagcattcctgcctttcttgcaggtctttgaagctatgaacagctatgacctcggctgtggtcctgggggtggggacagtgcccttcaggtgttccaggcagcgggcctggccttttctgatggagaccagtggaccttatccagaaagagtgagaacagagaaggaaggggagtgggtggcgggaagataaggaaggaggaagggcctgaggggaccagctggaagagtccgggcaggaagggctgggcaggggaaggggaggaggggaggaggccgagtgcctgacggctggactgcagcctttctctctaccaggactaagctgtcccaaggagaagacaacccggaaaaagagaaacgtgaacttccaaaaggcgattaatgagaaatgtgagttgcgggtgcctaggcagtagcttgggctctccacctgggatccgggttgggggtctgcctctctgcccctcggctccttgctgaacccacgtgtggtatttggggccagagatccgaattccgggattacgagtggaaggtgggcagctctctccagcagcctctcttatgttgctggtctcaaggggtcggggcgggggctgaggtgtatgtcctttttgtcctctcatgctcacccccacctggccctgcagtgggtcagtatgcttccccgacagccaagcgctgctgccaggatggggtgacacgtctgcccatgatgcgttcctgcgagcagcgggcagcccgcgtgcagcagccggactgccgggagcccttcctgtcctgctgccaatttgctgagagtctgcgcaagaagagcagggacaagggccaggcgggcctccaacgaggtgaggggctgggtggggctagggcacaggtggcggcgcttggaaaggcagaacggtcccctcctcactcccgtccaccgtggtcccccagccctggagatcctgcaggaggaggacctgattgatgaggatgacattcccgtgcgcagcttcttcccagagaactggctctggagagtggaaacagtggaccgctttcaaatgtgagagtgtgtgccggcccggccttttctctgtgctgtgtctcggggccagccggggtagacgggccttctctgcctttccctacacagattgacactgtggctccccgactctctgaccacgtgggagatccatggcctgagcctgtccaaaaccaaaggtgatgtcaccctgtctgggcctcaggtgaccctgcttccatttccctgtaccccagctccctgttccctttgctcttagtgtaggaagagggtccagtgatctggggaggtctgtgccagcgtgcagctggcgtgggccagagggcagaggcggactgagacagagctgggtcacccccacccctccctcctgtggccctgaagctttgatggcccctctgatctctgcccctgtgcccacgcttcctttccctcaggcctatgtgtggccaccccagtccagctccgggtgttccgcgagttccacctgcacctccgcctgcccatgtctgtccgccgctttgagcagctggagctgcggcctgtcctctataactacctggataaaaacctgactgtgaggccccatgggagcctgagcatacaggagttgggggagccagggcccagtgaggggtggggaggctaaccgggccaggactctggccatcctcgttttcctgccctcaggtgagcgtccacgtgtccccagtggaggggctgtgcctggctgggggcggagggctggcccagcaggtgctggtgcctgcgggctctgcccggcctgttgccttctctgtggtgcccacggcagccaccgctgtgtctctgaaggtggtggctcgagggtccttcgaattccctgtgggagatgcggtgtccaaggttctgcagattgaggtgaatggagcacccctgaatataagtccccgggcccccagctttgtcctccaccctcagcactctctctgctggccaggccaggggcccaacacccaaaccaatgccttggtctgttcccatcttctacaattctgatccaactctgtccctggagttgaaactcaaagttctgggggagtctgcgctagcagggcaggctgtagtcctgtgtgacctcacaaccatgttttccctgagacagaaggaaggggccatccatagagaggagctggtctatgaactcaaccccttgggtgagtgaccctctacctccagccattggtttcctaagtgggtacaggtggtgggggatgtggacagcaggacaggctgccaacttcccccatttccccagaccaccgaggccggaccttggaaatacctggcaactctgatcccaatatgatccctgatggggactttaacagctacgtcagggttacaggtgggagtgccctttagtcccttcccagtggccaccttcggattcatgtgggacttgtggatccctgcttggtcccactccccgtgagcctctgacacagagtcctcagacctccaccctctccctcccatgtagcctcagatccattggacactttaggctctgagggggccttgtcaccaggaggcgtggcctccctcttgaggcttcctcgaggctgtggggagcaaaccatgatctacttggctccgacactggctgcttcccgctacctggacaagacagagcagtggagcacactgcctcccgagaccaaggaccacgccgtggatctgatccagaaaggttctgggtgcaagggcaagcaggaggggggccaggaaaggacagttactggaagatggacagcccaggaggctacagagggaaagaaagggggcccctgatgaggatggggagcatggccttgggctcaaacagcagaagggtgagtgtcacctgagcggccacctctcctctccaaggctacatgcggatccagcagtttcggaaggcggatggttcctatgcggcttggttgtcacggggcagcagcacctggtgagcttgggagagtggttccagggttctgagggggtcagggctggggcaggggtgggacagagctggtatgatgggagggtggataaccaggcacctgggggcgtgggcataatgagaagcaagtccttatccccaaccctcctttcctgccctccaggctcacagcctttgtgttgaaggtcctgagtttggcccaggagcaggtaggaggctcgcctgagaaactgcaggagacatctaactggcttctgtcccagcagcaggctgacggctcgttccaggacctctctccagtgatacataggagcatgcaggtgcgggcatgctggggctggcccgagaagcgcctgtcggaggactctctttgccccttccccctcctgtttgacatcttttctccccttactaggggggtttggtgggcaatgatgagactgtggcactcacagcctttgtgaccatcgcccttcatcatgggctggccgtcttccaggatgagggtgcagagccattgaagcagagagtggtaagttcagtggcgtttctgccctctgctggcccccagctctctccctttttcctcaggaacccaggggtccaggcccaagaccctcctcccgttttcttccaggaagcctccatctcaaaggcaagctcatttttgggggagaaagcaagtgctgggctcctgggtgcccacgcagctgccatcacggcctatgccctgacactgaccaaggcccctgcggacctgcggggtgttgcccacaacaacctcatggcaatggcccaggagactggaggtgaggggtgaggggctctggcagtgagcctgaggcccaggggaccttaggatccctgagtgtgcccagagggagaggctggatgaagactcagaggaggaatgaagttataagcaggggtgggttgggggagactcaggagagcccagcagggggtggctaagggccaggggaccaggctcttctccctgccttcctgtttactcgtggtctcccttcactttcagataacctgtactggggctcagtcactggttctcagagcaatgccgtgtcgcccaccccggctcctcgcaacccatccgaccccatgccccaggccccagccctgtggattgaaaccacagcctacgccctgctgcacctcctgcttcacgagggcaaagcagagatggcagaccaggctgcggcctggctcacccgtcagggcagcttccaagggggattccgcagtacccaagtaggggccgtccccgggctctggcgggggtgggtagtcctcagaccaagggcttgcttgagtcctggctcaacctccctaggacacggtgattgccctggatgccctgtctgcctactggattgcctcccacaccactgaggagaggggtctcaatgtgactctcagctccacaggccggaatgggttcaagtcccacgcgctgcagctgaacaaccgccagattcgcggcctggaggaggagctgcaggtgaaccactccctggtgaaccactccctcgcctgggtagccaggacacctgggcctcgtggccaggccagaagccgtccccaccctcccacccgtggaatccccgcagcacttcttcctggggtcttcgggggaagactgacttcctggctgcgtgacctggagctctgagcttcagttttctcacttgtagagtaacatacacagagttcaccctacagggtcgttagaaggctgaagtgagataattcatgtgctggtataaactttgtggaaatgtgaggtggggagagggggtggggctgttttgaggaaggagataagttattggagccgcaaaaacaggtttgcttgtgcccttctaacatcgccttcccttttctgttgctgaagttttccttgggcagcaagatcaatgtgaaggtgggaggaaacagcaaaggaaccctgaaggtgagggccagggaaggggtggggccaggcactggtggaggagagggtgtggagtgagaggcctgtgggcagaggcacatggtccggggaaggaggcagacacctcagggttggtgtcccgtgcttccgtcctgggtgtttttccccctgcttgctttcgcttgctctccccatctctgggtacctgttgtttcctttacccgcctcagtgctggtggctccgaatcccactcctcagcccaggcctcttccctgaaccatgggccccactcgtcccactcccacagcacctcagacgaggcatgtcccaaagcccttcttcattctgtgtctcttgtctggctggtgggagcccctcccagccaggagcccagccactactctagaggccgtgttagtggcccctctcccaagcctgtccttatgtccctagtgactcctcctctgctcccctgctgcctgtggcccttggtgctgcatcctagattctgtgctgagacggccttctccctacctggaacttctctctacctcctgtctcccctgtctgatccactgtccacacggcagtgacactgaccttccaaaagccccagccagatcagccttggggaaaagtcactccccgctgcccacggctcagatggctgggcctctgcccacccctccggccagacagctctccttgtctacacagatccccttgcctttcctgtccttccctgcttcttggcccacaggacaagctctttcttctccttcaagccttggccagaagcctttcctgagcttttcagtccagcctcttcccagcacagtctggagtgttggcctctgggggcaggcccctgcttctttacctctctgtctcgcctgacgcctgtggcgaatgtggtgccactcgtgtgtgtggactgtgcagtgacggggaggaaaaggggctgaaggcctcaaatcctgtagcccagggagatgcccttaggtatggcaccagagaggtctgtggcctcacatgtcccacgtcctctccctgccccttgctgagccaggtccttcgtacctacaatgtcctggacatgaagaacacgacctgccaggacctacagatagaagtgacagtcaaaggccacgtcgagtacacgagtgagtgtgggggttgggaggccttggggccaggcaggggctggcgcagggagccgggtggccatcccagccctcctcacaatgcttccctgtgcagtggaagcaaacgaggactatgaggactatgagtacgatgagcttccagccaaggatgacccagatgcccctctgcagcccgtgacacccctgcagctgtttgagggtcggaggaaccgccgcaggagggaggcgcccaaggtggtggaggagcaggagtccagggtgcactacaccgtgtgcatctggtgggcgccgggagctgccctgggccaggggagggagggcaggacccaggctggggctgggcttctggagcccgcgcaggcagaacctggacgacagctcacacgtctccacaggcggaacggcaaggtggggctgtctggcatggccatcgcggacgtcaccctcctgagtggattccacgccctgcgtgctgacctggagaaggtgtggtcagccacccagggcaaccccctctgtcccaggtactgagccctgtcatgtgcagggcctgtgaccaactccccttttccacagctgacctccctctctgaccgttacgtgagtcactttgagaccgaggggccccacgtcctgctgtattttgactcggtgagtggggagagatgaggcaggaagggactcgatggcaccgggtttactgagtatgcgttaggaggtttctcaggagacagctgtgtcagcggctggtgctcttgagaacttgtgatgtcatcagagagaaggacaagaatgtgagcccgtgagacacagcagagtaaggggcagacctgcaggcggcagggaccgatgccagtcagcagggaccctcagggtttgagagggagtctttcctaatgctggttttattcagcttgaggggctgcctttgtttttttgttgaacttcctatcttttttttaatattaaagcgtattttcctttacaaagtgatggtggccatagatgatagttgtatttgtcttttcacgaccttatttggctaaaatagttatcaaccctcttacggctctcaaaacatttttatttatttatttagtaaagacagggtctcgctctgttgcccaggctggtcttgaactcccggcctcaagcgatcctctggcctaggcctttcaaagtaccggatttacaggccagagccaccatgcccggccttcaaaaaaagttttggaacatttactgtaacctctgggagaaaatgtgagaaaggtgtggtggctgtcattagccagctgtttgtaggtcagggagacccctacccagtgtgtgcagaggggccagcccccatcagctggggaagcctggctgacacatctgggttgaacacaatagaaaacacagagccaacaagattcccggatagggagctgacggtgcagcagcctagctcaggagggacactggcacggcaccgtgtggactgggcccgcgtgggcacgaggaggggtcaggcctgggacctgagtcggggggtcaggcaggatgacagaacctgcagttaggttgtggcaaataaaggaggacccagttgtatccatgacaaagatgaggccgcgaggagggcgagtgggtttgggggcaggcagagtgccttggagaacttacaggtcctgccacaatcctaatgcaaggatggagctgcaagttcagtttgggaatcatcagcctggattggtttggtggaagccagggagtggttgagacccccacaggggagctctgaggaaggaagttccgaaggagggaacgtaagaaatgaccaggtcagaaccaagggtggtccagaagctaacccttagcttagggacagtttcacagagaacacgtccatgatgcaagactctgctgagggcctggagcagtgaagactggggcaaggtcaccctctgggaagtgaagtcaccagagaccttgcggagcagctttgagagttctctgagtaggaaggtaacagaatgtgaaggacactggagagaaggccaataggaagcaaacaaaaacaggccaaggaaacccagtacagggggctgcagggcccagggagtgggtccctcatctctcctccccacgcttggccaggtccccacctcccgggagtgcgtgggctttgaggctgtgcaggaagtgccggtggggctggtgcagccggccagcgcaaccctgtacgactactacaaccccggtgagcactgcaggacaccctgaaattcaggagaactttggcataggtgccctcctatgggacaatggacaccggggtagtgagggggcagagagccctggggctccctgggactgaggaggcagaatggaggggcctgtgccctaactcctctctgttctccagagcgcagatgttctgtgttttacggggcaccaagtaagagcagactcttggccaccttgtgttctgctgaagtctgccagtgtgctgagggtgagactgagggcctggggcggggcagtggaggcgggatggccggggccccccccacactgtctgatgggttccccaacttcagggaagtgccctcgccagcgtcgcgccctggagcggggtctgcaggacgaggatggctacaggatgaagtttgcctgctactacccccgtgtggagtacggtcagtcttcccaccgaggccctggcctgaccctccctcggggaccggccgttttggtctctctgggtgtagcctgctcctcttacaggtcatgcacgcagcctgtttgctctgacaccaacttcctaccctctcagcctcaaagtaactcacctttcccccttctcctcaccccctcttaggcttccaggttaaggttctccgagaagacagcagagctgctttccgcctctttgagaccaagatcacccaagtcctgcacttcagtatgaagcaaaccggagaggcgggcagggctggggggagacagggaggctgaggtgtggccgaggacctgaccatctggaagtgtgaaaatccccttgggctgtcagaagccttgggcttggccataaatagggaggcagtggcacctctccatgggggtggcgaaggtggaatgagaggatctacacagagtccccagcctgggctcaccctgcaccttctcttcccctctgaccacttttgcgcacgtcatccccgcagccaaggatgtcaaggccgctgctaatcagatgcgcaacttcctggttcgagcctcctgccgccttcgcttggaacctgggaaagaatatttgatcatgggtctggatggggccacctatgacctcgagggacagtgagtcatctggtcccctcagtctcttgtcctccccatgcctcgccacctaggccttgcccctcagaagccagatgcctgtgctctccgtttccacctgccatcctcccgagccctgctgactgcccctttgccccctgcagcccccagtacctgctggactcgaatagctggatcgaggagatgccctctgaacgcctgtgccggagcacccgccagcgggcagcctgtgcccagctcaacgacttcctccaggagtatggcactcaggggtgccaggtgtgagggctgccctcccacctccgctgggaggaacctgaacctgggaaccatgaagctggaagcactgctgtgtccgctttcatgaacacagcctgggaccagggcatattaaaggcttttggcagcaaagtgtcagtgttggcagtgaagtgtcagtgtgtgttgctagggctgagagcagtgcccctgcccgatgcagttctgggcaggccaggttgacataaccttagactctctgagccctgatgacccttgggctgttcagctctgctagaacctcccagatgacccgctaggagtctagtgcttcacaggaccaccccgagcagaactgggacccaagagcctgcaccccaaggaccagagtccatgccaagaccacccttcagcttccaaggccctccactgcccggctgtcgccagtcaccacggcctcagacagggcttgtgctcagctgacacctgtgacacagctcttctgcctcatgagctgttgtccagctacacctccccgactctgtcctcgtgctgctggcggttctgaggtctgcagattttagctgagttccgggctgttgaaagcctgctgacgcttggttctgttatcagtggaatgaggtgactttcccggagttgtgcaatcctcaggtccggcagtgtcttcttccagttactggtttcaaacaagccaaaagtctgactttggtgtgtttgtgaatcctctgaggaagccgctgttctcctggggtctccccttcccaccggacctgcctaactttcccccatttagtggcacacctggggtcttcagagatgactccgcgtctgtccaaagaagtttggtgagatcagtttccgtagaggtcatgacagttcagcagcctgccatccagtcattcgacagaaattcgggaatctttcacttcatgccatgccctgtgccaggtgccagagatacagctgctcactccagggctcatcgctggggagacagataagaggacgggcagtccccaccctctgtgaaagatgtgatgtcagggagcagtgtggtcctgtggggcatctaaccaagtcaggggcattgccaggcagggacagggaaggcttcctggagcaggtggcctccaagtggggctctgaagactgagaaggagccaggaaaagagcaggggtagatgagggcatctggggcagaaggagaatatacaaaggcccagaggccgggggcaggacagggtacctttggggacattgcatgtaattgaccacattcggagtttggatttggaagtggtggaagagatggagatggtgagacaagtagtaagcacgtcagccttccaggtgcgctcctttccgatgagcactgtcttatcccacgtaactttgagaagtttgggcctttcccactgtggcagaggtttcctgaggctcttgcatacatggccctatggttgctcatcagatctttctcccagtagctgctcagcatggtggtggcataagcccattttccggagccagggattcagttgcagcaagacctggcccggtctgggaggtcaaccatgaagaaggcagtagctgtcattgcccaaccccagaaatcccaatcctgttttctccctctcagtcctgatcatggattcagcagcagcgaactcgccaatgtagtgggtggcacagccagggtcttgactctggctctgcagtagcacagtctggaaaagctctgaggggagagagacccccactggtccgagggtctggcacagagccagaaatgggggggaaggtatggggctgggtcgcctctgacctctcaggtaccatccaggaggccctggcctctcactgaacccggccactcctctttggcatggcctcttcccaaatccccaaactgcctccttactcacaaaagtggtctctgagtgtcagtccagtgggacccccaccccttatggcttcagttccccaaatagggctggacccttgatcctgatccagctgtggctatccagccccttcctggggactttggactttgagggggggcatgcccagttgtgctgggaatccatactttccctggctggagtagaacctgtggactgtagtcctgagggcagtcatgttctgcctgtgcctggaaacacaagaaacttgactgcagagagaagaaagaggagagaggaacagagcgaggaaactgcccgtctccggggctttttctgttccctatccttggctttctaagaccagtggggtcccctcctctgcttctttttcctgagttctgtgaaattccccaatccttactttttgtctcaaaccagctcaaggtgggctgttttcctttcaaccaaagaaaggtgctcctggtggctaaaggtacatattcgacagctagatttccaggctggaatcctgccctccacaacatgcgaacaatacccgtgttgcatatagagcatggctgtgaagagttgagtgagtgcccacaaagcacttagagcagtgtctggtacatgctattactccgcagcgggaaaccacttcctcctttgtcttctgggcacttttgtgagtgaaaggaggcactaataacaatcacactgggatacctgtatatactggaatgccccaggcaaaccaggcttaaactgtattactctatctgtagcttaaactaacaaacaaacccacacaaatcacattttgttcttcaggcgattcaggaaggcctattaggcagggactgccattttctctctgagacaaacatcatgccagtaaactggcccacggtggggtggcagagggagagggcccaggtcggggcggacacccttgcctgcacgggtgatgtggaaccagaaagctgactctggatgcaggaaaaaggtcagggttgcatttcccttccttgcttctcgatgggtgattaattttttttgaaatacggacgtcccaaggccaatgagactggtgtcattccagaaaagggccactctgtgggtgggtcggtgggaaggcacctgagggtggggtcaagggaggccccaaaacagtctacacagcaggagggatggctggggctcttgagctataagtggcacctcagggccctgacgggcgtcttgccatgctgctcctgggcctgctgctgctgctgcccctgctggctggcgcccgcctgctgtggaactggtggaagctccggagcctccacctcctgcctcttgccccgggcttcttgcacctgctgcagcccgacctccccatctatctgcttggcctgactcagaaattcgggcccatctacaggctccaccttgggctgcaaggtgagaggctgatctcgctctggccctcaccataggagggggcggaggtgacggagagggtcctctctccgctgacgctgctttggctgtctcccagatgtggtggtgctgaactccaagaggaccattgaggaagccatggtcaaaaagtgggcagactttgctggcagacctgagccacttacctgtaagggccgggggcattttttctttcttaaacaaattttttttttgttagagatggggtcttgctatgttgcccaggctggtcttgaattcctggtctcaagtgatcctcccacctcggcctcaagtgggagccaccttcgggggcttccccaatcctccaggtcactggaagctcttggggggcatatcttcaggagaagaagcaggtgttgaggaggcagaagaaggtcaggccctcggcttccttggtcagttcccaccctccagcccccagctcctcctgcagacaagctggtgtctaagaactacccggacctgtcgttggtctctgctctggaaagcccacaagaagctcacccgctcagccctgctgctgggcatccgtgactccatggagccagtggtggagcagctgacccaggagttctgtgaggtaaggctgggctcctgaggccacctcgggtcagcctcgcctctcacagtagcccccgccctgcccgctgcacagcggcctgctgaactcacactgtttctccacagcgcatgagagcccagcccggcacccctgtggccattgaggaggaattctctctcctcacctgcagcatcaactgttacctcaccttcggagacaagatcaaggtgcctcacagcccctcaggcccacccccagcccctccctgagcctctccttgtcctgaactgaaagtactccatcctttcctggcaggaggacaacttaatgcctgcctattacaaatgtatccaggaggtgttaaaaacctggagccactggtccatccaaattgtggacgtgattccctttctcagggtgaggacctggagcctagacacccctgggttgtaggggagaggctggggtggagggagaggctccttcccacagctgcattctcatgcttcctgccgcagttcttccccaatccaggtctccggaggctgaagcaggccatagagaagagggaccacaacgaggagaagcagctgaggcagcacaaggtggggactgtgtgtggacggcctcccctcggcccacagccagtgatgctaccggcctcagcattgctatgaggcgggttcttttgcataccccagttatgggcctgttgccactctgtactcctctccccaggccagccgctcagcccgctcctttcaccctctgcaggagagcctggtggcaggccagtggagggacatgatggactacatgctccaaggggtggcgcagccgagcatggaagagggctctggacagctcctggaagggcacttgcacatggctgcagtggacctcctgatcggtggcactgagaccacagcaaacaccctctcctgggccgtggttttttttgcttcaccaccctgaggtgcgtcctgcggacaagcaaaaggctccttcccagcaacctggccagggcggtgggcaccctcactcagctctgagcactgtgcggctggggctgtgcttgcctcaccggcactcaggctcactgggttgctgagggagcggctggaggctgggcagctgtgggctgctggggcaggactccacccgatcattccccagattcagcagcgactgtaggaggagctagaccacgaactgggccctggtgcctccagctcccgggtcccctacaaggaccgtgcacggctgcccttgctcaatgccaccatcgccgaggtgctgcgcctgtggcccgttgtgcccttagccttgccccaccgcaccacacggcccagcaggtgactcccgagggttggggatgagtgaggaaagcccgagcccagggaggtcctggccagcctctaactccagcccccttcagcatctccggctacgacatccctgagggcacagtcatcattccgaacctccaaggcgcccacctggatgagacggtctgggagaggccacatgagttctggcctggtatgtggggggccgggggcctgccatgaaaatgtggtggaggctggtccccgctgccgctgaacgcctccccacccacctgtccacccgcccgcagatcgcttcctggagccaggcaagaactccagagctctggccttcggctgcggtgcccgcgtgtgcctgggcgagccgctggcgcgcctggagctcttcgtggtgctgacccgactgctgcaggccttcacgctgctgccctccggggacgccctgccctccctgcagcccctgccccactgcagtgtcatcctcaagatgcagcctttccaagtgcggctgcagccccgggggatgggggcccacagcccaggccagaaccagtgatggggcaggaccgatgccagccgggtacctcagtttctcctttattgctcccgtacgaacccctcccctcccccctgtaaacacagtgctgcgagatcgctggcagagaaggcttcctccagcggctgggtggtgaaggaccctggctcttctctcggggcgacccctcagtgctcggcagtcatactggggtgcgagagaggtgggcagcagctcagcctccccccgctggggagcgaaagtttcttggtctcagcttcatttccgtgaagggcaccgagaactcgaagcccttccagtggtaccagctcactccctgggaaaggggttgtcaagagagagtcaaagccggatgtcccatctgctcctcccgttccccttaaggaggtggctcccagcactcaaccaacctccccgcagagctcccttcctgaccctctgccgcagaggattgaggcttaatcctgagctggtcctttccagccaataaatcaactccagctccctctgcgaggctggcatgattgttccatttcacccagccgctcagtcccttgcctgttacactgtggggctgaaacctaggcaggccgagccccagccaccccagctctgagccgcctccccacccctcacctgatggtccactgtgctcccgtagagcccgttgaggttggcgtagtggcagttcctgtaccaccaggcccctcggtaggagacagcgcaggagatgagcaagctgttggggtcccgatcacgggcagagaagacactgccgctgtggtagctcatggagtcccctgggcagggtggaggaaggagccatgagggcctcccctcccagcctcaccctcccagcctcacagcctctgcttacctgcggtgccgtggtagccctccaagtggaggcggtagtactccgcagccgagtctacgtggaaggagtcgtactgggcgaacacagcctcgtccccagcccgcaggtccacgcgcatggagtagtcacctgcctgtgtcaggctgtgcagggcctcattgcctgggggtgggatacgtgccctcatcagggtcctggtgtccacagggcccccatccccatccgtagttccccagtccctgtgaggcactgacccagccagaactctccagagatgttcccaaaaccatgggcatagtcctcccagtccctccagaagtctgtctgtccatccatgcggcgctggaacacctgggaagcaagtgggggcaccatcagcctctggctcccggggcaacagccccttgccctgcacagacccctgggcttcccaatgccacccaccagccagccgcccccatcagtctccatgtcccaaaacacgttcaggggccgctcccggttgccgttgaggaagatggtgctggtcctggaggcaccggctccgttctgcatctcctccccgcagtccctggggaaggggatccgcagcccacctgggagaggagagcaggggccagtccttttccaagccttaggccctggctgcccacccagcccccggccccgggcccgtgcgtccaggtacccgtggtgaaagaggtggacacgggcggcaggaggctctggccccacatggcctggagccgtgcattgtaggaggtggagggaaagaggccaaggagctggtgagatgtgatccctcctgggagcaggatctcctgtgggacagacaagggggggtcaggggagagggaggtggagaccctccgggagggccagaggcagcacctcctggaatcacccagggaggggagttgggtcagtggggccggggcacctggttctgtccaccaggggtgtggaagctgagcaggtagcctgcgggccggactgggggctcagtccaagtgagcagggcggtgcggggggtcacttccttggcctccaagtcccgaggggcctctagccctaggagggaaagcaggaagaggagatggggatgaggcccaacctggctccctctacctcctctccctgtcccacacaccccacagaccctacctgtggtgaaggtgatgctggctggggaagtgaggttggggccccgcaggccacgcactgtggcggtgtagttggtgtggaggacaaggtcatgcagggggtagtccaccgcgctgcctggggtctccgcctgcagaggcggggctgggagtgtagagaggggcatcaaggcctgccccctccatcctcggccagagtccagcctcccccctgcaatccccaccctgaacaagtcccctccagaggcctcaggcctgctcacccccaggggctgtgacctggacgtcataggtgtccacaggattctgggggggcttccagtgcagcacggcgaatccctcggtcaagttcagtgcacgcaactgtgtgggaccgtcaggaactgggggaaggggaggggctcagaagggtccccgcggctctctctactccgtgcctccccagactccactggcctcccgtccgcaatcggagcctccaccacctccctttcaccctcctcgttctctctcaactcccacccatgccgttttcttgactcccacctggagtttctgggtccgggcccggccgtccacctgcacactctgaggctcccctgaaaacgttggggatcgagggttacccagggaaccccagggcggctggagggtgggcagagtgcaggggggagaggaaatgcgaggcgatgagcacatggcaaaggcaccacctccgtccgccagctggtaggagactttgaagctgtccgcccgggatggtgggggcatccagttgaccttggctgaggtctccctgatttcactgaattggaggtcacgggggctctccagaactgcagaggggtcaaggaacaatgacgcaggcaggggcagggaggctcctccctgcgagtccccccctcgcctctgctccagcacaggctcaccaccccttttcctctagtccccaggaatggaagtcgctctgcagattcctccaggcccaccaccaactcgcccacccccaccgctggctgaggcactaggtcccccccgtgaagtacaaagacccccactttggggcagagtgtgtgtgggtccttacctgggctgagggtgcgggcggttccctggatgctgtcggccttgtggggtcctcgcagcccatacagtgtcaggctgtacagagtcccggaacgcaggtcccggagcacggccgagtgccgcgtccccggcaccatcagctcgcgctgcagcagtggacgcggatgcggctccagagtgcttggtgatggaaccccaaagcggagcaggaaggagtcgaaggcccccggtggggcctcccagttgagcctcagtgaactggtggtcacgtcagtcacagacagctgggacaggcggggccttgactcctctgaggtctgaccagcaggagccagccctgcacggagtgggtgggggagaagggattggagacagaagcacaccagcttggtgacccagagcacgtcccttccacccccctccctgcccccgtttctctatctgtaaccagggacttgcagccacaggggggtcctgtggggcagagctaaaggccactcgcatccagcccatccatcctctctccctggtacccgcctcacgctctttccctgcgaccaccccttctgagcccccgtttctcccttctgagtcctaggctagaggccggagacgcctggtggtacctgtggtgccctcagctgagaggggccccaggcgcttcccttcatggaggccatagaggaggaacctgtagcgggtgctgggctccaggcctgagatgaggatcttgctctggtcgccgtccacgagcaaggcctggggctgcccattcgtgtcctcatactggaccacgaaggaatcaaaggggccctgggccacgctccacgagaggcgcatggagtctggggttgtgtcggtcacggtcagcactcctaggcggggctcttcaggaggctcaggggcctctggggctaactctggggctggtgtgtcctcttctggggctgcgtgggagaagcccaggggagaatctgagtgaggggcgccatggggtgctccatttttatcttccaggcttggcccaaggctgaggtgggaagtttataggtccaggcccagtcagacaatgaagtcgctgtggcctcgtgactcctgcgagctcccgcgctgtctgagtcaggtgctcgcttcccccttccacaccccggtgtcctgccgagcccacctcgagatatcacaggctctggccccacccatgccgggatacattcactgagcttgaggagtgtggtgctcccttctgagagaagctgagggtggaactggctggttgaggtgactggcaaatcccaccagccgtgccgtggtcaggcctgtctgaggtgggcatcagcgagctctggaagaggagcctgtaccacaaatgcagccactgctgttggtttctgtgtccccgctcattttgttttccagtgatgttcctcttaagaaaatgctcctgactcatccacggcagggaggtttgccactatctggacaaggccacccttcggggaggcgacagcagccccagcgagtaatgaggagcagcggcagtgacggggcagagtcggggctgggagattagagagcccctcccagggcctttccctcccgcctggcctggctcctgctctggactccttgatggatgttgaagcccacagggctgcagactcctcctccttcctgggcacaggccaggtcaccccactccggcctgcccactcctgcagtcatctttgtcttcagaccaaatgcacaagtactttgttaaaggtatcccatctgcagctcaagcctgcagcccctcaccttttggtggctcctcaggcctctaggccttattcacctttcccctttcctgtgccacttctcctctagggcgccaggctgtccttggcatggtccggaaggcaaagtaccgggagctgctcctatcagagctcctgggccggcgggtgcctgtcgtggtgcggcttggcctcacctaccatgtgcacgacctcattggggcccagctagtggactggtgagtctttccctggcctctggcagattatggagcaatgacccaaagtgggatttcctcccagctcatgcttagtttcctagtgaaggccagtggctctcattcttctctggaacccgggagcaccccttcccaagttctaagttctcctcacagcttgagcctaggcgtctggctccagccttgtctttctcctgcacagcatctctaccacttcaggaaccctcctccgcctgccagagacatgaagattctgctcatcattgctcagctcctcagagtgggccgggaggggactagaagagctgcatgatggtggctgagacagggtcaccttgggaaggcttgggagccaggatgagtgtcgggctctcgtgtgtgcaaaaggtcagatgtgactgctgctgtttgcctggtttctgacccagtggtggggtttgagcaatgcttctctgcccttccatggaaagtggaaccagaaatggtgccaaggctgtggctgttccctttcgtgtaaaatggtgctgttattactctgtcttgaaataggaaggtgggatttctggggaggctggtgaaggagggcagggttcttttctctacgtgtcatgttaaaattgccaaataaagtacctctgcctgtgatattttctggatgtcctttatttactgtgacgtgtgtttgggtgccttgtttaggggtagaggtgaagtctgagctttgcctcattcagagaggaaaggggtcaggggttcactctgacgttcaggccattctccctgtggagtggtgagggtgtacctaatctcctaaaccacggaatttctgttagggcctaaaaaagcaaaagcctagtatagttcaatttgtgttggaatgaaagtaagagacaagtgtcttagaagcctgtcattgttttgtgagggcctttaaatatcctgtactcgtgggccatgttgggcccttgtacgcccaggtatacatgagcttgtgtgcacctataccctgatacagatatacctggtagggggaggtgctcaggcactggaatgagaggagttaacggggaaggacagggttatttctgggccaagattcagagtttcccatggacacccaggtgtccggggtgcccccacaactctgggcctgaggccagttgcacttcttggctgtcacgtggtttcccagcttagctgggctgggggaggagcaaggtccagagtcaactctgccccgaggcctagcttggccagaaggtagcagacagacagacggatctaacctctcttggatcctccagccatgaggctgctctgggggctgatctgggcatccagcttcttcaccttatctctgcagaagcccaggtcctggaggcgggatgctgggtgcttggattggggcagggctggcatcgggacccgattcaggagtgagggagagcaggggtggaggtgtcagagcgaagtctgactgctgatcctgtctgttctccccaggttgctcttgttctctccttctgtggttcatctgggggtccccctatcggtgggggtgcagctccaggatgtgccccgaggacaggtagtgaaaggatcagtgttcctgagaaacccatctcgtaataatgtcccctgctccccaaaggtggacttcacccttagctcagaaagagacttcgcactcctcagtctccaggtaaccagaccccatgccctcctgctgcttgtgggggcctcctgccctgttcccatctgtcttgtaagtgtcatcatcttcccactggcctcctcccctcctgtcttcccaccctggcattctccttccacgtttctcccttggtctctgtcctttttggtcagctgtctcttgctctgtgacccgctccctctccctctccctctcctgacaggtgcccttgaaagatgcgaagagctgtggcctccatcaactcctcagaggccctgaggtccagctggtggcccattcgccatggctaaaggactctctgtccagaacgacaaacatccagggtatcaacctgctcttctcctctcgccgggggcacctctttttgcagacggaccagcccatttacaaccctggccagcggggtgagtctcagccccagggcctcaacctttaaccccctccgagccctctcaggatgagtttggtgccccctaagtgagataacctgaaagaaagtgccacacagaaggggtgcttaggaaacatttgtcccctgctccctctgtggagtttgacccaccctccccttgcacatggacccctgctcacctctctcctcctccactcccagttcggtaccgggtctttgctctggatcagaagatgcgcccgagcactgacaccatcacagtcatggtggaggtgagtccccgacctctggccttcctgatcctggccactgatgtgacctcctgcctgtgagcacttctccccttgcagaactctcacggcctccgcgtgcggaagaaggaggtgtacatgccctcgtccatcttccaggatgactttgtgatcccagacatctcagagtgagcgctcccaatgtgggggctgcccccaagctacaccaccccaattcctgttaggctctccacctcccacacagaggcacgtccccagatgccctgaccctcagcctcctgagcctctggttaacccccacagtcctcttcccagggaagcaggctgctggctctccgtgccccactgtacagatgggctgagccccttccttgtccattctcaggccagggacctggaagatctcagcccgattctcagatggcctggaatccaacagcagcacccagtttgaggtgaagaaatatggtgagagctggaaactggagggacaggcagctgctttcctgaaggaaataagggtggaaggagaggtactgggagcagctcagggcagggagatatgggtgccacagccctgagcagaggggagtctttgagctggagtctgacctgcctatcccttcaccctgggtcagtccttcccaactttgaggtgaagatcacccctggaaagccctacatcctgacggtgccaggccatcttgatgaaatgcagttagacatccaggccaggtaatacctccctccccacctctgcccaccagcaccgggtcctgctccctactcagtatgaatgggctcctgcttccctgccctcgggccattattccccccagcccttggcccaccctcttctctctgccacgacaggtacatctatgggaagccagtgcagggggtggcatatgtgcgctttgggctcctagatgaggatggtaagaagactttctttcgggggctggagagtcagaccaaggtaggaaggagaataggggctggggaggggaaggggcaagggaggtgaggtgggagactcagtctcaccctatgtcctgtttctttctatgccccagctggtgaatggacagagccacatttccctctcaaaggcagagttccaggacgccctggagaagctgaatatgggcattactgacctccaggggctgcgcctctacgttgctgcagccatcattgagtctccaggtgggtgactttcccttattgtaaccccagacccttgcctctgacctctgagctaaccctctgtcctccggcaccaacaccaccccacttctcacatctcatctcagactcaaaaccaggaaacacccaggagacctggtttctctccaactctgtctctgtgactcggcccttttccctggctgagtttatttatttctttgctcgttctgctcattccttcactcctccagtggacatgtgttgttcaatgccccgtgctaggcctcagcatgcacagacatgttggggaccagcctcaacgccacccgtagggttcctgaagtccattggtgacacaggaatgagaagagacaggttaagagttcataaagagtgggggccagggggccaattgcaaaatggaggctgcaaaaggctcagagctctggtctccacactattttttgagtacagtcactcagatctaagaagcagatgttcagggagaaacagtgaaagggaggcagtgggtcataggcgtaatctatagcaatagagttttaaatgaatctcctttgtgctcaaacagcatgtctttaaattatcggagagtagctggtggaagtgggcttagctagaagactgcatgtctgtccaatgcttcaaaggagggtctttctccttgaacagagtgtttacagataagacagggggtctcactctgagcatgggaacatgatggcaattaggaggcttttcttctcagaggcctcttgtggctttccacaacttattgtctcatatttttatggacagtttatacaggcaccccacaagtccttttcccaacatgcccccctccctttttttttttttaaccgctattgctattatggcttatttgtggtgtttggtctgttttcagaagtgtcttttgcatctgtagactaaaagtaaacagcataaacagatacacattaaagtaaaatttgtaatagttgatcctttaatggtcttaatctgtttaagaggatttatgtttgaaagtccgtcagtagctccaatgagaatgtcagtctcaggcaggagggttaaatgagcctgagatgctttaaaaacctgtttttttaaaatttggttatatttaatgttaaatttttatttttttcttttagatgatgtctaactttttaaaaatgatgtttagtagtattatacgaatggggagttatgtagaaattggaagtatttcaattacattgtacttctaattgatgttttaagtttattgtacgatcttccatttaaataacagtctgtctaagatcatttgtttgatttgtcaattgttggtctatttgggtctgagaattccacaattttgaggaattttttgttaactatttatatattttgtagtttgaacagaggagtgtaaagcaattccagcagccgcagcagtagctgtgactgcaataaggcccataagactgttataagggtaaaaataaatctctttgttttggtaaacacttttttttaaaacatttttgtgacaatatgaatggaaggagaggctttctaaggtctattgagggaaaccagtatccaaactcctttcttagtttttatcagtaacacagatgtttttacaccgaacgtggaattaatacaggtgaaaaggtgacagttttgacaagtaatagtttgagaattaggtcgaatgtcaatatttttgaccattaacataaaaggagggttgacacaactctgaatgggcactgttttgttggaagaaaactgatacgcaaattgaagtttttaaccttttttttttaaagataatatatttttttctaaacttaaatatgagattgggccattattaactttcataatttggagtgtttagggcctattattggattaattattttgggatgtgggccagctgtactaaaattggtccaaattatgggaaaatgagcacgtttttcagtgtaagtagtgttacctttttgatagtatagtttctgttttagttttgtcttgtatttattattttgatgggtacaattaactgtaaaggtcccctcaggggaccaattaatgacaatttcataggaattattttgtagtaccatagtgtgatcagagatgtaattttttttaattaatatttttaaattatttgaccattgttaaggttgttggcacctcttttttgggggcttaaactgttaattgaattgaactctgtgaatgatccgggctccatccagaaaataaatgataggatactggtctttgattatgacctggaattttaactagtcaatgttgtcggtagccttttaggcaaccgatagttggccttatgtaaagaggggggaactgataacctatggacacatttattaacttttttttttttcctttgggtgagagggcccatgagtatttgtaggcttagggatccaaacgctattattaacataaacttcaactgggggttttaaccatgtgacaggcctaattaaaggcaggaatgggacacatgcccaataggtataattttgggctgttgtagccacaggtttgttaggcgaggaggtcactgtttttattttggctttgtattctaggattagtaaataacagaagacaaacatgagtataattagtaacttttttttttagtaaaagagtgacctgtagtgttacttggcatcttagtttactatatgttattaatgaggaaccccactgggggtatgttaatttattctagctaagcagttatgttattagaagctgagaagggggtgtttgttaaagtaacagggcagaagaaaggcggatttaagatacgagcttaatacagtgtagcaggtataggtagtaggcaaagtgagagaattaaaaatgaataaattatttggcttagacttttgtttttttagtataatgtctgaggcctgtgttgtttgtggaagtcgcattgttgaggctgtagttcctgtagggtcttttttaggctggttcaaatgtttttttattttttaattttttatcctttgatgaggatgtagtctttaggctggtactggaaattttaggagtggcgtctgtgttaagagactttttacaatttttaaagagcaggttagtgttttaagaaaaacttgtgttttattttaatgtttagtttatagaaaactggatgatatctttttaactttagtaaatacgtttacacacggaattttttacaattatcattttaaaacttgtttagatctttaaaacaaaattaaacaaccttttttgtataaattttttataactttttttatgacttttacagacaatttttaacatgtcttaactttttatgttttataatttttttactaaaggtacatttttataactttttaaatttttttacttttttgtatttttttgatttttgtcttagtcttttttttacttttatttttttaaatgtgtaataattagatgagtgttggtaacaatggatgtatgtacatattttagtttttaaaatttagggatgtgtttaacatctgtttgccagaactgactaggttccaattctttacggttaacacctattgaaggagggtatgtgcctgtgagctggtaatctgggcattgtgggataatttgtttagccagcctctgtgtaagttgaaattatttagataagtttctccaattttggtggaataatcgatgtgattgggtggcttggtcaagcagtgatgtcataacctgaaggtctgcttgattattgccgtaagccaatgggccaggcagagagctgtgggctcgaatgtgtgtaataaaagtaggatgtgtaccttggtctagtaattgttgaagttgaagaaaaagaccacacagagtgggctccagagcaaacttaaggctgtaatagtttttaaataaatacacagaataaccttagctctctgaatgttagtaaattcagatcaagtgattggattatgtggtctccaccagactgttgctttttcatgtttaccagacccaccagtaaaaacagctatggctccttccaaaggggcatcacaagtaatttttggaagaacctatgtagttaattttaagaattgaaaagtttttaggataatgattattaatacatccaacaaattttgttaaattaatctgtcatgtaactgagttaataaatgcctgtttaacctgatttttatttattggaactataatttttattgggctcagtgccacaaaatttaataattcatatatgagcctgtccaattagaattgccatctgatttaagtatactgtaagtgcttttatggtattatgtggcaaaaaggaccatttaactaaatcatcattttgaacaataacccccattattgtgtggttagtgtgaagtagggaacacaatgaattataaaggcaagtctgagtcaatcctactgacctgggcttgctgaattttgttttcaattactgataactctttcatggcctcgggtgttagttctctgttactgcgtaagttggtatttcccctcaatattgagaagagattagacatagcataagtaggaattgctaaattgggccaaatccaattaatatcttctaacaatttttgaaaattatttaaggttttgaaagaatctcttctaatttgaaccttttgaggcttaatggctctatcctgtacttgtattttcaaatactgaaaaggagtggttgtttgaattttgtcaggtgctataagtaattcagcatttgtaattgtcttttgcaaagattaataatattgaataagttggtctctactttttgctgcacaaatctggaaactgatctctaacaggctggatagttctgcctacaaaagtttgacaaactgtgggactatttaacataccctggggcaaaactttccaatgatatttggctgcaggttttttgttattaacggcaggaatggtaaaggcaaattttttgaaatctgcctctgctaaaggaattgtaaaaaagcagtcttttaaatctataataacaagcggtcagtctttagggagcacagtgggggatgggagcccaggttgtaaggctcccatcggttgaattacagcgttgacgccatctaccggactttttcttaattacaaatactggggaattccaaggagagaaagtgggtgaaatatatcctttttttagtagtttattttataaagcacccccaacttttccttagggagcggccactgttcaacccagacggggcgccgggtcatccattttaagggaaattgctccttcactgtaataactgtagggtgaacctgaattgccccatctccataatgaactgtgggtcgggcaataatgggcacggtgagccaagtctcgggctccctccccctgcacccactcggctgaggaggaggtggccattctggacatttctctacaggaaccgtgggctgaacaattttttgagtaggtttagggagactggggagattggcataaatcatcttcagactctcctttttgttagtactcggtagaggtggttcagagttctgattatcaaactcctctctctcctcctctgactcagcctcattatctgtctgaaaaggctccagtgctgcatgcaccaatgaccaaagcgaccaaacaggcaaaggaatttcctttccttctctatatgctcttttaaggtcctttccaactccttcttaatgttttaatttcaaagtttcctgttttgggaaccaagggcaaaattgttccatagcatgaaacaaatccataagattttccgtatcaacttttaccccaccatgcatgcttgaagagctgccgtaggaagctcaaatacgtggtgtacttactttcagtttttcccattgtgtccctagctttctctgggcgccccgcttacctgtagaggttaaaacttttatgtccttgggagtcctttgttcgttggtcctctgtttcacatgcttgagcgtttcctcaccagattcttttgggccccacgttgggcgccagaatgttggggaccagcctcaacaccacctgtagggtacctgaagtctggtggtgacaaaggaatgagaagagacaggttaagagttcataaagagtggaggccagggggccaattgcaaaatggaggctgcaaaaggctcagagctctggtctccacactatttattgagtacaataacttagatctaagaagcagatgttcagggcaaaacagtgaaagggtagcagtgcgtcacaggcataatctacagcagaagcgctttaaatgaatctcctttgtgctcaaacagcatatctttaacttatcggagagtagctagtgggagtgggcttaactaggagcctgcacgtctgtccacattccaatgcttcaaaggagggtctttctccttgaatacagtgtttacagataagagagagcaggtctcgctctgagcatggcaattaggaggcttttctcctcagaggcctcttgtggctttccacaacttattgtcccatatttttatggccagtttatacaggcaccccacaagtccttttcccaacacagacaggaatacggcagcctgtgccctgggagctcactgtcttgtgggagggaaccactcaagccactccccacttgtcctcctgtccctctcttcttgggctctgtcccccacctctctctgtcctttgtcttgcaggtggggagatggaggaggcagagctcacatcctggtattttgtgtcatctcccttctccttggatcttagcaagaccaagcgacaccttgtgcctggggcccccttcctgctgcaggtttcttccagaggggaaggatgagtagggaggatgtggtagttaggagggctcagggtctgaccactctcttttgcctgccctcctttacctgcctaggccttggtccgtgagatgtcaggctccccagcttctggcattcctgtcaaagtttctgccacggtgtcttctcctgggtctgttcctgaagtccaggacattcagcaaaacacagacgggagcggccaagtcagcattccaataattatccctcagaccatctcagagctgcagctctcagtaggactcctcggacccctgggagatggtgggggaaggggaggagggtgagctggggtcccaaggatccatggcctgacttggggggaaggtggggtacttggctctgagctactaccctattcgcacctgaccccctctccaggtatctgcaggctccccacatccagcgatagccaggctcactgtggcagccccaccttcaggaggccccgggtttctgtctattgagcggccggattctcgacctcctcgtgttggggacactctgaacctgaacttgcgagccgtgggcagtggggccaccttttctcattactactacatggtgtgcatgagctggggagtcacggagggctggggtgcagggaagagccctctgggtggggctgggggggttcaaggctgaggctgtcccatgaagaggcaaccactcttgtccctcccattcttggcccagatcctatcccgagggcagatcgtgttcatgaatcgagagcccaagaggaccctgacctcggtctcggtgtttgtggaccatcacctggcaccctccttctactttgtggccttctactaccatggagaccacccagtggccaactccctgcgagtggatgtccaggctggggcctgcgagggcaaggtgaccggggtcaggagagatggcacttgtgccgagggggttgaggacagggtgattgccaacagggcatggatttagcttgggggcagtgaggataccgggactgaaggaagctctcccactctgaccgcccccacctgccgcccctgccagctggagctcagcgtggacggtgccaagcagtaccggaacggggagtccgtgaagctccacttagaaaccgactccctagccctggtggcgctgggagccttggacacagctctgtatgctgcaggcagcaagtcccacaagcccctcaacatgggcaaggtttgtccagaccctctccacagctctctcacccctccatggctcatccccctgcttccctgagccttgggcgcagcccctggatcccactgaggctccccacagtctcttccccacttggccctgtggtctccatctcctggctctgtatcctttcctatccccccatgtgctgccctctcacctgtgccgagtgctcagtcctgcccctcagccacacttggctcctagcattcctgcctttcttgcaggtctttgaagctatgaacagctatgacctcggctgtggtcctgggggtggggacagtgcccttcaggtgttccaggcagcgggcctggccttttctgatggagaccagtggaccttatccagaaagagtgagaacagagaaggaaggggagtgggtggcgggaagataaggaaggaggaagggcctgaggggaccagctggaagagtccgggcaggaagggctgggcaggggaaggggaggaggggaggaggccgagtgcctgacggctggactgcagcctttctctctaccaggactaagctgtcccaaggagaagacaacccggaaaaagagaaacgtgaacttccaaaaggcgattaatgagaaatgtgagttgcgggtgcctaggcagtagcttgggctctccacctgggatccgggttgggggtctgcctctctgcccctcggctccttgctgaacccacgtgtggtatttggggccagagatccgaattccgggattacgagtggaaggtgggcagctctctccagcagcctctcttatgttgctggtctcaaggggtcggggcgggggctgaggtgtatgtcctttttgtcctctcatgctcacccccacctggccctgcagtgggtcagtatgcttccccgacagccaagcgctgctgccaggatggggtgacacgtctgcccatgatgcgttcctgcgagcagcgggcagcccgcgtgcagcagccggactgccgggagcccttcctgtcctgctgccaatttgctgagagtctgcgcaagaagagcagggacaagggccaggcgggcctccaacgaggtgaggggctgggtggggctagggcacaggtggcggcgcttggaaaggcagaacggtcccctcctcactcccgtccaccgtggtcccccagccctggagatcctgcaggaggaggacctgattgatgaggatgacattcccgtgcgcagcttcttcccagagaactggctctggagagtggaaacagtggaccgctttcaaatgtgagagtgtgtgccggcccggccttttctctgtgctgtgtctcggggccagccggggtagacgggccttctctgcctttccctacacagattgacactgtggctccccgactctctgaccacgtgggagatccatggcctgagcctgtccaaaaccaaaggtgatgtcaccctgtctgggcctcaggtgaccctgcttccatttccctgtaccccagctccctgttccctttgctcttagtgtaggaagagggtccagtgatctggggaggtctgtgccagcgtgcagctggcgtgggccagagggcagaggcggactgagacagagctgggtcacccccacccctccctcctgtggccctgaagctttgatggcccctctgatctctgcccctgtgcccacgcttcctttccctcaggcctatgtgtggccaccccagtccagctccgggtgttccgcgagttccacctgcacctccgcctgcccatgtctgtccgccgctttgagcagctggagctgcggcctgtcctctataactacctggataaaaacctgactgtgaggccccataggagcctgagcatacaggagttgggggagccagggcccagtgaggggtggggaggctaaccgggccaggactctggccatcctcgttttcctgccctcaggtgagcgtccacgtgtccccagtggaggggctgtgcctggctgggggcggagggctggcccagcaggtgctggtgcctgcgggctctgcccggcctgttgccttctctgtggtgcccacggcagccgccgctgtgtctctgaaggtggtggctcgagggtccttcgaattccctgtgggagatgcggtgtccaaggttctgcagattgaggtgaatggagcacccctgaatataagtccccgggcccccagctttgtcctccaccctcagcactctctctgctggccaggccaggggcccaacacccaaaccaatgccttggtctgttcccatcttctacaattctgatccaactctgtccctggagttgaaactcaaagttctgggggagtctgcgctagcagggcaggctgtagtcctgtgtgacctcacaaccatgttttccctgagacagaaggaaggggccatccatagagaggagctggtctatgaactcaaccccttgggtgagtgaccctctacctccagccattggtttcctaagtgggtacaggtggtgggggatgtggacagcaggacaggctgccaacttcccccatttccccagaccaccgaggccggaccttggaaatacctggcaactctgatcccaatatgatccctgatggggactttaacagctacgtcagggttacaggtgggagtgccctttagtcccttcccagtggccaccttcggattcatgtgggacttgtggatccctgcttggtcccactccccgtgagcctctgacacagagtcctcagacctccaccctctccctcccatgtagcctcagatccattggacactttaggctctgagggggccttgtcaccaggaggcgtggcctccctcttgaggcttcctcgaggctgtggggagcaaaccatgatctacttggctccgacactggctgcttcccgctacctggacaagacagagcagtggagcacactgcctcccgagaccaaggaccacgccgtggatctgatccagaaaggttctgggtgcaagggcaagcaggaggggggccaggaaaggacagttactggaagatggacagcccaggaggctacagagggaaagaaagggggcccctgatgaggatggggagcatggccttgggctcaaacagcagaagggtgagtgtcacctgagcggccacctctcctctccaaggctacatgcggatccagcagtttcggaaggcggatggttcctatgcggcttggttgtcacgggacagcagcacctggtgagcttgggagagtggttccagggttctgagggggtcagggctggggcaggggtgggacagagctggtatgatgggagggtggataaccaggcacctgggggcgtgggcataatgagaagcaagtccttatccccaaccctcctttcctgccctccaggctcacagcctttgtgttgaaggtcctgagtttggcccaggagcaggtaggaggctcgcctgagaaactgcaggagacatctaactggcttctgtcccagcagcaggctgacggctcgttccaggacccctgtccagtgttagacaggagcatgcaggtgcgggcatgctggggctggcccgagaagcgcctgtcggaggactctctttgccccttccccctcctgtttgacatcttttctccccttactaggggggtttggtgggcaatgatgagactgtggcactcacagcctttgtgaccatcgcccttcatcatgggctggccgtcttccaggatgagggtgcagagccattgaagcagagagtggtaagttcagtggcgtttctgccctctgctggcccccagctctctccctttttcctcaggaacccaggggtccaggcccaagaccctcctcccgttttcttccaggaagcctccatctcaaaggcaaactcatttttgggggagaaagcaagtgctgggctcctgggtgcccacgcagctgccatcacggcctatgccctgacactgaccaaggcgcctgtggacctgctcggtgttgcccacaacaacctcatggcaatggcccaggagactggaggtgaggggtgaggcgctcctggcagtgagcctgaggcccaggggaccttaggatccctgagtgtgcccagagggagaggctggatgaagactcagaggaggaatgaagttataagcaggggtgggttgggggagactcaggagagcccagcagggggtggctaagggccaggggaccaggctcttctccctgccttcctgtttactcgtggtctcccttcactttcagataacctgtactggggctcagtcactggttctcagagcaatgccgtgtcgcccaccccggctcctcgcaacccatccgaccccatgccccaggccccagccctgtggattgaaaccacagcctacgccctgctgcacctcctgcttcacgagggcaaagcagagatggcagaccaggcttcggcctggctcacccgtcagggcagcttccaagggggattccgcagtacccaagtaggggccgtccccgggctctggcgggggtgggtagtcctcagaccaagggcttgcttgagtcctggctcaacctccctaggacacggtgattgccctggatgccctgtctgcctactggattgcctcccacaccactgaggagaggggtctcaatgtgactctcagctccacaggccggaatgggttcaagtcccacgcgctgcagctgaacaaccgccagattcgcggcctggaggaggagctgcaggtgaaccactccctggtgaaccactccctcgcctgggtagccaggacacctgggcctcgtggccaggccagaagccgtccccaccctcccacccgtggaatccccgcagcacttcttcctggggtcttcgggggaagactgacttcctggctgtgtgacctggagctctgagcttcagttttctcacttgtagagtaacatacacagagttcaccctacagggtcgttagaaggctgaagtgagataattcatgtgctggtataaactttgtggaaatgtgaggtggggagaggaggtggggctgttttgaggaaggagataagttattggagccgcaaaaacaggtttgcttgtgcccttctaacatcgccttcccttttctgttgctgaagttttccttgggcagcaagatcaatgtgaaggtgggaggaaacagcaaaggaaccctgaaggtgagggccagggaaggggtggggccaggcactggtggaggagagggtgtggagtgagaggcctgtgggcagaggcacatggtccggggaaggaggcagacacctcagggttggtgtcccgtgcttccgtcctgggtgtttttccccctgcttgctttcgcttgctctccccatctctgggtacctgttgtttcctttacccgcctcagtgctggtggctccgaatcccactcctcagcccaggcctcttccctgaaccatgggccccactcgtcccactcccacagcacctcagacgaggcatgtcccaaagcccttcttcattctgtgtctcttgtctggctggtgggagcccctcccagccaggagcccagccactactctagaggccgtgttagtggcccctctcccaagcctgtccttatgtccctagtgactcctcctctgctcccctgctgcctgtggcccttggtgctgcatcctagattctgtgctgagacggccttctccctacctggaacttctctctacctcctgtctcccctgtctgatccactgtccacacggcagtgacactgaccttccaaaagccccagccagatcagccttggggaaaagtcactccccgctgcccacggctcagatggctgggcctctgcccacccctccggccagacagctctccttgtctacacagatccccttgcctttcctgtccttccctgcttcttggcccacaggacaagctctttcttctccttcaagccttggccagaagcctttcctgagcttttcagtccagcctcttcccagcacagtctggagtgttggcctctgggggcaggcccctgcttctttacctctctgtctcgcctgacgcctgtggcgaatgtggtgccactcgtgtgtgtggactgtgcagtgacggggaggaaaaggggctgaaggcctcaaatcctgtagcccagggagatgcccttaggtatggcaccagagaggtctgtggcctcacatgtcccacgtcctctccctgccccttgctgagccaggtccttcgtacctacaatgtcctggacatgaagaacacgacctgccaggacctacagatagaagtgacagtcaaaggccacgtcgagtacacgagtgagtgtgggggttgggaggccttggggccaggcaggggctggcgcagggagccgggtggccatcccagccctcctcacaatgcttccctgtgcagtggaagcaaacgaggactatgaggactatgagtacgatgagcttccagccaaggatgacccagatgcccctctgcagcccgtgacacccctgcagctgtttgagggtcggaggaaccgccgcaggagggaggcgcccaaggtggtggaggagcaggagtccagggtgcactacaccgtgtgcatctggtgggcgccgggagctgccctgggccaggggagggagggcaggacccaggctggggctgggcttctggagcccgcgcaggcagaacctggacgacagctcacacgtctccacaggcggaacggcaaggtggggctgtctggcatggccatcgcggacgtcaccctcctgagtggattccacgccctgcgtgctgacctggagaaggtgtggtcagccacccagggcaaccccctctgtcccaggtactgagccctgtcatgtgcagggcctgtgaccaactccccttttccacagctgacctccctctctgaccgttacgtgagtcactttgagaccgaggggccccacgtcctgctgtattttgactcggtgagtggggagagatgaggcaggaagggactcgatggcaccgggtttactgagtatgcgttaggaggtttctcaggagacagctgtgtcagcggctggtgctcttgagaacttgtgatgtcatcagagagaaggacaagaatgtgagcccgtgagacacagcagagtaaggggcagacctgcaggcggcagggaccgatgccagtcagcagggaccctcagggtttgagagggagtctttcctaatgctggttttattcagcttgaggggctgcctttgtttttttgttgaacttcctatcttttttttaatattaaagcgtattttcctttacaaagtgatggtggccatagatgatagttgtatttgtcttttcacgaccttatttggctaaaatagttatcaaccctcttacggctctcaaaacatttttatttatttatttagtaaagacagggtctcgctctgttgcccaggctggtcttgaactcccggcctcaagcgatcctctggcctaggcctttcaaagtaccggatttacaggccagagccaccatgcccggccttcaaaaaaagttttggaacatttactgtaacctctgggagaaaatgtgagaaaggtgtggtggctgtcattagccagctgtttgtaggtcagggagacccctacccagtgtgtgcagaggggccagcccccatcagctggggaagcctggctgacacatctgggttgaacacaatagaaaacacagagccaacaagattcccggatagggagctgacggtgcagcagcctagctcaggagggacactggcacggcaccgtgtggactgggcccgcgtgggcacgaggaggggtcaggcctgggacctgagtcggggggtcaggcaggatgacagaacctgcagttaggttgtggcaaataaaggaggacccagttgtatccatgacaaagatgaggccgcgaggagggcgagtgggtttgggggcaggcagagtgccttggagaacttacaggtcctgccacaatcctaatgcaaggatggagctgcaagttcagtttgggaatcatcagcctggattggtttggtggaagccagggagtggttgagacccccacaggggagctctgaggaaggaagttccgaaggagggaacgtaagaaatgaccaggtcagaaccaagggtggtccagaagctaacccttagcttagggacagtttcacagagaacacgtccatgatgcaagactctgctgagggcctggagcagtgaagactggggcaaggtcaccctctgggaagtgaagtcaccagagaccttgcggagcagctttgagagttctctgagtaggaaggtaacagaatgtgaaggacactggagagaaggccaataggaagcaaacaaaaacaggccaaggaaacccagtacagggggctgcagggcccagggagtgggtccctcatctctcctccccacgcttggccaggtccccacctcccgggagtgcgtgggctttgaggctgtgcaggaagtgccggtggggctggtgcagccggccagcgcaaccctgtacgactactacaaccccggtgagcactgcaggacaccctgaaattcaggagaactttggcataggtgccctcctatgggacaatggacaccggggtagtgagggggcagagagccctggggctccctgggactgaggaggcagaatggaggggcctgtgccctaactcctctctgttctccagagcgcagatgttctgtgttttacggggcaccaagtaagagcagactcttggccaccttgtgttctgctgaagtctgccagtgtgctgagggtgagactgagggcctggggcggggcagtggaggcgggatggccggggccccccccacactgtctgatgggttccccaacttcagggaagtgccctcgccagcgtcgcgccctggagcggggtctgcaggacgaggatggctacaggatgaagtttgcctgctactacccccgtgtggagtacggtcagtcttcccaccgaggccctggcctgaccctccctcggggaccggccgttttggtctctctgggtgtagcctgctcctcttacaggtcatgcacgcagcctgtttgctctgacaccaacttcctaccctctcagcctcaaagtaactcacctttcccccttctcctcaccccctcttaggcttccaggttaaggttctccgagaagacagcagagctgctttccgcctctttgagaccaagatcacccaagtcctgcacttcagtatgaagcaaaccggagaggcgggcagggctggggggagacagggaggctgaggtgtggccgaggacctgaccatctggaagtgtgaaaatccccttgggctgtcagaagccttgggcttggccataaatagggaggcagtggcacctctccatgggggtggcgaaggtggaatgagaggatctacacagagtccccagcctgggctcaccctgcaccttctcttcccctctgaccacttttgcgcacgtcatccccgcagccaaggatgtcaaggccgctgctaatcagatgcgcaacttcctggttcgagcctcctgccgccttcgcttggaacctgggaaagaatatttgatcatgggtctggatggggccacctatgacctcgagggacagtgagtcatctggtcccctcagtctcttgtcctccccatgcctcgccacctaggccttgcccctcagaagccagatgcctgtgctctccgtttccacctgccatcctcccgagccctgctgactgcccctttgccccctgcagcccccagtacctgctggactcgaatagctggatcgaggagatgccctctgaacgcctgtgccggagcacccgccagcgggcagcctgtgcccagctcaacgacttcctccaggagtatggcactcaggggtgccaggtgtgagggctgccctcccacctccgctgggaggaacctgaacctgggaaccatgaagctggaagcactgctgtgtccgctttcatgaacacagcctgggaccagggcatattaaaggcttttggcagcaaagtgtcagtgttggcagtgaagtgtcagtgtgtgttgctagggctgagagcagtgcccctgcccgatgcagttctgggcaggccaggttgacataaccttagactctctgagccctgatgacccttgggctgttcagctctgctagaacctcccagatgacccgctaggagtctagtgcttcacaggaccaccccgagcagaactgggacccaagagcctgcaccccaaggaccagagtccatgccaagaccacccttcagcttccaaggccctccactgcccggctgtcgccagtcaccacggcctcagacagggcttgtgctcagctgacacctgtgacacagctcttctgcctcatgagctgttgtccagctacacctccccgactctgtcctcgtgctgctggcggttctgaggtctgcagattttagctgagttccgggctgttgaaagcctgctgacgcttggttctgttatcagtggaatgaggtgactttcccggagttgtgcaatcctcaggtccggcagtgtcttcttccagttactggtttcaaacaagccaaaagtctgactttggtgtgtttgtgaatcctctgaggaagccgctgttctcctggggtctccccttcccaccggacctgcctaactttcccccatttagtggcacacctggggtcttcagagatgactccgcgtctgtccaaagaagtttggtgagatcagtttccgtagaggtcatgacagttcagcagcctgccatccagtcattcgacagaaattcgggaatctttcacttcatgccatgccctgtgccaggtgccagagatacagctgctcactccagggctcatcgctggggagacagataagaggacgggcagtccccaccctctgtgaaagatgtgatgtcagggagcagtgtggtcctgtggggcatctaaccaagtcaggggcattgccaggcagggacagggaaggcttcctggagcaggtggcctccaagtggggctctgaagactgagaaggagccaggaaaagagcaggggtagatgagggcatctggggcagaaggagaatatacaaaggcccagaggccgggggcaggacagggtacctttggggacattgcatgtaattgaccacattcggagtttggatttggaagtggtggaagagatggagatggtgagacaagtagtaagcacgtcagccttccaggtgcgctcctttccgatgagcactgtcttatcccacgtaactttgagaagtttgggcctttcccactgtggcagaggtttcctgaggctcttgcatacatggccctatggttgctcatcagatctttctcccagtagctgctcagcatggtggtggcataagcccattttccggagccagggattcagttgcagcaagacatggcccggtctgggaggtcaaccatgaagaaggcagtagctgtcattgcccaaccccagaaatcccaatcctgttttctccctctcagtcctgatcatggattcagcagcagcgaactcgccaatgtagtgggtggcacagccagggtcttgactctggctctgcagtagcacagtctggaaaagctctgaggggagagagacccccactggtccgagggtctggcacagagccagaaatgggggggaaggtatggggctgggtcgcctctgacctctcaggtaccatccaggaggccctggcctctcactgaacccggccactcctctttggcatggcctcttcccaaatccccaaactgcctccttacccacaaaagtggtctctgagtgtcagtccagtgggacccccaccccttatggcttcagttccccaaatagggctggacccttgatcctgatccagctgtggctatccagccccttcctggggactttggactttgaggggggcatgcccagttgtgctgggaatccatactttccctggctggagtagaacctgtggactgtagtcctgagggcagtcatgttctgcctgtgcctggaaacacaagaaacttgactgcagagagaagaaagaggagagaggaacagagcgaggaaaccgcccgtctccggggctttttctgttccctatccttgactttctaagaccagtggggtcccctcctctgcttctttttcctgagttctgtgaaattccccaattcttattttttatctcaaaccagctcaaggtgggctgttttcctttcaaccaaagaaaggtgctcctggtggctaaaggtacatattcgacagctagatttccaggctggaatcctgccctccacaacatgcgaacaatacccgtgttgcatatagagcatggctgtgaagagttgagtgagtgcccacaaagcacttagagcagtgtctggtacatgctattactccgcagcgggaaaccacttcctcctttgtcttctgggcacttttgtgagtgaaaggaggcactaataacaatcacactgggatacctgtatatactggaatgccccaggcaaaccaggcttaaactgtattactctatctgtagcttaaactaacaaacaacccacacaaatcacattttgttcttcaggcgattcaggaaggcctattaggcagggactgccattttctctctgagacaaacatcatgccagtaaactggcccacggtggggtggcagagggagagggcccaggtgggggcggacactattgcctgcacagttgatgtggaaccagaaagctgactctggatgcaggaaaaaggtcagggttgcatttcccttccttgcttcttgatgggtgatcaatttttttgaaatacggacgtcccaaggccaatgagactggtgtcattccagaaaagggccactctgtgggcgggtcggtgggagggtacctgaaggtggggtcaagggaggccccaaaacagtctacacagcaggagggatggctggggctcttgagctataagtggcacctcagggccctgacgggcgtctcgccatgctgctcctgggcctgctgctgctgctgcccctgctggctggcgcccgcctgctgtggaactggtggaagctccggagcctccacctcccgcctcttgccccgggcttcttgcacctgctgcagcccgacctccccatctatctgcttggcctgactcagaaattcgggcccatctacaggctccaccttgggctgcaaggtgagaggctgatctcgctctggccctcaccataggagggggcggaggtgacggagagggtcctctctccgctgacgctgctttggctgtctcccagatgtggtggtgctgaactccaagaggaccattgaggaagccatggtcaaaaagtgggcagactttgctggcagacctgagccacttacctgtaagggccgggggcattttttctttcttaaaaaaatttttttttaagagatgggttcttgctatgctgcccaggctggtcttaaattcctagtctcaaatgatcctcccacctcagcctcaagtgtgagccacctttggggcatccccaatccaggtccctggaagctcttgggggggcatatctggtggggagaaagcaggggttggggaggccgaagaaggtcaggccctcagctgccttcatcagttcccaccctccagcccccacctcctcctgcagacaagctggtgtctaggaactacccggacctgtccttgggagactactccctgctctggaaagcccacaagaagctcacccgctcagccctgctgctgggcatccgtgactccatggagccagtggtggagcagctgacccaggagttctgtgaggtaaggctgggctcctgaggccacctcgggtcagcctcgcctctcacagtagcccccgccctgcccgctgcacagcggcctgctgaactcacactgtttctccacagcgcatgagagcccagcccggcacccctgtggccattgaggaggaattctctctcctcacctgcagcatcatctgttacctcaccttcggagacaagatcaaggtgcctcacagcccctcaggcccacccccagcccctccctgagcctctccttgtcctgaactgaaagtactccctccttttctggcaggacgacaacttaatgcctgcctattacaaatgtatccaggaggtgttaaaaacctggagccactggtccatccaaattgtggacgtgattccctttctcagggtgaggacctggagcctagacacccctgggttgtaggggagaggctggggtggagggagaggctccttcccacagctgcattctcatgcttcctgccgcagttcttccccaatccaggtctccggaggctgaagcaggccatagagaagagggatcacatcgtggagatgcagctgaggcagcacaaggtggggactgtacgtggacggcctcccctcggcccacagccagtgatgctaccggcctcagcattgctatgaggcgggttcttttgcataccccagttatgggcctgttgccactctgtactcctctccccaggccagccgctcagcccgctcctttcaccctctgcaggagagcctcgtggcaggccagtggagggacatgatggactacatgctccaaggggtggcgcagccgagcatggaagagggctctggacagctcctggaagggcacgtgcacatggctgcagtggacctcctgatcggtggcactgagaccacagcaaacaccctctcctgggccgtggtttttttgcttcaccaccctgaggtgcgtcctggggacaagcaaaaggctccttcccagcaacctggccagggcggtgggcaccctcactcagctctgagcactgtgcggctggggctgtgcttgcctcaccggcactcaggctcactgggttgctgagggagcggctggaggctgggcagctgtgggctgctggggcaggactccacccgatcattccccagattcagcagcgactgcaggaggagctagaccacgaactgggccctggtgcctccagctcccgggtcccctacaaggaccgtgcacggctgcccttgctcaatgccaccatcgccgaggtgctgcgcctgcggcccgttgtgcccttagccttgccccaccgcaccacacggcccagcaggtgactcccgagggttggggatgagtgaggaaagcccgagcccagggaggtcctggccagcctctaactccagcccccttcagcatctccggctacgacatccctgagggcacagtcatcattccgaacctccaaggcgcccacctggatgagacggtctgggagaggccacatgagttctggcctggtatgtggggggccgggggcctgccgtgaaaatgtggtggaggctggtccccgctgccgctgaacgcctccccacccacctgtccacccgcccgcagatcgcttcctggagccaggcaagaactccagagctctggccttcggctgcggtgcccgcgtgtgcctgggcgagccgctggcgcgcctggagctcttcgtggtgctgacccgactgctgcaggccttcacgctgctgccctccggggacgccctgccctccctgcagcccctgccccactgcagtgtcatcctcaagatgcagcctttccaagtgcggctgcagccccgggggatgggggcccacagcccgggccagagccagtgatggggcaggaccgatgccagccgggtacctcagtttctcctttattgctcccgtacgaacccctcccctcccccctgtaaacacagtgctgcgagatcgctggcagagaaggcttcctccagcggctgggtggtgaaggaccctggctcttctctcggggcgacccctcagtgctcggcagtcatactggggtgcgagagaggtgggcagcagctcagcctccccccgctggggagcgaaagtttcttggtctcagcttcatttccgtgaagggcaccgagaactcgaagcccttccagtggtaccagctcactccctgggaaaggggttgtcaagagagagtcaaagccggatgtcccatctgctcttcccgttccccttaaggaggtagctcccagcactcaaccaacctccccgcagagctcccttcctgaccctccgctgcagaggattgaggcttaattctgagctggccctttccagccaataaatcaactccagctccctctgcgaggctggcatgattgttccatttcacccagccactcagtcccttgcctgttacactgtggggctgaaacctaggcaggccgagccccagccaccccagctctgagccgcctccccacccctcacctgatggtccactgtgctcccgtagagcccgttgaggttggcgtagtggcagttcctgtaccaccaggcccctcggtaggagacagcgcaggagatgagcaagctgttggggtcccgatcacgggcagagaagacactgccgctgtggtagctcatggagtcccctgggcagggtggaggaaggagccatgagggcctcccctcccagcctcaccctcccagcctcacagcctctgcttacctgcggtgccgtggtagccctccaagtggaggcggtagtactccgcagccgagtctacgtggaaggagtcgtactgggcgaacacagcctcgtccccagcccgcaggtccacgcgcatggagtagtcacctgcctgtgtcaggctgtgcagggcctcattgcctgggggtgggatacgtgccctcatcagggtcctggtgtccacagggcccccatccccatccgtagttccccagtccctgtgaggcactgacccagccagaactctccagagatgttcccaaaaccatgggcatagtcctcccagtccctccagaagtctgtctgtccatccatgcggcgctggaacacctgggaagcaagtgggggcaccatcagcctctggctcccggggcaacagaccctgccctgcacagacccctgggcttcccaatgccacccaccagccagccgcccccatcagtctccatgtcgcaaaacacgttcaggggccgctcgcggttgccgttgaggaagatggtgctggtcctggaggcaccggctccgttctgcatctcctccccgcagtccctggggaaggggatccgcagcccacctgggagaggagagcaggggccagtccttttccaagccttaggccctggctgcccacccagcccccggccccgggcccgtgcgtccaggtacccgtggtgaaagaggtggacacgggcggcaggaggctctggccccacatggcctggagccgtgcattgtaggaggtggagggaaagaggccaaggagctggtgagatgtgatccctcctgggagcaggatctcctgtgggacagacaagggggggtcaggggagagggaggtggagaccctccgggagggccagaggcagcacctcctggaatcacccagggaggggagttgggtcagtggggccggggcacctggttctgtccaccaggggtgtggaagctgagcaggtagcctgcgggccggactgggggctcagtccaagtgagcagggcggtgcggggggtcacttccttggcctccaagtcccgaggggcctctagccctaggagggaaagcaggaagaggagatggggatgaggcccaacctggctccctctacctcctctccctgtcccacacaccccacagaccctacctgtggtgaaggtgatgctggctggggaagtgaggttggggccccgcaggccacgcactgtggcggtgtagttggtgtggaggacaaggtcatgcagggggtagtccaccgcgctgcctggggtctccgcctgcagaggcggggctgggagtgtagagaggggcatcaaggcctgccccctccatcctcggccagagtccagcctcccccctgcaatccccaccctgaacaagtcccctccagaggcctcaggcctgctcacccccaggggctgtgacctggacgtcataggtgtccacaggattctgggggggcttccagtgcagcacggcgaatccctcggtcaagttcagtgcacgcaactgtgtgggaccgtcaggaactgggggaaggggaggggctcagaagggtccccgcggctctctctactccgtgcctccccagactccactggcctcccgtccgcaatcggagcctccaccacctccctttcaccctcctcgttctctctcaactcccacccatgccgttttcttggctcccacctcttgccccgggtcccagtccatctcacccgtggtgaggaagcctgtgagaggctcactctcctcaaagcctcggaccgagaccacggtcacctcatagcgagcgcctgggatcagcccctggagtttctgggtccgggcctggccatccacctgcacactctgaggctcccctgaaaacattggggatcgagggttacccagggaaccccagggcagctggagggtgggcagagtgcaggggggagaggaaatgcgaggcgatgagcacatggcaaaggcaccacctccgtccgccagctggtaggagactttgaagctgtccgcccgggatggtgggggcatccagttgaccttggctgaggtctccctgatttcactgaattggaggtcacgggggctctccagaactgcagaggggtcaaggaacaatgacgcaggcaggggcagggaggcttctccctacgagtccccccctcgcctctgctccagcacaggctcaccaccccttttcctctagtccccaggaatggaagtcgctctgcagattcctccaggcccaccaccaactcgcccacccccaccgctggctgaggcactaggtcccccccgtgaagtacaaagacccccactttggggcagagtgtgtgtgggtccttacctgggctgagggtgcgggcggttccctggatgctgtcggccttgtggggtcctcgcagcccatacagtgtcaggctgtacagagtcccggaacgcaggtcccggagcacggccgagtgccgcgtccccggcaccatcagctcgcgctgcagcagtggacgcggatgcggctccagagtgcttggtgatggaaccccaaagcggagcaggaaggagtcgaaggcccccggtggggcctcccagttgagcctcagtgaactggtggtcacgtcagtcacagacagctgggacaggcggggccttgactcctctgaggtctgaccagcaggagccagccctgcacggagtgggtgggggagaagggattggagacagaagccaccagcttggtgacccagagcacgtcccttccacccccctccctgcccccgtttctctatctgtaaccagggacttgcagccacaggggggtcctgtggggcagagctaaaggccactcgcatccagcccatccatcctctctccctggtacccgcctcacgctctttccctgcgaccaccccttctgagcccccgtttctcccttctgagtcctaggctagaggccggagacgcctggtggtacctgtggtgccctcagctgagaggggccccaggcgcttcccttcatggaggccatagaggaggaacctgtagggggtgctgggctccaggcctgagatgaggatcttgctctggtcgccgtccacgagcaaggcctggggctgcccgttcgtgtcctcatactggaccacgaaggaatcaaaggggccctgggccacgctccacgagaggcgcatggagtctggggttgtgtcggtcacggtcagcactcctaggcggggctcttcaggaggctcaggggcctctggggctaactctggggctggtgtgtcctcttctggggctgcgtgggagaagcccaggggagaatctgagtgaggggcgccatggggtgctccatttttatcttccaggcttggcccaaggctgaggtgggaagtttataggtccaggcccagtcagacaatgaagtcgctgtggcctcgtgactcctgcgagctcccgcgctgtctgagtcaggtgctcgcttcccccttccacaccccggtgtcctgccgagcccacctcgagatatcacaggctctggccccacccatgccgggatacattcactgagcttgaggagtgtggtgctcccttctgagagaagctgagggtggaactggctggttgaggtgactggcaaatcccaccagccgtgccgtggtcaggcctgtctgaggtgggcatcagcgagctctggaagaggagcctgtaccacaaatgcagccactgctgttggtttctgtgtccccgctcattttgttttccagtgatgttcctcttaagaaaatgctcctgactcatccacggcagggaggtttgccgctatctggacaaggccacccttcggggaggcgacagcagccccagcgagtaatgaggagcagtggcagtgacggggcagagtcggggctgggagattagagagcccctcccagggcctttccctcccgcctggcctggctcctgctctggactccttgatggatgttgaagcccacagggctgcagactcctcctccttcctggggacaggccagggcgccccactccggcctgcccactcctgcagtcatctttgtcttcagcccaaatgcacaaggaaacccacacaagctggcttgctatagccaggcacagcagcctcacctgtcattcccagggcagagaccgggcccaggcgctttcccccaaggagcccgtagagcagaaacttgtatttcttgccaggctccaggtcctctacggtgactgtgcgctggtctgcggccacaggcactgccctgggctgcccgtccgtgtccctgtactggaccacgaaggagtcaaaggggccctgggctaccgtccaggacaggcgcagagagctggaggtctcctcagccacggtcagttcccccaggtggggaggtagctccttctccaggggagctgtgcagagggaggagggaaagctcttagtcacatgctgcctttgcctaagccctggcagcctcccggaggtgtgaggttctgggaaatggtccctccagtgtagccccagggacagctccttgaggagacacacaggcctgctcccgccatgccccacaggaatgagggagaacagccccctcctcctctggaggctgctgcccaaactccttcctgccccgccccttccctgctgtgatcgaggatgcgccaaattcattacagatcatctcccgagggatgggtggctgggggtgcagagagggcctttgtttaccctgacccccagcccctgagcaagaatgaggccagagctgagagagactccccggaggtctctgggttgtcacggagacaccccaaacatcgagagctggtctgggcagccggccaatgcacggctcccatcactgccaggctgtgatctcccccttgtccccttgtggccatcagcctgaacatccgtgcctcctgcttccccagccccacactgaccccactgggccggggcagccagggtggggcagggagaagacaggggattagctgggagaacagagggcagagcagaggcttgcccgggtggggctggggccgatgggtggggatctgtaccccgtccccacagtgagggtttgggaagagaattacggagtcccagggacccaggcccagactggccggctgctctgtcctcctctgggcatagtgactcatggtcctgggagtggggtgagggtcggtgacccaccacaccccttcctcagggagctgagtcataggcatagtgacaccaggtttttccatcgtctttccatagccaagccctcccttttcttccacccctcggctccgagtcagggaggagggaggaggatgggaaccactactgagtccagcgccattcccagcattatgcaggtgaggacactgaggtcccggggatgaagcggcttgtccatggtcaccctggcaaaggctaggactggaactggaacacagatctgctggccccaaagcccgtgtcccttttatttcctcagcagtcagcgaatgaaaggaagtaatgcatatgcttcagaactgtgcctgacacacagagggactcactttcggagttaagatggttgtgtcagggctgatagagggaatctcacgggaaggctgcagggccagctctgagggctcggatgagaggcagctctggaaaaggtggaggctggactgggactcacctgtggtgctgtcagcagagatggggcccagtcgtttcctgcctgacagaccatagagcaggaacctgtatttcctactgggctccaggccctggactgtgacctcccgctggttggctgccaccggcaccacctggagccgaccatccttatccttgtactggaccacgaaggagtcgaattcgccctcagggaccgtccacgagaggcccacggagtcaggggtcgcatctgtcacagtcagctcccccaggcggggagacggtttggtgtctggggctggaaaagacagtgaggtgcatggagagtgggatggaggcaaaggggccacggagcttcctgggctgctatggctctgtgagccggtcccaggaacgggagggtgactgggccaggagtaggaataaaagaggagccagacaagaaagcaagtgtcccctggggtgcagggaaagtagggagagggatgagtgtgagtgggagaggagagctcagggcctgggttttcctggacccaataaatcagtgggtgctgaggactggagtgtggggcacagaacgtgaaattccaacaggtgccacaagggggcgaaggctctggccgcgggaggcctccagccctcactcaccggtcctggcctccacagggactgggccgtggcgtttcccattctggagtccaaagagcaggaacttgtacttgcgggccgggtccagccccgagacggcgaccgctcggaggtctccgctcacaggcactgcctggggctgcccctgcgcgtccctgtactgtaccaggaaggagtcaaaggggccctgggccaccgtccatgagaggcccactgagtccgaggtcacggccgccaccgccagctcccccaggcggggctccaccggcagtggtgtgggcaggggcgctgaaaagagcagagcaggcccatgggtcaggaggcaggaccctgcgcaagggaggcagtgctctcccaggactggagtgagcatttcttagcggcctcctctaaaacgcttgttttagaatctgtgccctgcattgctgtaagcagctcacaaacagtggtgcatttaaccctcgcacaacatatgaagtgggtgccattattatcatcaccccaactttgcaggaatctgaagcacaaggttaggaaacgcctgcaaagtcgcacaatcactacattcgaaggcacatgcagatctgggcagctggatctgaagcactttctgagccactaaaatactccttaagggagcctgaagactaacaaatgagcacacgagcaacatggaggttccagatcacaatgggagaaggaagctacaacaaacagggcatggactacctgcccatctgactccacacagtctccatgaatccaaggatgaggcaggatcattagcaacatgggagaaaagacagaaacctagaggcccagtcaaaagaggtgccaagatccaaaggagaaacacaagggggctgcagaggtaaacctggggacgagggcctgtccccccactcacccgtgatgcccacggtggacactgggcccacgcgctgcccctcgtggaggccgtacagatgcatcttgtatttgcgcccgggctccaggccccccacggtgacctcgctctcctcgcccctgacacgcaccacctggggctgcccgtccctgtccttgtactgcacggtgaaggagtcgaagcggccctgggggacggtccaggagaggctcagcgagtcaggggaggatcctgtcactgtcaactcccccaggagcggctcctcaggggcctccggggcctcagtgctgggttctgtggggctgggggtctcttcctctgcagtggagaaggagggagagagagtgagggggatgtccttgggtcctggggaaaaggagggagaagccaaggctatgactgggggacctgaggtcatttcagagaagtccattcttggggctgggtggtcctgctcagctgacagctaacacacgtaacaagttccagggtcagctgtgggggacctggcacagccaccagcacagcaaaactcctgatggcccctccctgctcagggggagccaggggtcaaccacataggaaggcccaaggggagtcccagccccagccacaagcagttctgtggtgctgaccagacccctgtcccattccccaccagtcatcaccaaagagcaagaggtggccctcccacagctcccaccctggggctcccatcattcactcacccgtcaccccaatggcagacacagggcctacgcgctggccaccgtggaagccgtacaggttcatcttgtatttatggtctggctccaggcctgagatggtgaccccgtcctcgtgccccggcacccgcaccgccttgggctgcccatccccattcctgtactggaccaggaagtggtcaaactggccctcgggaaccatccaggacaggctgagggagtcgggggtggcatctgtcacggtcagctcccccaggcgaggcttgatggggggctcaggggtcatggtaggcactgcttgggtggtctcggcttcatcctttggagctggacagacacgtgtggggacagtgaggaccctgggttctcagttcagcatagaaaggatgtgtcacaaaacacaaagtgcccaagaacaggacgatgctgcccacagcgcctccagcacagctcttcatcctctcctcccctgcggcctttcctatccctcaccctgacccccctgccctcggcccccacctcacccccacctcccaacacccaggccacctctccctgtccctccagcaccgcctctcttttgagcacagctccacttggcctctgcacccttaccctccctgcactggggtctcctcgccatcttttgttcactgggcttctgtctttgctctgcaacaagctcagcacactcctcccgaggccagagcctggggtgtgttcctggacccagcccctcaccagctgccagcagcctcagagttacctctcccccgagtttccctggataccttcctccccaacctccagtccccgatcctagtttgagccactgtcacctctcaccagggccaccaactgcctattggcttccctgcctctaggctccctgccaccccatccccatctttagcccccacagatgagcttcacacaggcacagctgctggggccatctcagcacagacctgggcaatcacatcctcatccctgggagaccccaggcctcctctgctcccacacttcaggactatctattcactgcaaaggacaccccactcaatcctcagtacttctcacacaccatgctctttctagcctcctggcctttgcaccacctgtgctgatctgacacgcttcaccttctctctaaagctgtcaccaagctaaggcctgcctggcctcagatcctgactgtcccctgagtatccacaggtagggtggtttaggtattcctgcctggctctgggcttcttgtcacatgctcacccgcctttgctttcttactggtccacagcctgtcccccatgacgttagccccattaggacaggaacttttcccattaggacaggaaccctaactctgagcctaacctctgtgaggattcatgaatgcaagaaaaattcgcttcaacaaattctaagagagtttccaaatctgttactgggaggagctttgctacaaaggtgttctgtgatttgcacacaaatattcatagcagcattattcttgatagctaagaggtggaagcaacccagatgtccatcaatggatgaaaggatgagcaaagtgtggtctgtatgtgtaaaacgaaacattattcagcctgaaaaggaaggaagttctggccaggtgcagtggctcttgcctataatcccagcactttgggaggtcaaggtgggagactcgcttgaggccaggagtttgagaccagcctgggcaacataccgagacccccattgccacagaaaataaaataaaaaggaaattctgactgatgctacgacatagatgaaccttaaagacattgtatttaatgaaatgaaccattcaaaaaagacaaatattgtatgattgcacttatatgaggtacctagagtcaaattcatagagacagagagtagaatggtgttgccaggggctggggcaaggggagaatgggagttcgtgtctagtgggtaggaagtttcagtgtgggaagaggagttctggaagtggagggtgacagtccacagcaatgtgagtggacttcatgctggactgcaaactagaaagcgattagaatggcgaattatgtcaagtgtactttactacaataaaaaacaacaaaaaaagtgtgttccttggaccagtggcatcaagatagatgagaatcttgttagaaatggatggtcggctgggcgccgtggctcacgcctatgatcccagcactttgggaggccgaggagggcagatcacgaggtcaggagattgagaccatcctggctaacacggtgaaacccatctctactaaaaatatgaaaaaattagctgggcgtggtggcgcacgcctgtagtcccagttactcaggaggctgaggtaggagaatcacttgaacccaggaggcggaggttccagtgagccgagattgagccactgtactccagcctgggtgacaaagcgagactctatctcaaaaaaaaaaaaaagaaagaaagaaaaagaaagaaatgcatggtctcttgccctaggccaagcctgctgaatccaaatctgctttttaacaaaaatctccaggcatttggatacacaaaggaaggaatactcttcagagtatgttttcacgaagactggagagacagcagtgtcttccagggccatcttccccacctcgcctcactcacacttactcacctgtcacacccacagcggacactgggcccacgcgctgcccctcgtggaggccgtacaggtgcatcttgtatttgcacccgggctccaggccccccacggtgacctcgctctcctcgcccctgacacgcaccacctggggccgcccgtccctgtccttgtactgcacagtgaaggagtcgaagcggccctgggggatggtccaggagaggctcagcgagtcaggggaggatcctgtcactgtcagctcccccaggagcggctcctcagggggctccggggcctccgtgctgggttctgtgggggcgggagtttcttcctctgcagctgagaagaggggacagagaaggtgaggcagcttccctgggggatgtccttgggtcttgtgaggaaggagagcgaagctgtggccatgagtgggggtcctggggtcagcttggagaggcccatctttggagctgggtggtcttgctcagtttacagtcaacacacatgacaagctctgaggtcagtgctggggaacttgggacagccaccaacagagctcacagggcccttctccacccaggaagatctgtcagtcctcagggaagtggggaaagacaaaaaagtaccatggctcagccaagagcagaggggcttcctgggccagttcacccatcaccagagaaagggagaccctcccacaggccccactctggggctcccatcgtacactcacctgtcaccccaatgacagagatggggcccacgcgctggccaccgtggaagccgtacaggttcatcttgtacttgtggtctggctccaggcctgagatggtgaccccgtcctcgtgccccggcacccgcaccaccttgggctgcccatccccattcctgtactggaccaggaagtggtcaaactggccctcggggaccatccaggacaggctgagggagtcaggggtggcatctgtcacggtcagctccccgaggcgaggcttgttggggggctcaggggttgtggtgggcactgcttgggtggtctctgcttcatcctctggagctggacagacacgtgtggggagagtgaggtccctgggttctcagttcagcatagaaaggatgtgtcacaaaacacaaagtgcccaagagcaggacgatgctgcccacagcgcctccagcacagctcttcatcctctcctctcctgcggcctttcctatccctcaccctgacccccctgccctcagcccccacctcacccccacctcccaacacccaggccacctctccctgtccctccagcaccgcctctcttttgagcacagccccactcggcctctgcacccttagcctccctgcactggtgtctcctcgccatcttttgttcactgggcttctgtctttgctccgcaacaagctcagcacactcctcccgaggccagagcttggggtgtgttcctggacccagcccctcaccagctgccagcagcctcagagtacctctcccccgagtttccctggataccttcctcccccacctccagtccccaatcctagtttgagccactgtcacctctcaccagggccaccaactgcctactggcctccctgcctccaggctccctgccaccccatccccatctttagctcccacggatgaacttcacacaggcacagctgctggggccatctcagcacagacctgggcaaccacatcctcatccctgggagaccccaggcctggtgagtggtcccctcctctgctcccacacttcaggatgatccaccaactgcaaaggacaccccactcaatcctcagtgtctctcacacaccatgctctttctagcctcctggcctttgcactagctgtgatgatttgacatgcttcacttcctctccaaagctgtcatcaagctaaggcctgcctggcctcaggtcctggctgtcccctgggtacttgtgggcagagtgacttcactgtcccttcccaatcctggcttggctcctgggctccacatgctcatccttctttgcttactttccggttttctgcttgtgcccacaattgtgagccccatgaaaacatgaacttgtgtgtgtcactttccagcttccgcctatgaaagaaaaaggcagccctgacacccgtgagctgccctttccctctgccaggccacggctgcttggggctggcctggcacagtctggtcttggcgtggtccagttgaacagacaatttcatggaacatcaacatcagactaggccatttgtcagtaggatggatcaagacaagaacaaggccagtctgtgatcatgtctcagtaaggatgaactctaacattttccaaagcacaaaaataaccaaacatcacccatccagctaatctgagtgatagctgcttctttaccaatggcagctttggccttgctctagttgacctccccaaagataagacttagtgagacgcccggtaatagggttatcccttcttcctgacagcgtctaataaagagcaaaaccttgcttccttaaatgctttcctaaaacaccaaacacaagcccagttccttaacaatctctttctaaagcctcttcctaagtcaccccacagtcctcctgcactgcatggagcataattccatccattcaattttaggtgagtttctggaggtcgttggccagaggacattgataccctaaaattacagtgtccggatcagggcaaggaattctttgctgaatgaacaaattggcccattggtgagaaaggtctgttcctattcctattccaatagtgggcttccagagtgtgcagtcgacgcgctgcccctcactgccttctgtcttccttcacggcccctagtcaactccacagagaaagcacactaccaggaatcagggacgcagaaaaattctcttcaacagatttcaaaagagggtccaattcctttgtcgtgaagaactttgctactcaaggggcgtgatcatgggccagcagcatccgcatcatttcttgttggaaatgcagaatctctggccctagcccaaacctgttgaaccccaatctgcctcttagcaagatccccaagcatggaaacgtgcaaaagaagcccggctggtgagaatatttttgttttcatgaagttgcagagaaagcaacatcttctagggccatcttcctcactcacaaacactcacctgtcacacccacggtggacaccgggcccacacgccgcccctcgtggaggccgtacaggtgcatcttgtatttgcgcccgggctccaggccccccacggtgacctcgctctcctcgcccctgacacgcatcacctggggccgcccgtccctgtccttgtactgcacggtgaaggagtcgaagtggccctgggggatggtccaggagaggctcagcgagtcaggggaggatcctgtcactgtcagctcccccaggagcggctcctcagggggctccggggcctcagtgctgagttccgtggggctgggggtctcttcctctgcagctgagaaaaggagatatagagaggatgccaggtgcctgggggatgtgctcaggtcttcaagggaaggagggagaaaccatggccactactgggtatgtgaggtcatttcagaaaagcccattcttggggctgggtggtcctgctcaactgacagctaacacacatgacaagttccagggtcagctgtgggggacctgggacagtcaccagcacagcagaactcctgatggcccctccctgctcaggaggagccaggggtcagcctcagaggaaggcccaaggggagccccagccacaagcaggtctgtggtgctgaccggacccctggcccattccccaccagtcatcaccaaagagcaagagggtgaccctcccacggctcccaccctggggctgccatcatccactcacccgtcaccccaatgacagagatggggcccacgcgctggccaccgtggaagccgtacaggttcatcttgtatttatggtctggctccaggcctgagatggtgaccccgtcctcgtgccccggcacccgcaccgccttgggctgcccatccccattcctgtactggaccaggaagtggtcaaactggccctcgggaaccgtccaggacaggctgagggagtcaggggtggcatctgtcatggtcagctcccccaggcgaggcttgatggggggctcaggggtcatggtaggcactgcttgggtggtctcggcttcatcctctggagttggacagacacgtgtggggacagtgaggtccctggctcctcagttcagcatagaaaggatgtgtcacaaaacacaaagtgcccaagagcaggacgatgctgcccacagcccctccagcacagctcttcatcctctcctctcctgtggcctttcctatccctcaccctgaccctcctgccctcagcccccacctcacccccacctcccaacacccaggccacctctccctgtccctccagcaccgcctctcttttgagcacagccccactcggcctctgcacccctggcctcccagcactggggtctcttcgccatcttttgttcactgggcttctgtctttgctccgcaacaagctcagcacactcctcccgaggccagagcctggggtgtgttcctggatccagctcctcaccagctgccagcagcctcagagcatctttaccctgaattcccctggataccttcctaccccacctccagtccccgatcctagtttgagccactgtcacctctcaccagggccaccaactgcctactggcctcgctgcctccaggctccctgccaccccatccccatcttcagcccccacggatgagcttcacacaggcacagctgctggggccatctcagcacagacctgggcaaccacatcctcatccctgggagaccccaggcctggtgagtggtcccctcctctgctcccacacttcaggatgagatactcaccgtaaaggacaccccactcaatcctcagtgcctctcacgtgccatgctctttctagcctcctggcctttgcaccagctgtgattatctgacacacttcaccttctctctaaagctgtcaccaagctaaggcatgcctggcctcaggtcctggctgtcccctgggtacccatgggcagggtgacttaggcgtccctgtctggtcctgacctgagccctgggcctccctatcacatgctcacccgcctttgcttcatttgctggattgcagcctgtctctccatgacatgtctttccataatgttgctatattcctttcactgtgagccccatcaagacagaaatatgtataggaaaatggtagagaagggcacattttctagggctgtcttccaaccctgccccacccacactcactcacctgtgacgcccacggcagacaccgggcccaggcgccgcccctcgtggaggccgtacaggtgcatcttgtacttgcgcccaggctccaggcccctcacagtgaccttgctctcctggcccccaacacgcaccgcctggggccgcccgtccctgtccttgtactgcacggtgaaggagtcaaagcggccctgggggacggtccaggaaaggctcagcgagtcaggggaggatcctgtcactgtcagctcccccaggagaggctcctcggggggccctggggcctctgtgcctggttctgtagggctgggggtctcgtccacatcctcttgtggggctgaaaggtaatatagggggatacagagtttaagggtttaagggcaacttgctttgctggtgctgtcaacagaggtcatacatcaaatgtgcccctccagagcaggctgagggctggggcagctttgtgttcgccgttcagtgactcttggaataagagccggtgaggtatccccgagcccccggcctgtactgctggcagagctgcactgttagaaacctccagaaggcaactgagacatagtgtcaggagccaaagtaattctcatttcctttgacccaataatcccagttctgggcatctgtcctaagaaaattattaaagcaggaaaaagttatagcatggaagaactcacgatggggttattcatgacagcagatgtgtcaggaacacaaatgacccgtagaagatgattaattttgttatagtgctttcaccgcaacgcatcaaataaccattgaaacgatgatgaatgctggttgtgtagccgtgaggtgaatgattacaatgtacttgtgtacaaaaaaggaagtgccaagaactttatgaacactgattgcaactttaaaacacgctctgcatgcaaaatacaggaagggaatgtgcactacacacattgttattaatgccggcagctgggggagaaagtaggactatgagattcttgttttctgtttttcaagctttccacataatgttgctgtattattttcactagaaaaacgtgggctaaaaaagaaattctgggctgggagcagtggttcacgcctgtaatcctagcattttgggaggccgaggcgggtggatcacctgaggttgggaattcgagtctagcttggccaatatcatgaaacccggtctctactgaaaatacaaaaattagccaggcgtggtggcatgcacctgtaatcccagctactcaggaggctgaggcaggacaatcacttgaacctgggaggcagaggttgcagtgagctgagatcacaccactgcactccagcctgggcaacagagtgagactcagtctcaaaaaaaaaaaaaaaaaagaaaaagaaagaaagaaattctgggctacaacaattaataatagagtgtggggtgggggtggggcagcaatacacatagaacaggaggggcaggggtgggtccctcagcctgtcctctgtcagttctgtggttccccacagtggagacaggaacacaaaactgaacgtggaccaggacagcttacccccggaatgtgaatttttctaatgttcattttccaataatttccctattccccctgtttcccaacactcagatggtcctctgaacatgcatatggaaatgaggcctctcccccaggaatcggggatgccgattgagagtgcttcctctgtctggatggcctttgggagatgagctcgcacctcacttggtgccacagaggtggcgacctgccctgcaagagaccgcctctcagcagggctgattcttccccatcggtaggaattctcgaaaaatactctaagccaggcataacaacctggctgaggatgacttagaaaaggcagcctgactgagcatttggaattcaattaacctcatgatctccacccctccaatttcttatggactagaaattttgaacttcctcataattagaaatgaaataagtctggctgggcgcggtggctcatgcctgtaatcccagcactttgggaggccgaggcgggcagatcacctgaggtcaggagtttgagcagcctgaccaacatggagaaactccctctctactaaaaatacaaaattagccagatgtggtggcgcatgcctgtaatcccagctactcgggaggctgaggcaggagaatcgcttgaatccaggaggcagaggttgtagtgagccgagatcatgccattgcactccagcctgggcgacaagagcgaaacttcatctcaaaaaaaaaaaagaaggaaataaatgaaataagccacaagagcgatagaggagtaggacagatggagtgtaaagaaggagaagacattatatattttctcttttccctttccctgattgtaaaagaaatgtttgccatttaagaaaatttggactatgcagaatagaataatacagaaaaaaatgtgctggaatattctattctatctaacaaatcaggcaacccgtgggatgtgtttctttccagtcttcttgccatgcctgttactttcaaatggttgtgattagcatccttacaaaaatttgggctcctttttcttcttttttgagactgagtttggctgtatctgccaggctggagtgcagtggtgatctcggctcactgcaacctctgcctcccgggttcaagcaattctcgtgcctccacctcccaagtaactgggattacaggcatgtgccaccatgcttggctaatttttgtatttttagtagagatggggtttcaccatgttggctagactggtctggaactcctgacctcaggcgatcagcccgcctcggcctcccaaagtgctgggattacaggcgtaagccactgtgcccagcctaggctctcttttttcaatgtaacattataaagtaagggtcttatgttaaaacatttcagtggcggcataatagctctttttatagatgttgcctaaattatttagtcatcccaacgtggtttgacgttggattgttcctcttgtgtgcatttgtgtatgtggttataacaaagaatgctgttattaagatggaaagaaaggaaaattctcgtaagtcaggcttggtgtgcgcctgacatatttcactcttggaggttatcagtggttgaccattagagggaggccacgccaaagtgaacaagcaaaccgctagcataggccacagccacagggcacagagggagggcaggacacaggagacaagtctggacccacagggcttggtgaaagggcacagcagtaaaccaggtacccatgagggaaaggtggttaccccgagactccaagcactactcaccagtcacgcccacggtggacaccgggcccacgcgccgcccctcgtggaggccatacaggtgcatcttgtatttgcgcccaggctccaggccccccacggtgacctcgctctcctcgcccccaacacgcaccacctggggccgcccgtccctgtccttgtactgcacggtgaaggagtcgaagcggccctgggggacggtccaggagaggctcagcgagtcaggggaggatcctgtcactgttagctcccccaggagcggctcctcagggggctccggggcctccatgctgggttctgtggggctgggggtctcttcctctgcagctgagaaaaagggacacagagaggatggcagggtccctgggggatgtgcttacgtcgtggggaaaaggagggagaaggctatgactaggggacatatgaaatagccaaggctatgactaggggacctgaggtcagttcagagaggcccattcttggggtcctgctcagctgacagctaacacacatgacaaattccagggtcagctgtgggggacctggcacagccaccagcacagcaaaactcccaatggcccctccctgctcagggggagccaggggtcaaccacacaaaaaggtacaatgggagccccagccccagccacaagtaggtctgtggtgctgaccagacccgtcccattccccaccagtcatcaccaaagagcaagagggtgaccctcccatggctcccaccctggggctcccatcgtccactcacctgtcaccccgatggcagacacggggcccacacgctggccaccgtggaagccgtacaggttcatcttgtacttgttgtctggctccaggccggagatggtgaccctgtcctcatgtcctggcacccgtgttgccttgggctgcccatccccattcttgtactggaccaggaagtggtcaaactgtccctcgggaaccgtccaggacaggctgagggagtcaggggtcgcatctgtcacggtcagctcctccaggcgaggcttgatggggggttcaggggtgggaggttctgtcgaggctggggccatttcttcatcctttcctggggctgcatcagaaaatagaatgggtgggcatgcctggtgggcctccttttaaccaagggactctgggattctcttagacacaccaagggcccacagtctggatgctggtgccccaagcttagaatatcatttttctgctttgaatgttcagttaacaccacacctgtggtgaagtcatgatgctcaggtggcatccctgtgatgctcagtgtgcaggcctgggacccttaggagctgccaagcaaatttgttttgcaggacagaattgatgctttataagaacaccaaccagggccgggtgtggtggctcaggcctgtaatctcagcactttgggaggccgaggcgggcggatcatgaggtcaggagattgagaccatcctggctaacactgtgaaaccccgtctttactaaaaatacaaaaaattagccaggcgtgttggcgggcacctgtagtcccagctactcaggaggctgaggcaggagaatggcatgaacccaggaggcggagcttgcggtgagccaagatcacgccactgcactccatcctgggagacagcgagactccttctcaagaaaaaaacaaacaaacaaaaacaaacaaacaaacaaaaaacagcaatcagggccaggcgtggtggctcaggcctgtaatcccagcactttgggaggccgaggcgggaggatcacctgaggtcaggagcttgagaccagcctggccaacatggcgaaatcctgtctgtactaaaaatacaaaaattagccagatgtgctggtgcatgcctgtaatcccagctactcggaaggctgaggcaggagaactgcttggacctgggaggcagaggttgcaatgagctgagatcgcaccacggcactccagcctgagagcctgggtgacagagtgagactccatctcaacataaagaaaaaaaaaaaaaagaaaacaaagaacaccaaccaaacacaacaggcaagttgtatcaggaggttcatccacctgggcttggaaattccacctaatcctgagcatttttagaaaccaacttagattttatagctgagggtagagagatgagaccacatgagggcatctttgcagctgagttgtctctggacctgcagtagctctgctaacttacggcagagagagcacctccagtgatgccagttcttttggcccgtgtgaaatcaattgctttgttttcattgatttctttaatcttttctgctcttcatagggttttattctgccttgatagtggtattacaaattcatcacatttcatttgtctgttctttttgagaactgagtcttaagcatctagggggtaacagctataaaagagcttacaaaagcatcaaagagccgagttacagggtaatgaaaggaaaatgccttattaagttgtgcacatggccaatatttacaattaaagtaatagtatccatgttaacaggattcagtgttgttttaaaaataaatgggtattaatttgggagcttagagaacacatacaatttttcccactgaaatcagtgataattatgagaatttgccctaagcggttttcaggaactacctaccttcctcagaagggaaagactgcagttatctctcattgtgtgtgagagccaagccacactcccgcccacccttcacgacaggtatggttattccttctttacagatgaggaaaaggatgtacagagaggtcgtgtgtctgttttttgtttgcttgttttgtttttttgagacagggtctcactctgtcacacaggctggagtgcagtggctcgatctcggctcactgcaacctccgcctcctgggttcaagcgattctcccgccttagcctcccgagtagctgggactacaggcatgtgccaccacacccagctaatttttgtatttttagtagagatgggggtttcatgatgttggccaggctggtctcgaactcctgacctcaagtgatctgcccccttcggcctcccaaagtgctgggattacaggcatgagccaccgtgcccagacaggttgtgtgagtctcttgaggacacacagctcaaatgggctgaagctatggtcaaccccaggtgtgcctcagtctgtgttattttcctggtcccccacctctttgggaacccaaaaagcccatgtgtaacgggcagaagacctggggcaataccaaagtctcggagtgaaggcaccagcagaaccattcccaggagcttgggaggcttggtctcagggaaagtaaaataaagccaccagatactgacaataaaagggaaactgagtctagttcagggcagggcccagtgccctactgcacactcaccagttaaaccaacagcagacacggggcccacgcgctggccaccgtggaagccgtacaggttcatcttgtacttgtggtctggctccaggcccgagatggtgaccccatcctcgtgtcccggcacccgcaccgccttgggctgcccgtccccattcttaaactggaccaagaaatggtcaaactggccctcggggactgtccaggagaggctgagggagtcggaggtgatgtctctcactgtcatctgccctaggcgcagctttgcaagaggagcatcaggggactcctcttcgggggctaggaagagatagaaacagaatcttttctcttgctgcaaggaggtgttgaggccccagctgtcttgaattcaggtcagaaggtgggcccagtctggccctaacttaagatcgatttctgattataatcataatcagattttgtggcttccttatggtccctcaaccatgccaggcagcctcctacctcagtacttttacaatgactgttccctctacctaaatgttctttccccagatatcttcatggctcatccccacacttcctttaagtctttgttcaaaagccaccttcttctgtgggccttccctgattactctatttaaaatttcagttttctcaattgcaatgtatcctccttctatagacctgatttcagcaacaaattgggaaacaacaattatgagacactcgggagactgtagcactacctggatacttgatatcaaggcatgattgttcacttatcaaggtatgctaattgtattgtggaattttattatttatttatttattttttgacacagagtctcactctgtcacccaggctggagtgcagtggcgcgatcttggctcactgcaacctccacctcctgggtgcaagcaatttcttgtgcctcaacccccgccaagtagctgggactacaggcacgtgccaccacgctccgcttttttgtactttttaaaatttattattattattattatttttagtagagacggggtttcaccatgttggtcaggctggtcttgaactctttacctcaagtgatccacctgccttggcctcccaaagtgctgggattacaagcgtgaaccacctcacctggccatattgtggattttttaaaaataatttttttaaaaagagatatacctttaaatatttagtgatgaaagcataggatgtctgtggttcgtttttaaaatactgcagtagtataaccacacaatgcaatactgtttggcaataaaaagcagtgtagtggctgagagagagcaggtggctcatgcctgctatcccagcactttgtaaggcccaggcaggaagattccttgaagccaggagtttgatatcagcctgggtaacactgtgagaccccatctctacaaaaaatttttttaaattagctgagtgtggtggcgagcacctgtggccccagctacctggggggctgagatgggaggatggcttgagcccaggagtctggggctgcagtgagctatgatcatgccactgcactatagcctgggcaatagagtgggaatttgtctcaaaaaaaatcaatcaatcaatcaatcaatcaatcaatagcaatgtagtaagtatagtacttctacatgctacattgatgaacctcaaaaacattatgctcagtgaaagaagctagacacaaaagaatacatattgtttgagtccatttatacgaaatgttctggaacagcaatctacagagaaaaaagtagattagttataaactagggctgaggtaggaatgggtctggacccaagatttcttttgggggtgatggaaaagttctaaaattagatcgtggtgatggctgcacaagtaggtaaagatactaaaatcagtaagttgtacactaaaaacaagtgtattttatgccacatgaattatatctccataaaggtgttaataaagaaaacattcaggccgggtgtggcggctcacgcctggaatcctatcactttggctgaggtgggaggataacttgagcccaggagttcgagactggcctgggcaacatggctaaaccctgtctctacaaaaaatacaaaaaattagctgggcatggtggagtgcacttgtagtcccagctattcgggaggctgaagtgggaggatcccttaagcccaggaggttgaggctgcagtgcagtgaattgtgactgtgccagtacactctagcccaggcgacagagtgagaccttgtctaaaaagaaagaaagaaaagaatgaaagaaagaaagaaagagaaagaaagaaaggaaggaagaaagaaagaaagaaagaaagaaagaaagaaagaaagaaagaaagaaagaaaacattctagtgattctagtggaggaagtgggtggggcagagatgagccagactggccagaagtcgatatttgattgaaggaggatggcagggtctttgtactattctttctgtttatacatttgaaattttatttaacaaatacttattaatttaattaatttgtatttcaaaaatgtgttccaatctcacaaaaagagttatgtatagagttccaaggaaaagcggagagccacaaaccagccagtgaatcacctcccaagaggcctcagtccctgggggcctttcccatatggctccgacacttctcctggatttgctctctctgtccccagatcacacctgtcctgagcctttagtgaacagggtgtattacaggtttgaggtcttggggttctgggtccctagtggaggagatgctggaggctgtactttgctaagacccaacccagagggctctgcagtgcacactcacccgtgacgcccacagcagacactgggcccacgcgccgcccctcgtggaggccgtacaggtgcatcttgtacttgcgcccaggctccaggccccccacggtgacttcactctcctcgcccccaacacgcaccacctggggccgcccgtccctgtccttgtactgcacggtgaaggagtcgaagcggccctgggggacggtccaggagaggctcagcgagtcaggggaggatcctgtcactgttagctcccccaggagcggctcctcagcgggctccggggcctccatgctgggttctgtggggctgggggtctcttcctctgcagctgagaaggaggaagagagagtgagggggatgtccttgggtactggggaaaaggagggagaagccaaggctatgactgggggacccgaggtcagttcagagaggcctactcttggggctgggtggtcctgctcagctgacagctaacacacatgacaagttccagggtcagctgtgggggacctgggacagccaccagcacagcaaaattcccgatggcccctctctgttcaggaggagccagtggtcaacctcacaggaaggcccaaggggagccccagccccagccacaagcaggtctgtggtgctgaccagacccttgtcccattccccaccagtcatcaccaaagagcaagagggtgaccctcccatggctcccaccctggggctcccatcatccactcacctgtcaccccgacgacagacacagggcccatgcgctggccaccgtggaagccgtacaggttcatcttgtatttatggtctggctccaggcccgagatggtgaccccttcctcgtgccctggcaccctcactgccttgggctgcccatctccattcctgtactggaccaggaagtggtcaaactgtccctcgggaactgtccaggacaggctgagggagtcaggggtggcatctgtcacggtcagctcccccaggcgaggcttgatggggggctcgggggttgcggtgggaggttctgaaggcttctcctcctccgggactggacagagacatggaaagagaggactgaggtgggcagggtatccgcgggactctgctgtcctctggactctcccagccatctgaaaggaggcatagtgggcagagttctcacctgtcagggcctcgacatggacaggacctacatgcttcccatcactgaaaccatacagggtcaccaggtatctgtggtcggattccaggccagagagggtgatgtcattccggtcacctcctatgcggaccatttggagttgcccgtctctatctgtgtactggatttcgaaggagtcaaattctccctcagtcaccatccaggagagatgcagggtgtgtgacgtggcctcctccactgtcaactccccgaggtggggctcaggcgctggaggggtcggggccgtggtctcagtttccgtttcttccctgccggctggttcacagagacaggtagagacagatggctggtgtgtcgctgcacccagactctcaggaggagtgagggaggagagggagtgagggcaagcagtcagcaatcgaaagaccagcttttgctgcacatgggtgaatttcaaaagcattgtgctaattgcaagaaatgaaacacaagagactgcgtattgtgattccattacatggagagtcaaaatgctgtctccaggatgatcgaaagcagacagtggttgctggaggctgggactggggcaactgactctaaaggggcacaaggaaactttctggatcaatggaaatgatataaaatgggaagctcagagatcttatggctcagtcagaccaggagagccaggcgggaaggaggcacaggtgttccagctgccgcacactcaccagtaatggcgacggccgagatggggcccacacgcttgccgtggtgcagcccgtagagcagcagcttgtacctgtgggcagggtccaggcccggcacgctgacctccctgaggctgccctccacgggcaccacctggggctgcccgtccctgtctttgtactggaccacaaaggagtcaaactggccctcagggactgtccaggagaggcccacggagttctgggtcacggtggtcacctgcagctcctcccccagacggggttttgggggacgctttgttccagtatcatccatagcactccgggcttctgagatggagacacggagaggaaacggctgagctgtttctggaagactgggtgacctcgacgggcaggattgagaggtctggagacagggctttgcgtggctgagtcctgccgggctgtgctaggggcttgtgcagggacgtggggagctggatctgagccgagtggctggggccaaataatggtaatggcagccaccacaagtgaccgtctgctgcttggcctgaggggagcagagcagggacctgcagggaatgcccctcacccgtggtgccgtcggcagtgagagggccatggcgcttcttgcccaggaggccatagaggaggaatctgtacttgcggccggcatccagaggggtgacagtgacagagcgctcatggccctccacgggcaccacctggggcccgtctttgtccttgaactggaccacaaaagagtcgaactggccctcaggaaccgtccaggagaggcgcagtgagtctggggtggggtctgtcacccacagctccccaaggcggggtggggcccctgggctggcgtcacctcgggcaactggagaggaaaggttcttgtgtttattttttccaaaacgactccttgactgcctccctctggggctggaaaaacccagaactgcccaaatgctcagtgcttccccaaaatatttccatcacctcccatcctcaccaccatctccgtctggtccatgcctctctccccttgacccaagtggggagggtcacctgtcctgagtcacctccaggaaaagagattccctagctccctgcctcatcttactcccctttctgtccagcctctttccgcctctcacagactgcttccccagcagggtgcagcttcttacagactgggtctctatctcctcttacccaggagcacacgatttggccgtgatttggccggcccctgaggaaaggggtgatttggccggccccgaggagcgcaggatccctgatgggggcactcggcaggtcagggaggcaggatgttacgacacaggtagttctcacccttctccgttccctttcttattctgcaccggctggcccgggagaactaaggctcccactgggcctggtgaaggagcgtgggctgcctgtgagaatgttgagggggatgatgccggggagctcaggcagggaagggatctggtgtctgcctgaggagccatcccagggcttgagaaggagctggcctgctgccttcctggacggtgaggacgctgacgacattgttattgcaagttttctggcaatagggagcccccaggggcaggggagggcttggactgaaccctcggaaaggggcacagctgggctgggctcctctggttcccaatttctgagacttcaggaggagggcagagaaggaagggcagcctctgtaggaggcacatatgggcccagacaggcctgagctaggagggtgagaacctgggtgagagtcacaggggagacaacaaagactctcaggaggtgatggattcgcaaggcaggaagggttcctggctcccctcgccccttctcccagcacccccaggctcccacatccaccctgcaggaagaggcctgtaggggcttccctcatccaacaaaagtggaaattacgagaagagaggcagagtcagcaggggacagcagacccaggaactggccccactctcctggtcctcatctgctttgcggcttttctttctttttttttttttttggtcttttttgagacggagtctggctctatcacccaggctggagtgcagtggcgcaatctcagctccctgcagcctccacctcctgggttcaagtgattcttgtgcctcagactcccgagtagctggaattactagcacccatcaccacacccagctaatttttgtctttttagtagagacagggttttgccatgttggccagactggtctcaaactcctgacctgccttggactcccaaagtgctgggattacaggcatgagtcactgtgctagccccatgtggcttttcaaatgagacagagcaggtggacaaagggaagactcagcagagggagtgaagagaagggtgggaaggctgtggcctcaggctcagctgtgtaggggcccatctcacccgtctttgcctccacagagactgggctgcgtcgtttcccatcctggatcccaaagagcaggaacttgtacttgcgggagggttccaggtcagggatagtgacctcccgctgatctgcagccacgggcaccacctggggctgcccgtccctgtccttgtactgaaccacaaaggagtcgaattcaccctcagggactgtccatgagaggcccacagagtcaggggttatatccgtcactgtcagctcccctaggcgtggctccaggggaggcttggaggcctctgtggctggggctggtgggaggggagctgggatttgggaagacaaagaacatggttgagatctctgaggggagaacccctgggctttgagggcctcaggggggctgtgaactgagatggggaatagttacacctttacttccagacctctaactgaaatgcagcatttctttccaaaactaatatagaaaacccaccagagtagaattattgtgactttgttaccaatagaaaccacagatgttttcatgtcaccttagagttattgcagaaactttaaaataccttttatatccatcactgcttctaaattttgtagtttagtaaacgcgccaccaagtcctgttatttaatgaactagtaaataagtccaagtattactaaatcgtaactttggatttttaagaaatattttgggccgggtgcagtggctcatgccaggccgaggcgggtggatcacctgaggtcaggagtttgaggccagcctggccaacatggcgaaaccctgtttctactaaaaatacaaaaaattagctgggtgtggtggcacgtgcccgtaatcccagttactcgggaggctgaggcaggagaattgcttgaacttgggaagcggaggttgcagtgagccgagatcgcgccattgcactccagcctggatgacaagagcaaaactccatctcaaaaataaaaaagaaatattttgataactgtctataaatataatgtttcctttgtaatcctatacagcttattttacagatttaaaaacattgccttcaggtggggtaggggtttcaccagatgccacagcacaacaatcatggagaacctgtgcccaggaagccatgaggggcaggaaggagcccagagcaagagtgaggcagcctcctggagagatgaaaactctccagggctgggatggaatgcagtgcaggcaggtggcagaggactcctgagaagggactcaggatgtaaagcacttcgcctcaacaaaaaagggcagaagcaggaggtggcagctgtgtccaagtcacagcagggttgtaaagagaaggggtggaaacagctgtgggcagtcggagagggggagagaaagtctgtggctggatttaggccaaatggaaataagacattcccctgggcggggggcagagtggagatggggaaggagctggagggctgagaaggctctagccctgggaggagtaaaggggtcagggaacagaaagactggcagggtcaccgagccagggcctgaggggatctagcccctcagtgagggtgcggtggtaccaaggcagggctggaagaagggccatggggtgggggagctctgggtaaccagagatgaggactgagtccccccattactcacccgtcacgatgaccacagacagggggcccatgcgttgcccatcatgtagtccatacatgttcatcttatattttctctcaggctccaggttgtagactgtgacctctcgctggtctgccgccaccggcaccacctggggctgcccgtccttgtccttgtactggactatgaaggagtcaaactggccctcggggactgtccaggagaggcccacagagttgggggtcacatctgtcactgtcagctctcctaggcgtggctccagcggggactcagtggctggaggggtctcttcttgttgtggggctgggacagagatggtagggggctgttagtaaagaatcccccttttcttatagtaatgatgtctagttatttattttttattttttatttttgagatggagtctcgctgtcacccagagcagtgggcgacctcggctcactgcagcctctgcctcccgggttcaagcgatcctcctgccttagcctcccaagtagctgggactacaggcgtgcgccaccatgcctgcctaattttgtgtgtgtgtgtatttttagtggagacggcatttgccatgttggccaggctggtctcaaacccctgacctcaggtgatccacctgcctcagcccccaaagtgctgggattacaggtgtgagccaccacacccagcgatgtctgttgcatttgtggaacccgcatgatggttttgatgtaaaagcgcattgatctgaacatctgtctggtcaacagtccttcactaggtccctgctcggtgtctgaggctgcatttgttgggggagaagagtatcaaccatcactgacaccctgggagagcgctgaaattccatctatatgccaatgactccagatttacaccctctgtccagacctctcctgaaccccagactagtgttcgtgcaacgtcttccttggaggcctacttgtgtgtcaaactcaacaagtccaaaactgagcctctgagcttcctgacacctgctcccgccacagcctccccacctcagtaagattacaactttttttttttgagacggagtttcgctgttgttgctcaggctggtgtgcgatggcgccctctcggctcaccgcaacctacgcctcctgggttcaagcgattctcctgccttagcctcctgagtagctgggattacaggcatgtgccaccacgtccggctaattttgtattttcagtagagatggggtttctccacgttagtcaggttggtcttgaactcccgacctcaggtgatccgcccgcctcggcctccccaagtgctgggattacaggcatgatcctccacgcctgaccaggattacaacttcattcttccagctgctcagatctaaaccgccagagtcatccccgagtcctctcttaaactccacatccgccctgtgggtatccgcctgttgtcactaccttcagagtctgacccctccttgccacctccaagcaccactggctcctcctggattatcacaacattctctcaggtcatcgccttctgccctcacccccctttagtctgttgggtctgcagccagaaggatcctgttaacacattagccagagctggttcccgcagtggcttctacctcactcagggtgaaatccaagtcctgcactggcctctgaggtcccatattcatctcttagatcattccctattgcctgccctcctccaactccaccacaaaacatactgcattcctcactgtctgcagacatctggggctgcttctcgcctgccagtctctgcatttgctcttccttctgtctgggatgctctttccccaaaggcctaggtggctgtcctctcacctccttcagggctttcctcagacactgccctcgcagtgaggcccttgctgtctccctactaggctctgcttttccccaccactcatcactgtcacatccggtgccactgacatatttgtgcaatttgttgcctgtccctctccactagaatgtgagctcctcaggcaggagctctgctttattcactgctgtgtcccagtccctggcacacagtaggtgctccacagatgtctgtaaaataatgagtggtctacaggtctgggctcaggacctgcagatccccaccactcccgcatgaggaagcactcattagtgagcaaactagaaggtggtcccaagaggcaaaatggcagagaaggtggctggatgggtggggctcccaagaacttgtttctctggcttcctccggagggcaagacaaggctccaagcaagtgacaactgcttaaaacaggctggtgaccaggcctcgggcagacagaaatgagtcaggctggggagggcaggcatggaggcagctgaggtggtgggagggagcagagtgaccaccaagtattgaacatctactatgtacaggtaccaggctgggcattttctctcatttcatttgccttctaaccttacttgttcctgcagcacccattccctgctcctttttgccctctctgcacttctttccatgagggaatgaaaatgtccttcaccatcaagctttattgctggtggtttggattaactggaaaggtacaattataacgattcatgactctggcagtccccatgctgcatgtgggacagtccttttccaatttagaagtgtgtctaatgagctccacgcacctctccccctggcaactgcactgtgtgtgctgccagacacagcccccagcttggcggactccagctgcttcgtccttttgctgctctgataatgcgcactgatgcccatttctttcctaaagggcctcatctattttatccaggacgtgtaaaatacatgtttcaaaatatccagcattagaacatggatatacagggattccctcacgggaaggtctgagcaaaagatgaatgagctgagaagatgccagacatgttacatcaccacctttaaccgtgacaacaagctgggcagcgtttactccctcctgaatatgaggaagctgaggttccaggagaggaggtaagtttttcaagatcatacagctggctgggcacggtgcctcacgcctgtaatcccagcactttgggaggccaaggcgggtggatcatctgaggtcagaagttcgagaccagcctggctaacatggtgaaaccctgtctctactaaaaatacaaaaattagccgggtgtggtggtgggcgcctgtaatcccagctacttggggggctgaggcaggaggactgcttgaacctgggagccagaggttgcagtgagctgagatcatgccactgcactccagcctgggtgacaaagcaagactctgtctcaaaaaaataataataaaataaaaaaataaaaatcatacagctgagaacagaggaagacaggaaggaactcagtttgtcagattcccaaactccatttatctctactgcaccgacttggtcagtgcctgacagagcccatccttaccccagggaccaggcacagggcctcacagagcccagtgtgggtccctgggacagagcggcagagggagggtcactccaggagcagacttggcagcatgtctgggcctggcaccagcctccaccctacaacctcaggccccaaggacagccactcagggtggctttgccgtctccctcttctcagggctgactgaggcaaagaaaataaattgagggtggaaggttctggaaatgaaatcaaccaagtcatgatgaggctgagcttggtggaattacagaaaccatgttctggaaaactatctatttctctacttttaattttttaatctttccccttatagtaaaagttatttttgagaaaggtgtgtctttgtttctgtgagcaaaggaaaaaagagattcccctcactgtgactaaaccgggcaggtcagcccgagggtcccagaggcactgctgtccactcagcctcttgggctgaggccctggagaggaggtgcccaggctggtcctgtgtggtggtggatgtggccctgtaaccaggcctgagagaaagggtggaagggatgttcttctttgctgtaaagtcactcactggatgagtattaaagaaagccttgtggccgggcgtggtggcttatgcctataatcccagcactttggaaggccaaggcgggtggatcacttgaggtcaagagtttgagaccagcctggctgacatggtaaaaccccatctctattaaaaatacaaaaattagccaggtgtggtggtgcatgcctgtaatcccagctactcgggaggctgaggcaggagaatcacttgaacctgggaggcaaaggttgcagtgagccaagattgcaccactgcattccagcctgggcaacagagctcaaaaaacagaaagaaaggaaaaaaagaaagaaagagagagagagagacagaaagaaagagaaagaaagaaagaaagaaagaaagaaagaaagaaagaaagaaagaaagaaagaaagaaaaagagagaaagaagaaagagaaagctttgtggtcaggcgtggtggctcacgcctgtaataccagaactttgggaggccgaggcaggtggctcacttgaggatctggagtttgagaccagcctggccaacacggtgaaccccgtctctactaaaaatacaaaaaagtaaccaggtgtggtggcacgcatctgtagtcccagctatttgggaggctgaggcaggagaatcacttgaacttgggaggcagaggttgcagtgagctgagatcgcaccactgcactccaggctgggcaacagagtgagactctgtctcaaaaaaaaaaaaaaaaaaaaaaagacaagaaagaaaagaaagcttgcttcaagctgtactgatgaagaggccaatgtctcacgcgcattctcccatccaagtactaaccagacctgaccctgcttagcttctgagatcagaggagatgataggacaccttcagggtggtatggccttagattcatgtgcattctgaccaagtaactgaaccagccaaaggggacaaagcagacctcagagtaagaatatttataacaattctcacagcagacactggcagcatatttacttttgccaggcccattcttgatgctttacatctgttaactcacttaaccctcacaataactctgtgaggtaggtgtccccattttacggacaaggaaacagaggtgcagaaagtttaaaacttgctcagggccatgaaagctggtggtacgccagtccccagtgacatgctctttctaggtcttcccctggcaggcagcctcaaggttccactggagcaaggagagcaactggctacagggaagctgggagccagcagtgggagggaaccaaagcaggcccctgcccctcactcacctgtcacgcccacggcggacaccgggcccacgcgctgcccctcgtggaggccgtacaggtgcatcttgtacttgtgcccgggctctaggcctcccacggtgacctcactctccttgcccccaacacgcaccgcccggggccgcccatccctgtccttgtactgcacggtgaaagagtcgaagctgccctgggggacggtccagaagaggctcagcgaatcaggggaggatcctgtcactgtcagctcccccaggagcggctcctcgggggactccggggcctccgtgcccagttctgtggggctgggggtctcgtccacatcctcctgaggagctgagagaagagatagaggcataaagggctgctggctttgctgctgctgcccacagatgacagccatggaaatgcccttacgctgtgggctcaggggctctgtagcctttgtatttgccattcggtcactcacggatggagaaggctgagacagcccttgccccatcctgctctggtgggttctgtgggggtgaggggtctcccttcgtgtctgagaaaggagctgagatgggaagagaggaagcctctgagggttcttccaaaccacgttcactgacagtgctgacctcagacagtgaggagggcagtgaggcctcttcctacctgtgccctccccagggcactctggctgccccacccctcatatgaggatctgaccatggaatgtgctcttgctgtggcctccccaggcagccctgcccctccctcccctttaaccccaaggaatgaattgctaaggcagggctccaggcatgagtgggagaaaaattctggggtgagtgggatccaaggagagacatgtccttccctggctggctctggaatcacagccctgtgggcacctacccgccccctacagttaggtctctgctgaggctccatggagtggggagactgtggcacaagggaaaccagcccttctgtgacctgctacatgggggactactttgggatagcagattgaggaaagaattggcaagaatgacaacccagaggaagggagggaggtggggagcaaaaaagattactgggaagtgagagagtcagggagaaattgcagctcactctgaaaatgctttgctgctccaagcactattctaagtgtgtgggctttttttgtttttgtttttgtttttttttttgagatggagtctcactctgtcgcccaggctggaatgcagtggcgcgatctcggctcactgcaagctccgcctcccgggttcacgccattctcctgcctcatcctcttgagtagctgggactacaggcacctgccaccatgcctggctaattttttgtatttttagtggagacacggtttcaccgtgttagccaggatggtctcgatctcctgacctcgtgatccacccgccttggcctcccaaaatgctgggattacaggcatgagccactgtgcctggcctttctaagtgttatacatatattaactcatgtaattccaacagctctgtgcagagggactgaaatccagccacctgacagaagggaaagctgaggcacagagaggttaagcaatttgcacaaggtcctacaggaagtaagttgcaaggctggtagtgagactcgggcagttggctccggagtctttgctcctaaccactatccacactatctctcatcaaataattcacaggccaggggaatggcactggacagggaaaggctggggacatggaggaacaggctgggatgctgggctgaacacaatccctttgccctgttccaagggggctgggagtcaaggagtcgggagctgagaggagtcctcttcatgctgcaaaaaggctagagaaacgtggtgctcttgtcacttggatctgccacctctgaacacagcagaaatggcaggaggttgtgggcagcaggtgacagaagcccagaagtgaccatggcccaaaccagaccatgaaggagcccagtaaaaactgaggggtgagaacacagtgaccgaatggtgaggacatctgtggggaggacagccccaggtggaaggatgagtccaggtgtttggaatgggggaaaataggacctgcccttggagatgaagaagtgaggctgaggaagagatgaggaggtggaggctggatgagggggacctggcatgcagaggacaggagagcagtgcgggaggaagtgggtggaggctttggcaaaatgagctgagaaggcgaagatggagggaggctggaaggagccccagccaagtcccgctcacaggatggggctagcaggggagggaggcctggcagccatgactcaccagtcttggccaccacagactcgggccccacacgctgcctgccacgaagcccgtagaggttcatcttatacttccggtcgggatccaggccggggacagtaacctcattctcatcccccgcaacaggcactgcctggggctgcccctgtgcatccttgtactggaccatgaatgagtcgaaggggccctgggccactgtccatgagagacgcaaggagtctggggtcacgccggtcactgtcagttcccccaggaggggctgctccaggaactcagggcgggggggctcctctttcctctctggagctgtaaacaaggagatccagccaggtgctgaactggcagcctgggactggggcttggggtttcgacgggatgtcacacctatggggggtggggggtcactagtccattaattcgagtgctaaacttctgggaagcctgacacagccagggtatgacacaccttctgggccacggggagctgctgcttgggatggaaggggcccagcagtgcgggggagtctggctgcccctcagccctggagtggggccgggaagctggagtcagctgtcttgctgggggaccccagctggttttgggctgaagggaagtgtgcatggggctgagaaggggtcacatgggggctgaggtggctgctactcaccagtggtgccatcggccgtgagggggccataccgcttcttgttcgcaattccaaacagagtgaatctgtacttgtggtcagggtccagtgaggagacaacaaatgaacgctcgggcccttccacaggtaccacctggggccgtccatccctgtccctgtactggaccatgaaggtgtcaaactggccctcagggacagtccaggagaggtgcagtgaatctggggtagggtctgtcacccacaggtttcccaggtggggtggagtccctggacttgggtcactctgaggcactaggaagagtgggtagagagaagggagagacttaggtccaaggagaatggggaagccaaatcccacataggaatgctgtgtgaggctgtgcaggttgttcactgcacaaaagtgcatttgctgagggagtacagagggactgaaatccagccagcactctgcttgccgagctgtgtgccctggtgaggagtggtgtccactttaaggaatgggtgccttctttcaaacggcatggaagcactgcgtggactagtgtggctctgcctccaaccacaaaccagagcagcagggagcttcagaaagaggggagcccagccaggccctttcacatctccatagccagggaaatcttcccagtacaacctccactgcttccaagcctaactactagctggcttcttctccaagagaggagagcacaatccttgaagcgttttaacgtgggacagcctccctcatctatgctgcaggcctctcctcctctttgggaactttgacccatggatggactccctcgcctgcagcactgacccttcactccccagcagctgtgccatcagcatttcaacaagctactgtcacacccctcctcacccccactctgtgtgcatctctctctagcctccatcttccctctttgctctcattcccagcccagattccagaaagtgatgtctacactgattgcagccatgtcctcacctccaccaccctcccgatccagctccacccctccaccaggcagcagctctcatgcaggccaggggtggccttgccattgctaaattctgtggacgctccgtagcccttgaatcactgttccggaatctgacaagtccaaccgcaccctccttcctggagtccagacagcaccctccctggttctgcccctccctgcaagtcactccgcaagctaccctgtgggctcttcttcctctgcctccgctgtgagtgtaggctgtcgacagggttccagtggccctgtctcttccccaaccccacacgactactctggtgcctcaattctcctgacctataaagtaggcatgcctcccaggtgtgctttatggggtgtgatgatccacttagagaacatcttgatcacaactgactctcaataaatgcacaaaaggtatttatgtaagtgtctcttagatattgatctaagtttatctaaggcgttgttccccacctctgctgctccctgcctcagggaatgggactgtctcatccagaaccctgggggctgcctggtacaccttgctttccttcgcctcccccatccagccccactgccaccatcccagctgacccatcatcatttttcttttttttgagacagggtgttgctctgtgcagagtgtggatagcacccaggctggagtacagtggcacaatcatggctctctgcagcctcggtctcctgggctcaagcgatcctcccacctcaagcctctcaagtagctgggactacaggcacgcaccaccacgcctggctaatatcttttgttatagtagagatggggggtctcactatgttgccaggttggtctcaaactcctagcctcaagcgatcctcctgccttggcctcccaaggtgctgggattataggcaggatcaaccctgctagcctttaccagctcttaactcacttctccagctagtctcagcagccacccggttatttgcaagataaatatctagtctcatcactctcccactttacccttcagaggccctctaggggccttcgaatgaggcccaagcccctcagcacagcacaggaagccctgagaccaggccctttggcaccccccacatgccctgttctccagccagaggaaactgtaacagtgattctcttactggccatgctctccccaccttactcaccgtgactccctcaggctgcactgagcttctcaaactctttgcctgccccaccactactttcccttcagaattcagctcatgcaccactgcctccaggaagccttcccggagctcccaaagcaggttcccaaagcactgagaaaacctcttcagggcagtacagagggcagggtgttactgctgtcactcacagatcttggcttcagccaccagcggaccatgcctcttcttgccaacaaacccatacaggacaaatttgtacttgcggccaggatccagggaggtgatgacggccgagcgctggggtccttccacgggcaccacctggggctgcccgtccctgtctttgtactggatcacgaaggagtcaaactcgccctcggggaccgtccagcgcaggagcaaggagtcggaggtcctgtctgtcaccgtcagctcacccaggcgtggtgggcctgaggacttcccaggcttctcctcatccttgtctggagtttgagaggcaaaagcaaagcatagtggactcaaccgttctcttgtctgtgtctccttccctctcccctgcccacctcactccatcctggatagatccctccccggaagactctatctgcccacccctcagtgactagctcttctggaagaggggcatttccctctcaatctctgcttcttcccttgtgacagtttctccatccctcacaaggtcttggtctctctgcacaccaggatctttgcgggggtttcaggtccccctggttctgaatgagagtttcaagcctccctgctgcagcatcagagcagtctgaaagctcctctgcccacctgagctgctgtctctcttaccaccctctcttccagtggtgagcttgacctggagctgggggatgagtcagccaccctggtcccacagagaggaacaaagaggggatgtgaaagccaggtaccccaggacctgtctttcactggtcctgcaaacctcatccatgtctgaagtcctgatggctgtggagccccctgccccaaggagccttcacccccagcagaaactggctgatgggaccatggactgctgtccactgcaaaccaggctcccagggacgaggtattgggggctgagggtcagtgtccagaggccttcccatgcccaccctgaaagatttatagggcagggaagggcagaggagcaaccgaagagtgggggcaggggacagggcaaggaaagctgcaggtggagggccagggaccttcagcctctctcctggaatctctgtcccaccctcggcctttttacctctgcctctttcccctctccccacccatccttatcattgttttaagatccccctcgatccatcttcctgctgaacctgcaattccttttctctccttttctcctctatccagccccaaacatcagccctgcccttcactggcccctcaatatccatcctacctctgaagtcccaataaccccagctcctcccccaatctcaggatattgatctgagcagagtccaagatgtacccataatgccttggtagatgatggggtcagagggcttgcccccaggagggaccccatgaagtgacagctcatacggggttccaggagggggtggaggcaccagagcctggcggacgtcccctggcagcacttcctcatgtgcccccggcccctcgggcacccgcatgcgcagttggaagtaggcaaaggtgtcaggctgggcggtccagaccacacggaggcgccctgtctcatctctgcccagcaccctcaactctcccagctcctgggggcgctgctgcaggagaggagcctgggccccttgcgtcgtcgaggggcctgagggaggaggctcatcggtagtccccaagaggcccaagggtgaggaccctgggaaggggcagggtgagaaaaagaggagagtccagtatgagaactagaaaggaatccccagtccccaggttctgccctccagcctctaagagccttgttctacttctacttctggttccctcacctgggccactccctcctcccaaaggtcagccaatcctccaaacacccccatctaccacattcctgagcagacgggcctgtgcttcaggcaggtaataggtaaaataaagcctgctatccttcaccccacaaggcttccatgacctccagcccccggagacttccatgtccctccccacatacatcccccccactgggtggtggtcaggtggcttccattagtgctgcagtgagaagcctggaagaaagacagtggtgttagagagggaggatgcaagaggagagtgggcagtgggaagagagagagggtgtgggggtggacatccaggtcaggtggcatctgggccctatgggggaagaagaggtccaccaccctccccacagcagccacagggtgccctttccccaagcccagacatcgttcctgtgggagagaccagcataaagtgagccagggggtctgaaaagccagcttaagaagcagtggtttcacctccccaatatacagttgctgcctgatggcacccaggccacccccacgcagttctgatgtgtcccttcaaggtcaaggccaaattgtggaaaacagtaaccactaaccacagtcttcagccactctcaccacagtgagtcagaacgggaatcactgttttcaattcccagcccactcaaactgctccagtgaatctttgcaggtgccccaaccacatcaccctctattgcctaaaataacaatcctggaagtgtcccgggaaaccccaaagaaggcgctgccttgaccttaggcatccacaggatggatgccaggaccctggggtggggacgtcttctagggacaatggactcgtgctttgtcctgggggccccctggagccccggccaggtagggcctgaaggtagaagggggcagtggggggtggcagtgggaggaattcatgaatgcaggctccaacggcaggtgaggctggacaagggataggtgtcccgtggccccagcccacactacctgtggtggtgatgaaggcgtaggacttggaggtctgccccgcccgcaccccgtggacctccacgtggtaggtggtgccgggcctgaggtcgggcaggctgacggtgcgcgtggtgcccggcacagtcagctcaccgccggggccctctgcaggcggctgaggccgccagcgcagcaccacgcgctcgaactggccgcggagcccgtcgagagacacgagaagcgcgccatcggcggaactgcccagcacctctggcttggggtggcgggacgcagccacccggtcgacgccttcaggcgagaggccgtagattccctggttggagtcccgtttcctggtgccgggatcagggctggcggtggggcgggggtggcggggcgggggtgcgggggagccggctggggcggcggccaacagacgccgctgcaagtattcatggatgtggcgcgccaccgacgtgtaagtctggttggcccgcagtgggtagccgtgagcccgcaggtggcgctccaggtcctgcaccgtgccgcggaaacggctcagctcggccgtcaggttgccccaaggccgccgtgggggctgggacaggcttggcctgggcggggactcctcctccctttcctctgctggcctcgagggccaagggggccgtgggggccgcggggctggggctggccggggccgggacttggggggcggggctggggggcgcacctccgggtaactgtagtggcctggtgctgccaggggcaaaaaaggggagaacaggtcagtggcagctccctcccggcactccttcccgcggcagcccctccctcgatccctcccaccagagccagaggcctcttccctgtgccccagccccacctggaaagagaacggagggaaatcggtcagtgtcccgcagcccccccattcccctccaagcccaccactgttggtgccctagaaagaagagagaagcccgtgggtggggccctgtagctgaaggagagaaaggggagtcggggaagagaacatgagctacagcgaggtgggtgtccccctgtcacaggaaaagaaaaatatccaggtatctgttaagaaacctcgaggtttagtggaaaatcactgctgtgagacccacctcccagcaatcccaatccaaaagtcaacaggactgatgatctctaatctgcctaattccagtcccacaagatctatcagcacaaggcctgtcccggtacctaaatttaaaaaagaacctcccttaactgactggatcaggcagcatctcctattcacttctctccctggggccattcctttcataggctaacctgtaataaccttcctacaggactccaggcatctgagggctctgtctccccagtggcctcaggacagagcaaggcccccagcaggtgcctcgagactgccacacacctgccagaagcattcagaggagtctgtgagccctgagcctgggctcctgaggaggaggatccaaggctgggaaaccagggcccttccctaacctctggccagccatacctgtgttggccctgacagaagctgggtagctgactgcccggccccgctccgctgtgacagtcaccacatattctacgcctggcatcaggtcagtcagcagcgtcccgtctgcttcagggggcacttccagcctcaccctctggttgccggcactgacgtaggacaccacaaatcggtccacctcagcctggggacgcagccagccaagctccagtgttgtcggtgtcacagccaccactcggaggtcctggggcccatcgatcactagccaggttaaagaggaggactcaggtgggtgtctggttcttcaatcatcatctttccttccaagagcctagcccccatccagccccttccttctgccctcccggagggcagattccctctctagtccagatctccactcaggacacccctccccacagccccagctctcactggtggtgatggtcttggaggcaggaaggccccagctggtccctcgaagggctcggacagtgacctggtactcctgtccaggggccagtcctctctggtcataggctgaggcagagcttggaacccgtgctgtgaatggggggctcgccccctctgtctgtgagagagagcaccaggtggctcaggggctggcactcttgcctctgctgctcaatcccccttatctcttctttctccaattctaaacagtgtcagcatggtactgtgtggaacttgaccctgtacaagctggggagcaaacatgctgagagcgctaactccttgtgagccactgttctaggcgaggtacacacatgaactcacttaattctcacaacaaccctacgaaacaggtcctattagtcccattttacagataaggaaactgagacacagaaggacaagtatcttgccaacgtcaccaacaccaagaaaatggcaagaatttaggccctagcagtgtgatcccagagtcccctctcatgggcaccccctatttatctgtcagagtcccctctcatgggcaccccgtgttcatctgccagaattccacccaacatgcaccaggactctccctccagctttgccctggcaactctgactacctgggcatgaggagccttttcctaagcttggtcctgtcagaacaaatgaagtagatcaaggatgccccttcaagttgcactttctccttaaagggtctgcctcaccctgaacctcctcgtagatgcctgctcatggctgtgtaacaggagtgggacccgcatcacaacctttcccttgagggacttttcttgtctcttcacccgggttgtaggctcctcaaaacaagaaccacctgctcaaagttccacaaatatgtttcctgattgttgattttgtacctggcatcatgctgggcattggagacacaaaaataaaatatatggtccctgtcctcaggtagctgagactctaatagctaaatgtatggccacatcttgaatatatgagatacttacaacaatctctatgcttagcaaatgcttgtgagaaaacaacactcctacaagtgtacatttaaggaattatgattatgtgtggtgcctccaaagggaatctactggaccctgctccaggcagggtctcctggaatgcccaccactggggaaacaggaggaactgtacatctgtgagcattctaacagccccacattttgctgtgctgtccagctaggacagccgctaaggatgctgtgttctgcctagctatgttggctgtgatggggacacctccattcagccaagtaggattggaaatttcaaaaggtactctcctaaaccaagagaactgtggggaaatcaacatagtaaataccgaagtataaaaccagatgagaaggccacgtagagatttctgggttgaggatgaagtaaagctttgtcagttttctgggttgaaaagttttcctgggcacataggacctccagccctctcctattcaccctgccttagaataccccagcctaggaagccttgggttggcctcaactcaagacccatgaaatccttacccttcccagaatttatttgttcattttctctgtgtgtgtgtatgtctctttctctttatccacacccaccccatccccacagccgcaatacacacaccttggatgctccctgatgatgtctggttctttcagtgaggcaagcctatccccagagttctccttctccctatatatatcctttagacacttcttggttcctcctgagatccatctgggaacagtcccctgaaagtccatcaacctaacccatgtctcctacgtctcctagcaccatcttactggtctgaagcaggctttcttttttctttttttgagagggagttttgctcttgttgcccaggctggagtgcaatggcgcgatctcagctcatcgcgagctccgcctcccgggttcaagcgattctcctgcctcagcctcccgagtagctgggattacaggcatgcgccaccatgtccggctaattttgtatttttagtagagacggggtttctccatgttggtcaggctggtctcgaactcccgacctcaggtgatccacccacctcagcctcccaaagtgctgggattacaggcgtgagccaccacacctggccctgaagcagtctttctaaacagatgctggcagctggctctgccccttggtaaagcttggctgcttcactgattttttttttttttgagacggaatttcgctcttgtctcccaggctggagtgcaatggcacgatctcagctcactacaacctccgcctccaagattcaagggattcttccttagcctcccaagtagctgggattacaggcatacaccaccatgctcagctaattttgtatttttagtagagatggggtttcactatgttggtcaggctgttctcaaactcctgacctcagatgatccacccactttggcctcccaaagtgctgggattacaggcatgagccactgcgcctggcctgcttcactgattttgttcttgggaagttttagagtttatctcaatattaacctcgtggctccagatgaactctaccttggctggtccttggagcttatctcaccctcattgctgtttttagactagacccaagcaaaaacttctctgaggctgtgaggttttgagtcccagtgaacacttagcctagccctgatttccaggctgcaggacacacccagacaaggaatatctgaacctctttctcattcaggaactcatctccctcagtttccccatgctttctctcacattcatagtggagctagcactttgcaaaatagcaacattccttcacttagggggcctcaggctggaggggcatcagaatcacctggagggcttgttgcaatacaggttactgggctctgtgcccagactttctgactcagtagatctagtgggggagtctgacaatttgcatgcctaacatactcccaggtgatgctgatgctgcaggtccagggaacacactttgagaaccactgagtcagagtaacagtgccacatatacagggagaggagaaactttcttcttctgcattctgaaaaataattccaataactaggtatgtcccttgatctggaatagcagagtttgggctttgagagagaagtgcttctgggaagagggaaggtaagaggtagagataggcttctaggatgacagcagcagccagaggacagacagctattgaatatactctgtacccacagaaatggacaaagggtagctgggcattgtggcaggtgtctgtaatcccagctacttgggaggctgaggcaggagaatcgtttgaacctgggaagcagaggttgcagtgagccgagattgcgccattgcactccagcctgagcaacaagagcaaaactctgtctcaaaaaaaaaaaaaaagaaagaaagaaaagaaaagaaatagatggcacttgccaaggcagaaggtacgatgccagggaccagctacagacagcagaaagcatggtctgagggtgggtagcccaggcccaagaggagtgtctggggaccaattttacaggagtgttttccacacccaggctcagagaagacccagaatgtgacagatgcccataccgagagcagaatggatgagctaagaacatggccaagcctggcacaggccaacttggcaccaccatcctggctctgagtgagggagaaagtctagggcttcaactggaaagcggcgcccttgacaacaccaaggatcggtttgtatttatttactcagagcaggagacaactgctgccctaaaagctcctcttatctcaagtgtttattttaattcttctttccctgaaatttcttaagaaacttccttttcgaagtcccaccctttcaagattagagctatgtaaataatatatacagagaagaagagagtgggagaaacactttaaaatgttagcagtgcttgttttagtgaggagcagccaggaattgtttttcttttctctagttgccaaattcttgtctcgtgattaaagtatttttataacaacaacaaaaaaagatgtttaaacagaagaaaaaattcaagctatcttggttgcgccacgaagttgagatttctgcttctgctttggctggagagtgaggagaggcagaacatagtagggggctggcctgaggagcataatgacaagacaaagcaaagtggagtgaggatgacagttcctctgagctgtccccttctgtcctagtgccttccgaggctttaggcccagggagttgtttatttttacagagtcctggctaagctgatgaagatgaggatgacatggcccacaccccatatggcatttgtgggatgatgcaggaaaacatgagttggatggtagaaatgtcagaagatttgcagctggggaaacgaccatatcttaaaagcccagtctgcacaaagggaggccccaaataagtgaccacaaggctttgtccttagggtgttccctctaatgttttaagagcaagttggatggccaggagtggtggctcatgcctgtaatcccagcactttgggaggctgaggcgggcagatcacttgagcccaggagttcaggaccagcctgggcatgcaacatggagaaaccccgtctctactaaaaatacaaacattagcaggctaaggtggtgcacacctgtagtcccagctacttgggaggctgaggtaagaggatgacctaagcctgggatgcagaggttgcagtgagctgagatggcaccactgcactcgagcctgggccacagagtgagactctctgtctcaaaaaaaaaaaaaaaaaaaaaaaaaaaaaagagcaagttggagggagacagagaaaaaactggtttgcatgtactgatgacaaggaggtgggagatgaagttcacagactcaaaattattgcaacagcctagacagcttggcccaaaccaaaaaagataacattgaacagggccaaatgcaaaggcctatatttaggtgaaaaaaaaaaaagtgtatatagttgaatgttgtcttctttccttccatcttttttccctgctaatctgtattttctaagttttctgcacggggcctatattacttttataattaaaagttacttaaaaaaccaaatatgaccaaaacagctgcctgcttgtgtgactacaaattgctatacgccagctctgagaaaagtgtccataaattcagagtaagtcagtgggcccctctctgtccccacattttgggggcacatgaaaaaagcaagaatcacaggaaggtaaaggattcagagaataaagacttagggaaaaggggcgaagaaactgggaggttttgcctgaggaatgaagacatcaggctggtgtctccaaatacctgaaggcctgtggtgtaggacacagggaaagcaaaaaacattccagctgctgatgaatacccagctagggccaacggacaggtgctagaataggggcagacggattctgcaacaatgataacagctaacagtgatgaccaacaatggactggacagcctcaggaagtactgagctctctgttaccaggtgttccaactgtgtgggaccaatgcttgctggagatgctgcagaggcctcagtgcccagtgtcaagcaggctaagaaagcctttacagcagcttcaggtacccagccatctggactcaaccaatgatcacctggaacttcctccaggaggtgagccctgcccccctgtcctgcccactcagtcccctcctggagcctggcatctctctcaccgtggggatgaactgaatttcataggcatccacggggccaggagccggggtccactctgtccgaactgttgtctcctccaagagatgcatcctcatgccctcaatggttggcacctctgcccaagagaatgggttagggaaagctggttagcacaaggcaaccacccccacccacagccccttttactcagggacatcgaagaggcccatcctaactcccactcctctctgctagtggagaatagctgacagagggctgaacggggcttggatcgccttcaccttctctccatcttcaggagcacagaatctccctaaatgcaactaaatgggccccaacctgctcctcagagatctgaaggccagtcctgcccactggaaagccccacccctgtggttctgctgcccctggtgggcactggctccttggaatgacatgctctccctccactcttcctcaggctcaggtcttccccatggctcctgttcacagaatcacagtcccagagtacactggggaaggctgcctgctcaccttctccgcagtcttcgccagcatacccatctttgcagacacagctgccatcgtgacactctcctcggccacggcagtcccctgggcatgtctggatggcacagtcagggcctcggaagccctctacacacacacactggcctgcccggcacagttcccggggcccgcagcctccagggcaggcgctggctggaggctcttcctgcccgcagtcctcaccgccatagcccacgtggcacaggcacactccttgcacacaccgcccacgtccccggcagtcagccgggcacatgcgggtggcacaggtagggccggtgtagcctgggtcgcacaggcagcgcccttcctcacagcggcccctcccgtggcagttggaggggcaggtgcggatgctgcagtcctcactcacgtagccttcccaacagatgcacacaccgtcctggcacacgccgtgctggctgcagtcattcgggcactgcctcacaccgcaatcctcgccagagtagccgtcctcgcacacacaccgcccatctaggcactggccgcggcctcggcagcccccggggcagctgcgcgtgctgcagtcttcccctgagtagcctgcgtcacacacgcacacgccatcctcgcaaaggccgtgcccacggcagtccccgggacagcgacggctcccacagtcctcaccggtgaagcccgggttgcacacgcagcggccatccacgcagcgcccgcgcccgcgacagtcgccaggacaggcgcgcgtgccgcagtcccggcctgtgtaccccggccaacacatgcagcggccactctcacagcggccccggccacgacagtccccaggacagctgcgcacaccgcagtcctcgccgctgtagcccgcattgcaaacacacacgccgttctcgcagcgcccgcgacctctacagtcgcgtgggcaggcgcgcgagccgcaatcggttccagtgtaccccggccagcacacgcagcggccgtcctcgcagcggcccctttggttgcagtcgccagggcagctgcgcacgccgcagtcgtccccgctgtagcccgtgtcgcaaatgcattcgccgtcctcgcagcgcccgcggccccggcagtccctcggacatgtccgcgtgctgcagtcctcgcctgtgtacccgggccagcacacgcagcggccgtccacgcagcgcccgccctcgccacagtcccaggggcagctccgcgtaccacagtcctcgccagtgtagccggggtcacacacgcagcgcccgtccttgcagcgtccccgctggctgcagccccgagggcagctcctcaccccacagtcctcgccagtgtagccggggttacacacgcagcgcccattctcacagcgccccctctgactgcaaccgcgagggcagctcctcatgccacagtcgtcaccagtgtagcctgggtcacacacgcagcgcccaccctcacagcgtcccctctggctgcaacctcgagggcaggagcgctggctgcagtcggggcctgagaagcctgcccggcacacacacacgccctgcacgcagcgcccacggccttggcagtccccgggacaggatggccagccacagctggggccagtgtagccgggaaagcacacgcaacgaccacggacacagcgaccctgatcattgcagtcatctgggcaggaccccgaggctgagggtggggaagagggagggatctcagcatctgtggggtctgagcaggtgggcccaccccagcctggctcacaggaacaggtgcagcggctcagatcaaacacaccatggagactgcagagggtccgcacatctgtctgacctggagtaggaggggagaggcaagtctcagtctctctcctgggagagaggctgagcctatgtagtgctcctatgtgcaggcccctagccaggctagcctcatctcataaggccatgtctgctcccagttgctagtatgtgtaatgtatgcagcctctcagggccctcgcatatgctttggttgacatgtagcccagctctgctctccaagttgtgttctgggctgcatccacacccctcatggtgaggaaggagtgccttcttctaattcataccaaggacctttatggactagcaatgcccaccccaccccacctctccaccctcttctgtgatcacctgctcacctgtgccagcttgggcagaggcaggacaacatcccccagtgcactgttccttgagccccttcaccaactcctccaggatctctagacggaccctcagggcctgtacctctgaagcaaggactgggggctcggtgcctgggggacagccacagccagtggaagggggcaggttaatgcggtgggtgaataccacctgcttctcccctccttccactgtgtgctcgtaaagctgagaagaggggcttcccactccagcccccactgtgtggccccctggctggggagggggccggggggctggcagtgtcacattggaccgtgaagagaaggggcctgctctggctgtgctcagcagcaccaggagaaccaggctggaggttagagcatactgggctggcatcattcaggaggctgcagggagaaagggtaggtatgagagcagcttcaaaaaggagacaaaatgaatccccccttctccagcacatacccacggtcccaccacccacaagtaatctacccaactcacatgcatgtaaaaattcacattccgcccaaccctaaaggataccctccctgggcaagtctgttctctacctctctgatatcatttatttaccctgctcctcacccccttttctattgtgttcccctacactggtttttttgttttgttttgttttgttttgttttgtttgtttgtttgagacggagtttcactcttattgcccaggctggagtgcagtggtgcgatctcagctcaccacaacctccgcctcccaggtccaagcgattctcctgcctcagcctcctgagtagctgggattacaggcatgccccaccatgcctggctaattttgtacttttagtagagaccgggtttctccatgtcggtcaggctggtctcagactcctaacctcaggtgatctgctcgcctcagcctcccaaagtgctgggattacaggcatgagccaccgcacccggctctacactggtcttttgtttttcccacgagcactacaagctctcactactccaagggcctttgcattgtgtgttccctatgtctgggatgctcttcactctgctcataaaggctggctccatcttcaaatcttaactcccagttagggcagtcttccattactctctatcacaatatcctgttcctgttcttcatggcatttactgctgcctgagttatcagtttacttattacctttctctcaatgctacaatgggagctccttgagaacaaggacctcatctatcccaggactgctgtatacttgtgtctggcacataaatgttctatctgacacatcaatgttgaatgaattagtggatgagtacctagggccaatccttccccaaacacctggatcccagctcctactgtcttctaagaaaagtgcagattatcttctccctctctctctcacttttttttttttttttgagatggaatcttactctgtcgcccaggctggagtgcagtggtgcgatctcggctcactgcaacctctgtctcctagctcaagtgattttcctgcctcggcctcctgagtagctgggattataggtgcccacctccatgcccagctaatttttgtatttttagtagaaatgaggtttcaccatgtaggcaggctggtctcgaactcctgaccacaagtgatgtgcccgccttggcctcccaaagtgctgggattacaggcatgagtcaccgcacgacctctttctaatatagagacaggatcttgctcaaccccctggttgaagctggacttgaactcctgggctcaagccatcctcccacctcagcctcccaggtagctgggattaaaagcatgagccaccatgcttggcttctctctcttttttattcaactcctcactctcaactggatccttgctcaaatatctccaattgaaaaaaaaaaaacaaaaatcctcttcctcaggacttacatgatcaaatatcaagacttattttaaaggtgcaaggatagacagatgaaacagaatagggcccagaaacaggcccacacatatgtggtcaactaattaacgacaaaagtgcccctgcagttaagaggagaaaggatggtctttttagttcctggtgctgggtcaatccaacatccctaagtaaaaaaaaaaaaaaaaaaaaaaaacagtcattctccaccttatgtctgatataccgaaattaatttgagatgaacccaggacctaaataagaaaagtaaagcaatatctttcatagcaatatcttacagaaaatttctgaccttggagtaagcaagatttctttttttttttttttaagactgagtcttgctctgtcgcccagagtggagtacactggtgctatctcggctcactgcaacctccgtctcccaggttcaagtgattctcctacctcagcctcctgagtagcggggattacaggcatctgctcccacacccagctattttttgtatttttagtagagacggggcttcactatgttggccaggctggtctcaaactcctgaactcaggcaatccgcccgcctcggcttcccaaagtgctaggattacaggcttgagtcactgcacccagccgcaagatttcttaagtaaaacacacacaaaacctaaccataggccgggtgcagtggctcgtatctgtaatcccagcacttcaggaggcttaagtgtgaggattgcatgagcccaggagttggagaccagcctgggtaagatagtgagactctgtctctacaaaaaacaaaaagaattcactgggcgtggtggtacacctgtagtcccagctactcaggggctgaggtgggaggattacttgagtctgggaggtcgaggctgtggtgagctgtgatcatgccactgcactccagcctgggcaacagagctgatactctgtttcaaaaaaaagaaaaagaaaaaaacaaaacaaaatttcaggtcatcaaattacatcattaagagaataagaaggcagctgggtgtggtggttcacacctgaaatcccagcactttgggaggctgaagtgggcggatcatgaggtcaagagttcaagaccagcctggccaacatggtgaaaccccatctctactaaaaatacaaaaattagctgggcgtggtagcgggcacctgtagtcccagctactcgggaggctgaggaggagaatcgcttgaaactggaggcggaggttgcagtgagctgagatcatgccacttcacttcagcctgagaggaagagtgaaactccatctcaaaaaaaaaaaaaaaaaaaaaaaaatctctgcaaaacaaaataagccaaaatcaggaaacctagttttttaaattgtcaaaagacaaacaggtactccagaaaagaatatagccaaagagccaataaacattttatttattttacctgggctcaagtgattctcctacctcagcctctggagtagctaggatacaggcatgcgccacatgcccagctcattttttttgtagagatggagtcttgctctttcgcccaggctggagtgcagtggtgcgtcttggctcactgcaagctctgcctaccaggttcatgccattctcctgcctcagcctcctgagtagctgggactacaggcgcccaccaccatacttggctcatttttttgtatttttagtagagatgaggtttcaccgtgttagccaggatggtctcgatctcctgacctcgtgatccgcccaccttggcctcccacagtgctgggattacaggcgtgagccaccgcacccagccttttttttttttttttttttagtagagacagggtttcaccaagttggccaggctggtctcaaactcctgacctcaagtgatctgccttggcctcccaaagttattaggattacaggcatgggccaccacacccaccctatttcattttattttaagataaactctacctctgtcacccaggctgaagcacagtggcacaatcacagctcactgcagcctcaaactcctgggctcaagtgatcctcctgcctcagcctccagagtagctggaactacagatgggcatcaccatgcctggctaatttttaaattttttgtagagatgggatcttgctgtgttgcccaggctggccttgaactcctggcctcaagcaatcctcctgcctcaccctccacagtagttgggcttacaggtgtgagccactgcacccagatccaaggagcattttaaaagatgcacaaaatcactagttatcgggtaaatgtacgttaaaaccacaataagatgccactaaatatcctccagaatgcttgtccctcttcaaagaggctgtcattgcttgatattggcaagaatgtgaagcagctggaattgtcatctgttgcaagtgggagcatatattaatgcaaacactggaaagttgtttggtagtatctgctaaaacatatagtctataacccagatatctataactaaatatccggtgggaatgactgcatagttcttccaaaagacgtagaccataatgttcatgagatttattcctatattagctaaaactgaaagcaactcaagtgtccattcataaagtggataaataaattgtgccagagtcatacaatggaatactatacagcaataaaaaacaccctattgctacatgcaacatgggtgaatttcacacacatagtgctgagtaaaaaatatcacacacagaaagagaatgctcttatactcttatatacccttcctgagctaccaaaaaaagaaaaaagaaaaaagaaaacactctgaataatgccgtttatatgaggttcaaaaacaggcagaggctgggtgcagtggctcatgcctgtaatcccggcactttgggaagccgaggcgggcggatcacgaggtcaagagatggagaccatcctggccaacacggtgaaaccctgtctctactaaaaatacaaaaattagctgggcatggtggcacacacctgtagtcccagctacctgggaggctaaggcaaaagaattgcttgaatcccagaggcggaggttgcagtgaaccaagataatgccactgcactccagcctggcaacagatcaagactctatgtcaaaaaacaaacaaaaaaacaaacaaaaacaggcagagttaatctttgcttttagaagataggatcagattacttgtagggattattgaccggaaggagtcatatttctggaaatattttgtatcttaatctgggtggttacatagatatatacatattcaaaaactcattgagctgcacacttaagactttggcattttgctgtataaaaattgaaccatggctgggtgtggtggctcatgcctgtaatctcagtactttgggaggccaaggtaggcggatcacttgaggtcaggagttcaaaaccagcctggcgatcatgctgaaaccccgtctctactaaaaataaaaaataaaaaaaaattagctgggcatggtggcaggtgcctgtaatcccagctacttgggaggctgaggcgggagaatcgcttgaacctgggaggcaaaggttgcagtgagttgagattgtgccactgcactccagcctgggcaacagagcgagactccatctcaaaaaaaaaaaaaaatgaaaccttaaaaaacctatccccaatctcacaccccctccagccaccacatatttctctcctctacttcatggccacagttgtcaaaatttatttgtatttgatgtttacatttccttatagcctatgcatgcctcaatccactctactccctccaacccaccaaacagctccctctagggcttcccaatgacttcggtgccacaaaatctaagggacatttgtcttcatcttgcttgacctttgacttctctcaaaatcactagacacagttcaccgcatctttttttttttttttttttttgagatggagtctcactctgtcgcccaggctggagtgcagtggcacgatcttggctcaatgcaacctctgcctcctggggttcaagtgattctcctgcctcagcctcccgagtagctgggactacaggcacccgctaccacacctagctaattttttatttttagtagagacgaggtttcaccatcttgaccaggctggtcttgagctcctcagctcaggtgatctgcccacctcggcctcccaaagtgctggggttacaggcatgagccaccacacctggcccttctcttttaaaacattctgtatccacgctgaccaatatggtagccaggagggatatgaggctctgcaacacttgagatgtgaccagaacgaccaagtaagtgaattttactcagtatttttaaaagctccccagatgattgtaatgtgcaacaaatttctactaaattaatagacctactgctctagtcatccacctggtaccttcatccagacttataacttcaatttccaaactatacaccaatttgtaaaacaccccagtcatcttcctctcgctccacagcaatatatccacctgcctacttggcatctccacttgggcacctcaaattcaccatgcctgtaacctgaactcacggtcaccttcctgtatcccatcccctcccagaattccccattgaagctcaggaccccaccattcatccagctttacaagccagaaacctaatagcccattcaaggctaccatatttccttgtatctacctgtattttctcataaacatctctttaattcatttccttctctcccacttaccttcattctaatccaagcttccatccgcctcttgcctgacaactgcaattgcctcctggctgctttttttttctttttttttgagacagggtctcactctgtcacctaggctggtgtgcagtggtgcgatcatagctcgctgcagcattgacctcctgttgctcaagcaatcctcccacctcagcctcctgagtagttgggactacaggtgtgtgccatcacgctcagctaatttttaattttttttgcaaagacaggatctttctatgttgctcgggctggccttgaactcttggactcaagcaatcctcccaccctagcctcccaatgtgctgggattacaggcgtgagccactgtgtccagccctgacccttccctctgcttccactcttgccctctacagtctcacaaacgcaatcaggatgtccctatcctcaaaatgcttcagtgtctcccttccaaattctcttagaacactgacaaacagccctaccatcatgtatcccctgctcccacttcaccacccataacatttccctccctccctccattccagctccactgaccttcaagtccctcatactctctgtgcccatccccaaccccagatctttgtatactctgttccatccgtgtggaacactgttcccttctctcttggccttctcatccttcaggtctcagcccgccatttttttcacagggaagttttcctgaccaggtcaggtcctcctatcatgtgatatcacagcatcatgccattctcatgtgtagcgtttataacaatttgcaatcatatataaacaaatatttttttgaagtccaaagtaataataaatatactgtgagattattttattactttcttgcccactagactataaagtccatgagggcaggcatggcacctatttttttttcttggctgctgtatccctgcatctggcacataactggtgctcaataaatatttaccgactatatgaatgaatgaaaagttcaatgtaaacgcaggactagcattaaggctggaaccaagggcaggaccaaggtcagggctaggaccacggacagtgtctgggactggaagttggttagacacagccaccagggctgaggcagaatcagaggccaggccagggaagatcctggcaggaccagatggtacaagcactttggaaaactgtttgacagaatctactaaatgtactaaaggtgaacacatgcaaaccctatgaccccgcaattccactcctaggaatatacccaacatagctcataatagccccaaactgggaactactcaaacatttcacatcagtagaataaataaattgtggtttattcacaccgtggaataaaataaagcaggaatgaactatagttatatgcagtagtgtgatggatcttactaagatgatgttgaacaaaagccagacacaggaaagagcatgctgcacagttctatttatgtgaagtttgaggagaggcaacattaatctgtagtgctccaagtcagaagtgtgatactcttgagggggtagtgactagtaggggcatgggggggggggcttctggggtgctaaaggtgtcttgtttcttgatctggatgacggttacccagttgtatgtgtttgtggagtttactgaggcagggattggggagcacacagagacaagaggtgggaggaaaggtggtaggggggtcccaggataagacaggagacagggctatggcaaacctgagtgtgagggggccagtcaggattcagctagggtgaagagttgaggagagatgttgaaaggtgcccagctcttccagaccagaggctggggaaaggaggagggcagggtgggtgtggaaatgctgaccggtgaggagtgggggatgtgtcactggtaggcggaggtgactgtgacacacacacacctccacccaacacgcacacatcttctggctttctactcttaaacttttctcctggatcagagaaaaaggagtaattggggctaccagccatcacattctgctaccagccagcaagagacggaaagggagctgaacagggacagagtgtttccacaccaagaggctccccacccaagaaagcccaggccgagaggcctggcatacagagagctgccctttcctgtctccccagcccttctctcagcctggagtgtagccttgggtaagagatgggctctgaccgaccctcaaatcctgtcactttgtgtctaaggccatgctaatcactcccacaccctgggaatgcttgcacaaagatgtgtacacatgtacacttacaaatatattaatgtgtgctcatccacaagtacaaacatacctgcacagacacacaaatccacccccaaaacctgcatccttgtaggtacacatatgggtgcccatgcacacacgtgcacacacacccaatctccccttcaggtttcctccacacctagtcattgggtgatgcctaagaaggctgatttcttgttggctccgagggcagctctgtgagtgaaagaacctggatggtgtgagaggaacaaagcaggaggcccttcccagtgggaagcagcggacacatggcctccaccatacttccccgtacccctggaggcctctgtgagttgtccagtgcccctccccaaataagtggattcctcatctttccctgcacagtgggggaaagcagagagggtctttgcaccaggaaggagtgaagagagctcaccagcttttctggaaagctggtgagattggtctagaagagcagagcagcctccattgaccacacacccagaggctccttcccaatctccctccctgccctgttgccaccacccagccctccagctccccattccagctcctgggataattctgctcttctctcggtactgggcaagcaaagaattgggtgtctcttgtgtctccccttcaccattccccctgccactatgtctggggtggttctctgtagtgtgtgtttggagagagatatggcctcaccctcttggcaccctccccacagttggagggctggcagggatgggggcatcttcccaaactgtgactcagcttcctgggtattttgtgttgtagccaactttgacactttgctcattagggactgtataggtcccaaggggtggggagaggggctggcttccataaaagatgttccacagatgggggttctggtcctgcccccatgcctccctctgaccctcctgctacaccctcagttgaatctggcaatgagaggtgaaggtagaaggattctaggagtgagactaaaaagggaatgtgggggtctcagatattgggctggaaccaggtaggaaggaggtgtcagggaggggtaggttggggaatccagataccccttattctggggagctaatcggcctgggaatggaaaaattaagagaaaggatttccaggccccagctgaaaatggttaggggtgcaatgagagacaggaaggcagtttctggtcctgcacctagtggctaggtctggagtgagcaaaggaagtttgaggaattgaggtgctgggtccccagggacttgaaggcagggtcagggaaaagaggaggggctggagatgcgggaagcaggggcagggcaggcagcagctgtggtgtttccgagttgcttcccagtagttcctctcagttccacttccagttgtttctatgccattaaattctttccaggcgagataaggggcccgcccttcccacccggggcgtgtcacgtgtactggtggtggggggcgggggcggcgaggtgagggagagtgcgggttcagacagacagaggcaaggggagcctggaaggggcacagagtgaagacggagcccctgtgcccccagaggcatctctcagccatcccagccctgctgaaccgtgagtcatgagtgcagagctctggccaagaacaagttttaggatcctctctgcaggctctgtgcacgtcccagacccgagtcctgactgtcccatttcagtatttcctaaagagatctcccagacctccctccctgcaactctcacgctgccacctagggagtccccatttggatgcccaaagaagcaccctctggcacctcctggagcctggagcccccagagcctgggctcagctgctctagcccgacatttgggattccgcaagcactttccttccaaggttcagctggccaccagttcagcctagtcctatcttcccgctagccccagcacctccagggcccaggggctcacctcaccaataaccacctctaccctggttccaccatctgactcccggagtccctcggtttgttcccagcccctctcagttgtctgcatcccatccaaaccctgacacatactgcccaccccaacacacacataccaccctctcctcccagacactccttcacagggagcctggttcccagcgaatgctcctatgtcctctgtcctgaacagaagtccttgctctggaagcactgctgagagctcacctgccacaccttcacctggggcatggggataggcgagaaatcccttgcctctccttctgggtctccccagaactctgttccttacctgggcaaccgagcagctgcagtgcctctgcacctgctctgtccccaaccccgggagggcggcgtctcagggcaggacagggaagtctccctcacttgtcccctgcaacaggggctgagccacaaccgactgtggatctcggcagcgacagtgaggagggagtctgcagcgagcaggggaggagaaggggaggaccaggatgaggtcagggaggggagcggagatagggcaggtcctcccacccctcccaggccctcccacatgccacccctcctcttctcctgcccccaccccagcccccactccctgtctagcatcactgtctcaccataccctcatctcaacccccagccccggtcttacctcccacgtcctttccctatgccatttttagctcaccctaatttttgcccaacttgacaccccccacccttcctgccatttcttttttccccaccatttctccacctgctgcccctcctctctgaccccagtggtttcctctcagcctatatccttcctcatggccagcccccttcccctccctcccccatgctcctctcccatctcttcccagccactgctctagcttggatctctggatcgcaccccatgtctatcacccagtgctggctccctcatcctctcaccagttctcccctggcagtctggggcagggagcaggggcagagggcaggaggcaagaggcaacctctttctccaactgggaccgtctctgggaccccaagtccccaccctgctccagtcccaccatttctatcttctcggcttatcccgtccccgagccactcctgctgtctgttctgttcagtccctctcctgtcactgccccctttgcattctcctacctcagcaagtccctagagaaagagcaggtgaggcttgggcactggcagggcaagggcttgggtgaacactgggacatacaagccttggggaggaagctggggttggggcggacaaggaaggaaagcctgaaggttaggaggaaggtttagggttgaagaaagggctagagacaggaggcaaatataagggtgggtcacctgaatagagggtgaagtggtggaaagcagggtggggggctggtgcctgggtgctgcgggggagcaggaacagaggcggggagaggtaggggctggaggaaacggacacgctgtctctggtcccaggcagaagactgacagccagaggacaggggggacagggagacagacacaccccacataagtctgttgggtgtttccctagcttcatctccccatgtgctgccctgacaaggagctgaaaaagagactttgctacagaggagaaatatcccagctgagtgggaacccactacccccagcttcacagtgaggactgggtctctctatcctgctacagacctcaccactgaggtgtaacttggccaagtcacgggtgaaaggtacgtgagggagcccatatgtgcttgattctgccacatgggtgacggcccaggtgtctgcacaccaggtcagatccccatggtggcaggtgtgtggtgttcctgggtcagggcgtgcctgcactgcatgtggctgtggccagatgcccagtaagctccatgtggccgagggcaaaggcacacatgggcttttgcgtgggtgtccccgtgtgtgtccgtgtgtctgggtgtgtgtggctgtttttttcctggctttgatggggaggatgaagtcagcatcttggacagagccaggctcagcttccttcctctgccttggcctgaagcccccagagccagcagtaggtagcagcttcccaaggatctcctggcaggaggtggggagccctgcagtgataggaagagggagggtctggagacagtatcacacagagggcagaacacagggtatgaatttcctctgacaccttcagatttctgttccatggtcatatcctttagtgtgtgtgtgcacgcgcgtgtgcctatgccctatgtcctggctttattatttaggaagaatggtcaacataagtacatttggcacagagagtggccagggacctcagagaagacagcaagaaggatggtcctgggatgttctggaagcccactgttggggtctcagagagaaatgtgggattccagatgtacacaagcttataaggcatttggggaagccactggaagcttagcagatatagtttcaggttctgaaattatctttgtttaccatttgattcaccctttggtttccaggctcatggagaagctcatgtcttgtatgttcacatcttgtaagaaaagcaccaagccttgcacagtgtaggtgaccaataaatgcaagtcaacactgaaatgtgaaaggactgggagagaggagggggaaagggtaaggagcccaggcgtgaaggcagggaagcccagtggtcagagctggggttggcttcactgaggtgtctgggtggtggtgggtagaaaggtcagtgttgtccagaactgtccacaagctccggctgttctctgtaacctcagtccctgtgtcttcagctctgagcctccctccttgaatgatcctccaagttcctgtcctgacctcaggaggaaaagggatgaaagatagagaaaaggaaaggaaagatagggaggagagaaggcagacacataagagtaagggcaattgagggcaaggacctgaaggatgaagacaggggaacaagagatgccaggggctgcggtccaagaaagcagtcccagagaggggaaagatagaaaacacttgtgccgggcttccgtttacaaaacagtttcctacacagtgcgggcattaatcccactttgtggctgaggaaacggaggctcatagacattaagggtcttgttcaaggggctaagtcagtagtggtgaaggtgggtctcacccaggtgttctcattcctaagcctgtattcgctcttctccccaaacaactccaggaaaggaaaggattgaagacttagggaacaaatgaagtggcttctttgaagcacttgtacaaagaagggtggagaatccagatttttgaaacttttctgcatccagttattgtgtagattcacttagaagaaatggcatcagatggggaagggggtggtcaacattccattattgagaactgggggtcgggtgaggatggggaacacagaatgtaaagacagagagcaggatgaaagatgggagagaactaagaggctacagctgaaaagggggcaagggagcctcagaaggaagggtttggacccttaaaacttcctttgcctagagacatgggtgtggggagaagggaggaggaaggacatttctatctcgtgacaaaagaaagtcacacaattgttttgttctctgctctgaggcgggtgggcgcctgtatttaccagagggacccaggtcgctgtggcaaccacacatctgggccccggaatccagatgtgctgtatccagaagccatagcagaacgatgaggcaaacatcaggctccccagtgctggcccccacagctgggaagaggatggagaactggtgtgggaagtaaagggagtgggggaaggaaggaggaggagaggaccaaagtgggggaaaagagaggacataatggaaaggggcaagaaatgtggacgagggagcagaatgggaaatagaaagggggcggcatgagaaagggaggagacaagcacagggtcagcagcagcagcagatgagaagaccaagaaaaacaaaggaaaaagacagtgaatttaaaaatatatatatatttttaaataaggccagcacggtggctcatgcctgtaatcctagcactttgggaggccaacatgggaggactgcttgaggccaggagttcaagaccagcctgggtaacatagcgagaccccacttctatttttaaattaaaaaaaaaatttaagacagtgaagcagtggatggggtggggaagatacaaaagaagaaaaaaacagtgatgaataatggttcaaaaagaggttgtgataactgctaatgaggtagagagcaaagaaaggcaggaaagaagtctagaaagaggaagggagggatgatgaggtcagggatgagagagaacaaaaggtgggatcctgaggaagaaatgaaggagatggtggcacaaggaaagcagaacagaaagacaaagtgggcatagggcaggaggggccaatgaggtgcaggagtgacagcgacctggcatgctgagtggccttgggggtgtggccagaggaatggagatccacatgggcctagaaggcagcagcccagagcctgcccggctttcaccctgcatcaggtacccactcaccgtccttctcaatccttcctgccaccacaatccctcagccaagagaggtctgatgtctcatccacaccaaagtgccagctgtcccttgccaatcagcagaggagcaggatgtcccaccccagggtgacccctgagatgccagcacttcaagtactttcccgaactgggggcaggaaggaggaagacaatgggacaacgaaacagtaatgaacccaaatgggataaaagtggaagagagaaggacaacagagatggggacagaaaggggcaagggatgaggaaaaggtgtatctattatggaccaggcactgaggacgtcgtctttcatcctgtcatcaaccctgattaggaggtaggaacatcccatcttacagataagcaaactaaggctcagaatgtttaaggacatctactaacgaaaggcagggtagggaatccagcttaggtgatgtgcttccaaaatccttgttctcactgcaccccctccagagatacggtggataaggctcaaggactctgggatagaaagcatagctgagaagctgggctgccctctggagggaggaaaggtctagttcctgggatccctggttccaggttgccatagttacttggtctgttttcaccccaaacacagtaatgggtgagggcagtgggaggggtgtgggggttgcctggctggacacatgaggttcttcctccctccttcaggcctgggcttatggcccaggcagcccctgtccagtcatctgggcattgagcccaggcccagctcacaccctccagctgacccaggacactcctgcagggtcaggcctgaggcactgctgaacaggagcagctggagggggattcttccaggttggcctcagactcaatccctcactttgtcctgctccccttcctcctaattagaatgcacagcctagccaggcatggtggctcacacctgtaatcccagcactttgggaggccgaagtgggcagcctggccaatatggtgaaaccctatctctattaaaaatacaaaaattagccgggtgtggtggcgtgcacctgtagtcccagctacttgagaggctgaggcagaagaatcacttgaacccaagaggcggaggttgcagtgagccaagatcgcgccactgcactccagcctgggtgagagagcaagactccgtctcaaaaaaaaaaaaaaaattaaaaacataagaatgtacagctttttctgcctgccccactcttgtctttgtctttcatctggactctcaagtctcagtcccctccagtttagggcttagaggatatcctgccacatcccccttcccttccaaatatcaccccttcttcaccgagacccccacttcctgggctctgagcctctggccccagctcttgttgtttgtttgagctgctcatcctggacagcaagaagagggggagaacctgctcgagagcaggagacccagaggctgctcaccctgaagggcgtggggccccatctttcctgttgactcacattccagggatgcgtatcctctagtctgtcacgccatgagacatcgttgctagacacagatataccccagagttgcaggggtgggggcaaggggatgacatgcggtctgtgatcccgcacccaccccacctcagagccagctatgtcttcagtgcttgattctttgatgctggctctggaaaagccactttcccccaaactccccatcacgagccaggaaggcagccaccattccttcaactccctccaagttgtttatttaataataataaaaaagaaatgcacacacataaacctgaactcccccccaccccaccctcccttactcccagtaactagctccaaaatgaaaaaacttcccttgtcccacctggggactaaattcccacctccactgccataacactagagaaacaaaataaaaaatatgcagcagctcaccacccaccccacaactgaacctcacacaatcccctcaaacaaagaagccaggactgggggttcacaggaatgagaggagccctatattctgaaaagggatgagaagagaggtgaacacccccacctcaaataagtgcttaacccccacacctgctctttcctttaccaattgccccaagcctggggatcagggaaatttgaaacagtcccacctggccacctggtaccccctccccccgttctaagtcagtgtgaatggcagaggtcagggatgattgaggtagaggggctggtgggaggcctggtgggcctggctggctgcagagactggcaaggggccacctgtggcattgcctggggttggggatggctgttttcggagcgaggggggcactgtggaggtcttgatgtgaatcaccctggtgtccatgacctcacactcgatctgcatcatctcctcatagtcccccggggccccacggcctgacagggtctctgtgagaaggggagagttaaggaagaggagatggggaggcaaacagggattgcagggaggaggggaggaggtcagaaaagtagaggtgagcagagagaaaaagaaagggcaatagtgaggaggcagatccatagcgggagttaaacaggatggcagggacagagtttggtgcaggggcaaggagagggtaggaaaagaaaagggcattgagtgtggggtcacacaggagaggacatcaagagaaaaaagtaagtgagagtctagcaggttcccggccccccgcctctgcccagtcatctacccaagcaccttcaccagggaaggaccctcacccttgtctccctcccaagtctcctgcatggtgctcttccctccacctacttcctgctgcttctcacctgtgggtccagcagctctctggatgccctgctcctctcccccttccccctcagctcccaggctggatctccctgttggaactgcccccatacccagcagggaaagagttaccattgggggccatggcaggcatcaccagggacatcttgggccgggaggtcttgttgtggctgatggctgggagcagcaggtggtcctggggaacagatgggccaggccagaagggtggaggcaaagatgccaacaagctccccagccctactctacatccccccactgaagacagactgctgggaacctggggtgacagagatggaagggcaggagaaactcacccttcggaaagagacaacataaaatgtgtcttcccgtcggtcaattgcatccaagaatgctggctgcgaacggtctgggtggcgatatagttgcagctggcccacagaatccctaggcaggtggggaaacaggatttgaggggaactaagcccaatgctcagtttctaccagggaagcgggtaggatgagagaaaaagacaggagacccccagtggaggagggaggtataatcccactggtgacagtaatgacaggcacaggacagctactgggggtacagctcttgaaagtggaatttcacttaataagtaagcaccccaccccacactcacctttctgggggtccagggggttggatggggactgccttaactggaggtgacttcttccgtggctgagacttctggaaggagaagtatctaaggacttggagagggtgaagggaaaagggaaagagacaaacagcccctggaagctgatgccacctcccactcaaccctccacttccttcaaacgatccctcaaacttccacagcgagatgcccactagaaatccccagacaaggcctttagcccttgtcttcaagtggccttccttgaaccagccacccgccctacctgtctctcctgggccctctgagggatcttcctccggcctctctggtggcgctggacccagccactcaactcgtcagcaagcctggggaaatggaggagctcaggacctccatgccaggccaagattcccaccctccttgcccacccacaggagtgaggagagggcagggagcactggcgctttagtacacaggccagccaggctgactgcagaaggccttgggaggccgggggagctggatgccccagcaatgaatcccacacctcagggactcagtgcggttgaagtgccggcaatcagaggagaggaagagctggtctaggtctcttagtagtagctccttggcgcccccagggaaggctgtcaggttgctggagtgaagcaggaaggagacaacacttggagactgcccagcactcccacaacaaagaaggcgatgacggcaagagaaagctttgggtccccctcactgaaagcggggagaagaccaactcataccctcaaacgagagggggccctctctctctctcctcacctgaaactgggctggtctgtggggctgggctggggctccttagggccctgggaggacccctggagaggttcaactccctgaactggctcttgctctgagaaccccagcaagtgtctccggggttgaggctcccccttgttcatccgaggagagatgggagctgaaggaggctcactgatgctgtggataaagaaggactgagcacaatgaagaatttcagctgtatcaagtatctaggtaagaataaagactctgcagatggactgcttgagttgcaatctgttatacaagcctgagtctgcctctgtaagatgggaataaggatggtccctacatacaaaaaagacagtgcatcacctagagcctagaactcagtaagcacttaatagtcactatttctaccagcattatcaccatcatctactctccactggaaaaataatggagcaggaggccgggcgaggtggctcaagcctgtaatcctagcactttgggaggctgaggtgggcagactgcctgagctcaggagttcgagaccagcctgggcaacaacagtgaaaccctgtctctactaaaaaatacaaaaaattagccgggcatggtggcgtgcgcctgtagtcccagctacttgggaggttgaggcaggagaatcacttgaacccaggaagcagaggttgcagtgagccgagatcgtgccactgcactccagcctgggcaacagaacaaggctccatctccaagaaaaaaagacaaataatggagcaggaaggggctggccagacacatcatcggtgccaaggacaccagaaccatttgtatataagcagaaggaaatggcctgggccaaagcaggcagctaggaggctgtaacgtgggctccacctggaaggttctagtgaagcaaggaaggtctcacctgacaggtccaaagttgaaggcaatgaagagaaggaagaccatgatgcagaccaccttcctgtttccagaccctaacttgagctcgctgttctaaggtacaaagaaggagacaagaaaaaggggaatcattccaaggaggctgtattcctgttggtctcccagggacagactggtcttacttcagccagcagggcctccagccgccgccggagggcagcattctctcggcggagctgctggttgtcagccagtactgcttgcagccgagcctccagtccctgcagatactctttcttctttctccgggactggcaggctgactcccggttcttgatcattcgctgctgccgcttcagcagctttgcctaggcacccggaaggtcaaaaaagaatgacagatgagttggcagaaggagactatgctctcaaaccccaaggaatgatttacccaaagctcacatggccattcccctgccttcctgacccacctacatagccagagaggtttttcctctctactcaaacacgctagggaaggggcccttctttcaaacattccctgctactgctcctcagaggtgggaaaggttagagtgtgggaagaactttctccatgctggtggaaactctttccttcgtaactctttcttcctgtcagcccacatttgtagggttcaaagtttaaccttgttatactgcttatacagtttacctgattttcccctaggaggcagcctccctccccaactatggccatgaccgtagtcgtatagtacagtacgacttccttgcctttaatttatggagaccaaccccatttctccatctgcagtgacagcaaacctaaaggaccctaaaactacctggagttgatattcatatagaaacaggagtccattctgaccctcagaatgatctaatgggtccgtttcctcacttttttctcctaggtatcgactccctcctcatcccacagttctctctatggcaagacttccctcttcccttcccatcactcgccctacttctctcctccccaacacttacatccacttcaggcgggcaggagtttccaggcataggagcgggaacgatgctcttcctctcaggccgtggtagagagggagccggcccttcaggctggactcgaatagcaccctggatgaggacaactggggacactggggcaagtgagcagaggtcagagggctgtgcgctgggtggggtccttgtgtccacacccacacaagagcacccaaggattgggcagcctcaatggctgcaagctctctgacagggtcaatgcagcccgcctccttttctcctttttttcttttttgagatgcagtcttgctctgtcgaccaggctggagtgcagtggtgcgatctcggctcactgcaagctccgcctcccgggttcacgccattctcctgcctcagcctccccagcagctggaactacagacgcacgccaccacgcctggctaatttttttgtatttttagtagagacggggtttcactgtgttagtcaggatggtctcgatctcctgaccttgtgatccgcctgccttggcctgccaaagtgctgggattacaggcgtgagccactgtgcctggccttttttttttaattaattaattaatttttatttttattttttggtttttcttttttcttttttttttttttgagacaaagtctcgctttgtcgcccaggctggagtgcagtggcatgatctcggctcactgcaacctccgcctcctgggttcaagtgattctcctgcctcagcctcccgaggagctgggattacaggcgcctgccaccactccacgctaatttttgtatttttagtagagacaaggtttcaccacgttggccaggctggtcttaaacttctgacctcaggtgattcgcccgcctcagcctcccaaagtgctgggattaccggcgtgagccaccatgcccggcccttttctccttcttcagtacctgggggtggctggacgagggactgcagaaggactgtggtgctgggaggcacagctctggatggcattgggacagtggttagcactacaggtttgggctgcagtggcggcttccgggtgggcagggctttgcctgaaggaaggtgagagaaaagaacaagaaatgtcaggaccaaaggcctctcactagggattccaagtgtcaggagactccattacctgaggagccatcaagggatgggcccatgctgatctggacagctccaagtgagggggctgggacatcccacaggaggcatcctgaaggggacagggactctgtcttcacttccaggacctcctctcctataaaagcctatgtggggcattccagagatacattagtcaggaagagtgtcgaggagaaggagctgaagaagggaaagctctcatacctctaggtcaggaggaactcactggaaaacctggaggaaggaaggaaggtggtgctcacctggctggaggagtcggctgagagcagggaggcctcagagttgacggaagaacatggagagacaggttctatcttggtctggacatctgtgggaggcaggatgaggcaaaagctggatatcatgtaaacactgaagggttaagagggttaagatgggaggctgggcatggtggctcacgcctgtaatctcagcactttgggaggccaaggcgggcagatcacctgaggtcaggagttcaagaccagcctgaccaacatggagaaaccccgtctctactaaaaatacaaaattagtcgggcatggtggcgcatccctgtgtcccagatactcaggaggctgaggcaggagaatcgcttgaacctgggaggcaaaggttgcagtgagccaagatcgcgccattgcactccagcctgggcaagaagagcaaaactccatctcaaaaaaataaaaaagagggttaagatggggaaatgggtcctttctctttgaacctgaaaataaaactcttctggccctagattacaggccatccaggaggggcagtcacagagctgctcacctgctggctctccgccccgcttttcgcctagtgcttccctttctcctttagtggctcctctgatttttctcatccctgctccatgttcctcaaagctgtctttgcccttctgcgtttccctctttcttgttcacagaacttgtctattcacatagaataggcctgagcaggggaagtggcaggggggtctccagcattcacatggcccaaattcctatcttgctggatttccaccttatccctgcccaatgcatctccatgctgacaaccgccaagtgtgcatctccccctggctgctcacctgcaccagattctgacttccaagctgcctgctggtcccttccattctcatgcctcaccagtcacccaaatctaactggccataaatgaggcttcctgattgccccgtcacacaagttttcctcccaggcaccaaacagcaaagcctcagtcacctctgagcctccatggcctccaataaatctgcctttatgacttgttgatcactccatgaaagaaaatgctaggccccatgtcggtgaaataaaacccttctgagggccagattcagcccacaggtcaacagtccaccactacctctggtccataccgttcactttggtacttaattatatgatcactaagattgctttttaaaacttcaatttatatttttgaatagataatacagtcatgatacaaatccaaacgaacaaaggaaaattaagtcaaaaaaaaaatcttggcggggcacggtggctcacgcctgtaatcccagcactttgggaggccgaggcaggtggatcacgaggtcaggagatcgagaccatcctggctaacacggtgaaaccccgtctctactaaaaaaatagaaaaattagccaggcgtggtggcggacgcctgtagtcccagcaacttgggagactgagggaggagaatggcatgaacccagggggcggagcttgcagtgagccgagattgcgccactgcactccagcctgggtagagcgagactctgtctcaaaaaaaaaaaaaaaaaaaacttcccttcccggtcctccagtcactcagattccctacacagagataaccactatcagaactatttaaccatggctgggcatggtggctcacgcctgtaatcccagcactttgggaggccgacacccaacgcaggtggattgcttgaagccaggagtttgacaccagcctgaacaacatggcaaaaccctgtctctaccaaaaatacaaaaaaatagccggacatggtggcacgtgcctgtagtcctagctattaggggggctgaggcaggacaatagcttaaacccaggaaacggaggttgcagtgagtggagatcacgccaatgcactctagcctgggtgacagggcaaaactctgtctcaaaaaaaaaaaaaaaaaaaaaaaaaagggaactatttaaccatgatgtattataaccctcacaaaactctccaaaagcaagaactatgtctcatgtccattgagggtaaagtacaggccctcaaaaaatacctaagtatggaggagaatctgactctaataacactatgcaatgcaaagccaccaacaatccttacaatccttttgctgctaatagcagtgggcgatctcggctcactgcaagctccgcctcccgggttcaccccattctcctgcctcagcctcccgagtagctgagactacaggtgcctgccaccatgcctggctaattttttgtatttttagtagagatggcgcttcactgtgttagcccgaatggtcttgatctcctgacctcgtgatctgcccgccttggcctcccaaagtgctgggattacaggtgtgaaccactgtgcctggcctgctaatggtatttcaatccttattttgtgtatcttttttataacatgtattaatctgctagatataatctgtttgtccctccaaatccactttccatccctccctgctgtgctccctgagatccagggagaatctgaatggactgcatcagcgggctccctggttggagttcagccagtgagagatggtgccaggagatccagaaggtactttgaaatcaacaatcaacatgtcaactgggcatggtggcttacgcctgtaatcccagcactttgggagccaaagtgggtggatcacctgaggtcgggaattcaagaccagcctaacatgaaagaagccctgtctctactaaaaatacaaaattagccaggcgtggtggagcatgcctgtaatcccagctactcaggaggctgaggcaggagaatcgcttgaacccaggaggcagagattacagtgagccaagatcacaccactattgcactccagcctgggcaacaagagtgaagctccataacaacaacaacaacagaatcaacatgtccaacgctgaattcatcatcttccctgaccagaaagcccctgcttttgcagtctccatccagtgaacagtaacatcacccacccacagccatcctagccacaaacctctttgactcctacctctctccaatgtccaggaggtcacaactcatctattccacttcattctttctcaagtctgctttcttcatgacatccgaatatcttacttgatcaactgcataagcttcttccttggttctcttgcctctggccctgcccctctgcaacccattctctactttgccactagaatcatcttcctaatcatattacttccctgcttaattctccaaaggcccccacctatccacaggataaaagctaagagccccttagcaggggccccacctggccctgtagcccctgcagttccacatcactccccaaatccttcttacatccactctgaagaaatgcagggtcctcagacacaagtcaacccccacactgtcctcctggctaatttctacgtgtcctttaaaactctcaggaaacccttcttccaggggcacatcccagattcagcgccaatgtggatgaaatgtcccctcttatgagctttcatggtaccctctagtgattttttttttttttccagacggagtcttgctcttttgcccaggatggagtgcagtggcgtgatctcggctcactgcaagctccgcctcccgggttcatgccattctcctgcctcagcctcccaagtagctgggactacaggctaattttttgtatttttagtagacacggggtttcaccatcttagccaggatggtctcaatctcctgacctcgtgatccgcccacctcggcctcccaaagtgctgggattacaagcatgagccaccacacccagccccacctctagtgatttctatcctagaatgaccacacctgtattgactggtacttgtctttctcccattaccaaatcacagggtttgaaagtcagcatggtggtcaggtcttgttcatctttgcattcccagcatgctgctcagtatctggcatggagtaggtgcttaataaatatttcttttttataattattatacctcagatatgatcacatcaataaacatttactaaatacacagctacgagtaaataaacttgggaacactttaaaaatagaacaaataatgttaattgtagaatctagtttagtatatggtgttctagcctttctgtatgtttaaaaatgtttatgggctgggcgcgatggctcacgcctgtaatctcagcactttgggaggcggaggtaggcgactcatgaggtcaggagttcaagaccagcctggccaacatggtgaaaccccatctctactaaaaatacaaaaaattagctgggcgtggtggtgggtgcctgtaatcccagctacttgggaggctgagacaggagaatcacttgaacctgggaggtggaggttgcagtgagctgagaccacaccactgcacttcagcccgagcgacagtgtgagactctgtctcaacaacaacaaaaatgtttataataaaatgttgggtggaggggaatcacacagatacatatgccctaaactgctcacaagtttttaaaaagtaagttgaatggcatgacagaatactaggaacaagaaaaagagagaaaaataatatccatctcctcagcactgcccttgctgtggttccctgaaatgtttcctctccttcctgccttccctcctggttttctgccatttcccctccccacctttttctccctgtcctgctgcctgcacttcccctccatctacacacatacacacacacacataacacattctcccgtagtagagccaaggattgggggcaggctgttttattacctgaggaatcatcagaggtggggataacgttgatctggacggtttcaaatgaggatgttgggtcatctcccaggagacacagtgggggtgccaaggactctgtcttcacatggagcacctcccctaccccaagagcctgggtgagagttggtgtggggcagggggcagaaagaagggcaaaaaacaagggagatgttgacagtaagagcgagaacaaaagctttagaagtttagggcttacaagccatcaattatttgacattctggtctgaatggtactgaccatctttctaacctgttcattctttctactttatttctgggagaattgatgaagtctcatgacttcaaatatggcctcagagtggacaacttgggcaagaacagttccagaattctcagcagtcaataactctcttcttcccagccccacataactctttatattaaaaagacccaagatcaggcgtggtggcttatacctgtaatccaagcactttgggatgccaaggtgggaggatcacttgagcccaggagtttaagtccactctgggcaacataggaagaccccatttttacaaacaataaaaaaaattagccagacatggtggcatgtgtctgtggtcccaactactcaggaggctgaggcaggaggatcacctgagctcaggaggtcaaggctacagtgagctgtgaccctgtcactacactgtagtttgggtgacagagggaggccctatctcaaaaaaaagcaaaaaacaaaaaacaaacaaacaaaaaaatcttcactgctagataaccaaaggggatgtggaaaatgaagatattaaggaaacggcaaaggtagtggagaaggccccccacacctcacacacctcatgactcatagcacacaaatcatttaaatcatttctttgtcacccacgggtgaagggaatgaagcagagtccccgtcacagagagtaagagggatatggctctctcacctcgctggatggctctgtggagagacgcgatgactcggagctgagggaggaggaagagcagggggaagatggctcagacttcacctgaagatctggaggaaagggagttagaaattatcaggaagcagagcttaagaagagtccaaaaagtacccaaggacatgtcggtggggattcctgtaccgcagcaagggagaagaaacaaaaataggggattgaaggagagaggataggcacttatgtagaagcgtgaggatataggaagctacgtagtttctgggaaacagtgggaagatgagggtttctggaaatctgagggaacgacaaagactaccttacctgggaagatcggcaggagttcccatgggggctcagaggggctgacatccatccccacgtccagggagctgccgtcaaactaaataagggaggatacaagagggcaggagtgtgagaaaggatgagaaagtaggggtgactccagatgagttatggcctgtgaatgggtccaggttctgggctcactttccacccaccaagggttagagaaaggctggggacacaataccgggacatcctgctccgggcaacggaagagctgcgtctgctcctcggccacttcatctaggccagaatacaaggtgctgtctgcaagaaatgctgagcgtcggggggtcgttcggtggccccagcctacagatcgcacacaagcccccgccccatccctcattggctccgctcggccagacccaccgcccgcccacttgaaaagtgatacaaccagggcgcttcagcccctccttccccgaccccggaacaactcgacgttccagcagggagcagagttcttccctgacttttgtatcccccttaatgcacaacgagccccctgctccgctctccttcagatggcggattccgtatttgcccagacttcctctttaggcccccgcttctttcccgcgtgcctcagggacagtttgccacagccctctcccctccccggtgcctcactctgcagaccccagtcctccgggctaagcaggttgtcggtgaagaaacgcgtcgggtcagcaatctcgctgagcagcatcagctccgccatctttcccccccaccccccaaccaggagacggttcccaaggcccgcctctccccatcaccaactaatcagttgactctttcaaaaaagggggcgtcccggaagctctaccgaccagtaagagacctgggtgctgagcacgtgaatcaacagatgcggatgactgtgtaggcgggcccaatgggagcacagcagcaggaagtaacttccagacagtgccataccgccaagcgcatgcgccaaacaggctccagtgataaagcgcctgggagatgtagtacccagtattaaggtccaccatctcccccagccactactaagtttagtttagacagcttctatgtgtcctcggagatagataagcccctcaaaaggggcgcactgtgaccactgctacctcccctaggaagccaaaagctgagaatgggatatgggctgaaaccttccctctggccccccacccccaaatctcacagcacagaccacaattcacaagttcctgtctcttttaaggtttaacttttaatcagccaaac

SEQ ID NO: 29051 - DNA, 1566 bp, Homo Sapiens
ggcccgttaagaagagcgtggccggccgcggccaccgctggccccagggaaagccgagcggccaccgagccggcagagacccaccgagcggcggcggagggagcagcgccggggcgcacgagggcaccatggcccagacgcccgccttcgacaagcccaaagtagaactgcatgtccacctagacggatccatcaagcctgaaaccatcttatactatggcaggaggagagggatcgccctcccagctaacacagcagaggggctgctgaacgtcattggcatggacaagccgctcacccttccagacttcctggccaagtttgactactacatgcctgctatcgcgggctgccgggaggctatcaaaaggatcgcctatgagtttgtagagatgaaggccaaagagggcgtggtgtatgtggaggtgcggtacagtccgcacctgctggccaactccaaagtggagccaatcccctggaaccaggctgaaggggacctcaccccagacgaggtggtggccctagtgggccagggcctgcaggagggggagcgagacttcggggtcaaggcccggtccatcctgtgctgcatgcgccaccagcccaactggtcccccaaggtggtggagctgtgtaagaagtaccagcagcagaccgtggtagccattgacctggctggagatgagaccatcccaggaagcagcctcttgcctggacatgtccaggcctaccaggaggctgtgaagagcggcattcaccgtactgtccacgccggggaggtgggctcggccgaagtagtaaaagaggctgtggacatactcaagacagagcggctgggacacggctaccacaccctggaagaccaggccctttataacaggctgcggcaggaaaacatgcacttcgagatctgcccctggtccagctacctcactggtgcctggaagccggacacggagcatgcagtcattcggctcaaaaatgaccaggctaactactcgctcaacacagatgacccgctcatcttcaagtccaccctggacactgattaccagatgaccaaacgggacatgggctttactgaagaggagtttaaaaggctgaacatcaatgcggccaaatctagtttcctcccagaagatgaaaagagggagcttctcgacctgctctataaagcctatgggatgccaccttcagcctctgcagggcagaacctctgaagacgccactcctccaagccttcaccctgtggagtcaccccaactctgtggggctgagcaacatttttacatttattccttccaagaagaccatgatctcaatagtcagttactgatgctcctgaaccctatgtgtccatttctgcacacacgtatacctcggcatggccgcgtcacttctctgattatgtgccctggccagggaccagcgcccttgcacatgggcatggttgaatctgaaaccctccttctgtggcaacttgtactgaaaatctggtgctcaataaagaagcccatggctggtggcatgcaaaaaaaaaaaaaaaaaaaaaaaaaaaaaaaaaaa

SEQ ID NO: 29052 - DNA, 2755 bp, Homo Sapiens
cctacccgcgcgcaggccaagttgctgaatcaatggagccctccccaacccgggcgttccccagcgaggcttccttcccatcctcctgaccaccggggcttttcgtgagctcgtctctgatctcgcgcaagagtgacacacaggtgttcaaagacgcttctggggagtgagggaagcggtttacgagtgacttggctggagcctcaggggcgggcactggcacggaacacaccctgaggccagccctggctgcccaggcggagctgcctcttctcccgcgggttggtggacccgctcagtacggagttggggaagctctttcacttcggaggattgctcaacaaccatgctgggcatctggaccctcctacctctggttcttacgtctgttgctagattatcgtccaaaagtgttaatgcccaagtgactgacatcaactccaagggattggaattgaggaagactgttactacagttgagactcagaacttggaaggcctgcatcatgatggccaattctgccataagccctgtcctccaggtgaaaggaaagctagggactgcacagtcaatggggatgaaccagactgcgtgccctgccaagaagggaaggagtacacagacaaagcccatttttcttccaaatgcagaagatgtagattgtgtgatgaaggacatggcttagaagtggaaataaactgcacccggacccagaataccaagtgcagatgtaaaccaaactttttttgtaactctactgtatgtgaacactgtgacccttgcaccaaatgtgaacatggaatcatcaaggaatgcacactcaccagcaacaccaagtgcaaagaggaaggatccagatctaacttggggtggctttgtcttcttcttttgccaattccactaattgtttgggtgaagagaaaggaagtacagaaaacatgcagaaagcacagaaaggaaaaccaaggttctcatgaatctccaaccttaaatcctgaaacagtggcaataaatttatctgatgttgacttgagtaaatatatcaccactattgctggagtcatgacactaagtcaagttaaaggctttgttcgaaagaatggtgtcaatgaagccaaaatagatgagatcaagaatgacaatgtccaagacacagcagaacagaaagttcaactgcttcgtaattggcatcaacttcatggaaagaaagaagcgtatgacacattgattaaagatctcaaaaaagccaatctttgtactcttgcagagaaaattcagactatcatcctcaaggacattactagtgactcagaaaattcaaacttcagaaatgaaatccaaagcttggtctagagtgaaaaacaacaaattcagttctgagtatatgcaattagtgtttgaaaagattcttaatagctggctgtaaatactgcttggttttttactgggtacattttatcatttattagcgctgaagagccaacatatttgtagatttttaatatctcatgattctgcctccaaggatgtttaaaatctagttgggaaaacaaacttcatcaagagtaaatgcagtggcatgctaagtacccaaataggagtgtatgcagaggatgaaagattaagattatgctctggcatctaacatatgattctgtagtatgaatgtaatcagtgtatgttagtacaaatgtctatccacaggctaaccccactctatgaatcaatagaagaagctatgaccttttgctgaaatatcagttactgaacaggcaggccactttgcctctaaattacctctgataattctagagattttaccatatttctaaactttgtttataactctgagaagatcatatttatgtaaagtatatgtatttgagtgcagaatttaaataaggctctacctcaaagacctttgcacagtttattggtgtcatattatacaatatttcaattgtgaattcacatagaaaacattaaattataatgtttgactattatatatgtgtatgcattttactggctcaaaactacctacttctttctcaggcatcaaaagcattttgagcaggagagtattactagagctttgccacctctccatttttgccttggtgctcatcttaatggcctaatgcacccccaaacatggaaatatcaccaaaaaatacttaatagtccaccaaaaggcaagactgcccttagaaattctagcctggtttggagatactaactgctctcagagaaagtagctttgtgacatgtcatgaacccatgtttgcaatcaaagatgataaaatagattcttatttttcccccacccccgaaaatgttcaataatgtcccatgtaaaacctgctacaaatggcagcttatacatagcaatggtaaaatcatcatctggatttaggaattgctcttgtcatacccccaagtttctaagatttaagattctccttactactatcctacgtttaaatatctttgaaagtttgtattaaatgtgaattttaagaaataatatttatatttctgtaaatgtaaactgtgaagatagttataaactgaagcagatacctggaaccacctaaagaacttccatttatggaggatttttttgccccttgtgtttggaattataaaatataggtaaaagtacgtaattaaataatgtttttggtaaaaaaaaaaaaaaaaaaaaaaaaaaaaaaaaaaaaaaaaaaaaaaaaaaaaaaaaaaaaaaaaaaa

SEQ ID NO: 29053 - DNA, 10987 bp, Homo Sapiens
ggtggcgcgagcttctgaaactaggcggcagaggcggagccgctgtggcactgctgcgcctctgctgcgcctcgggtgtcttttgcggcggtgggtcgccgccgggagaagcgtgaggggacagatttgtgaccggcgcggtttttgtcagcttactccggccaaaaaagaactgcacctctggagcggacttatttaccaagcattggaggaatatcgtaggtaaaaatgcctattggatccaaagagaggccaacattttttgaaatttttaagacacgctgcaacaaagcagatttaggaccaataagtcttaattggtttgaagaactttcttcagaagctccaccctataattctgaacctgcagaagaatctgaacataaaaacaacaattacgaaccaaacctatttaaaactccacaaaggaaaccatcttataatcagctggcttcaactccaataatattcaaagagcaagggctgactctgccgctgtaccaatctcctgtaaaagaattagataaattcaaattagacttaggaaggaatgttcccaatagtagacataaaagtcttcgcacagtgaaaactaaaatggatcaagcagatgatgtttcctgtccacttctaaattcttgtcttagtgaaagtcctgttgttctacaatgtacacatgtaacaccacaaagagataagtcagtggtatgtgggagtttgtttcatacaccaaagtttgtgaagggtcgtcagacaccaaaacatatttctgaaagtctaggagctgaggtggatcctgatatgtcttggtcaagttctttagctacaccacccacccttagttctactgtgctcatagtcagaaatgaagaagcatctgaaactgtatttcctcatgatactactgctaatgtgaaaagctatttttccaatcatgatgaaagtctgaagaaaaatgatagatttatcgcttctgtgacagacagtgaaaacacaaatcaaagagaagctgcaagtcatggatttggaaaaacatcagggaattcatttaaagtaaatagctgcaaagaccacattggaaagtcaatgccaaatgtcctagaagatgaagtatatgaaacagttgtagatacctctgaagaagatagtttttcattatgtttttctaaatgtagaacaaaaaatctacaaaaagtaagaactagcaagactaggaaaaaaattttccatgaagcaaacgctgatgaatgtgaaaaatctaaaaaccaagtgaaagaaaaatactcatttgtatctgaagtggaaccaaatgatactgatccattagattcaaatgtagcacatcagaagccctttgagagtggaagtgacaaaatctccaaggaagttgtaccgtctttggcctgtgaatggtctcaactaaccctttcaggtctaaatggagcccagatggagaaaatacccctattgcatatttcttcatgtgaccaaaatatttcagaaaaagacctattagacacagagaacaaaagaaagaaagattttcttacttcagagaattctttgccacgtatttctagcctaccaaaatcagagaagccattaaatgaggaaacagtggtaaataagagagatgaagagcagcatcttgaatctcatacagactgcattcttgcagtaaagcaggcaatatctggaacttctccagtggcttcttcatttcagggtatcaaaaagtctatattcagaataagagaatcacctaaagagactttcaatgcaagtttttcaggtcatatgactgatccaaactttaaaaaagaaactgaagcctctgaaagtggactggaaatacatactgtttgctcacagaaggaggactccttatgtccaaatttaattgataatggaagctggccagccaccaccacacagaattctgtagctttgaagaatgcaggtttaatatccactttgaaaaagaaaacaaataagtttatttatgctatacatgatgaaacattttataaaggaaaaaaaataccgaaagaccaaaaatcagaactaattaactgttcagcccagtttgaagcaaatgcttttgaagcaccacttacatttgcaaatgctgattcaggtttattgcattcttctgtgaaaagaagctgttcacagaatgattctgaagaaccaactttgtccttaactagctcttttgggacaattctgaggaaatgttctagaaatgaaacatgttctaataatacagtaatctctcaggatcttgattataaagaagcaaaatgtaataaggaaaaactacagttatttattaccccagaagctgattctctgtcatgcctgcaggaaggacagtgtgaaaatgatccaaaaagcaaaaaagtttcagatataaaagaagaggtcttggctgcagcatgtcacccagtacaacattcaaaagtggaatacagtgatactgactttcaatcccagaaaagtcttttatatgatcatgaaaatgccagcactcttattttaactcctacttccaaggatgttctgtcaaacctagtcatgatttctagaggcaaagaatcatacaaaatgtcagacaagctcaaaggtaacaattatgaatctgatgttgaattaaccaaaaatattcccatggaaaagaatcaagatgtatgtgctttaaatgaaaattataaaaacgttgagctgttgccacctgaaaaatacatgagagtagcatcaccttcaagaaaggtacaattcaaccaaaacacaaatctaagagtaatccaaaaaaatcaagaagaaactacttcaatttcaaaaataactgtcaatccagactctgaagaacttttctcagacaatgagaataattttgtcttccaagtagctaatgaaaggaataatcttgctttaggaaatactaaggaacttcatgaaacagacttgacttgtgtaaacgaacccattttcaagaactctaccatggttttatatggagacacaggtgataaacaagcaacccaagtgtcaattaaaaaagatttggtttatgttcttgcagaggagaacaaaaatagtgtaaagcagcatataaaaatgactctaggtcaagatttaaaatcggacatctccttgaatatagataaaataccagaaaaaaataatgattacatgaacaaatgggcaggactcttaggtccaatttcaaatcacagttttggaggtagcttcagaacagcttcaaataaggaaatcaagctctctgaacataacattaagaagagcaaaatgttcttcaaagatattgaagaacaatatcctactagtttagcttgtgttgaaattgtaaataccttggcattagataatcaaaagaaactgagcaagcctcagtcaattaatactgtatctgcacatttacagagtagtgtagttgtttctgattgtaaaaatagtcatataacccctcagatgttattttccaagcaggattttaattcaaaccataatttaacacctagccaaaaggcagaaattacagaactttctactatattagaagaatcaggaagtcagtttgaatttactcagtttagaaaaccaagctacatattgcagaagagtacatttgaagtgcctgaaaaccagatgactatcttaaagaccacttctgaggaatgcagagatgctgatcttcatgtcataatgaatgccccatcgattggtcaggtagacagcagcaagcaatttgaaggtacagttgaaattaaacggaagtttgctggcctgttgaaaaatgactgtaacaaaagtgcttctggttatttaacagatgaaaatgaagtggggtttaggggcttttattctgctcatggcacaaaactgaatgtttctactgaagctctgcaaaaagctgtgaaactgtttagtgatattgagaatattagtgaggaaacttctgcagaggtacatccaataagtttatcttcaagtaaatgtcatgattctgttgtttcaatgtttaagatagaaaatcataatgataaaactgtaagtgaaaaaaataataaatgccaactgatattacaaaataatattgaaatgactactggcacttttgttgaagaaattactgaaaattacaagagaaatactgaaaatgaagataacaaatatactgctgccagtagaaattctcataacttagaatttgatggcagtgattcaagtaaaaatgatactgtttgtattcataaagatgaaacggacttgctatttactgatcagcacaacatatgtcttaaattatctggccagtttatgaaggagggaaacactcagattaaagaagatttgtcagatttaacttttttggaagttgcgaaagctcaagaagcatgtcatggtaatacttcaaataaagaacagttaactgctactaaaacggagcaaaatataaaagattttgagacttctgatacattttttcagactgcaagtgggaaaaatattagtgtcgccaaagagtcatttaataaaattgtaaatttctttgatcagaaaccagaagaattgcataacttttccttaaattctgaattacattctgacataagaaagaacaaaatggacattctaagttatgaggaaacagacatagttaaacacaaaatactgaaagaaagtgtcccagttggtactggaaatcaactagtgaccttccagggacaacccgaacgtgatgaaaagatcaaagaacctactctgttgggttttcatacagctagcgggaaaaaagttaaaattgcaaaggaatctttggacaaagtgaaaaacctttttgatgaaaaagagcaaggtactagtgaaatcaccagttttagccatcaatgggcaaagaccctaaagtacagagaggcctgtaaagaccttgaattagcatgtgagaccattgagatcacagctgccccaaagtgtaaagaaatgcagaattctctcaataatgataaaaaccttgtttctattgagactgtggtgccacctaagctcttaagtgataatttatgtagacaaactgaaaatctcaaaacatcaaaaagtatctttttgaaagttaaagtacatgaaaatgtagaaaaagaaacagcaaaaagtcctgcaacttgttacacaaatcagtccccttattcagtcattgaaaattcagccttagctttttacacaagttgtagtagaaaaacttctgtgagtcagacttcattacttgaagcaaaaaaatggcttagagaaggaatatttgatggtcaaccagaaagaataaatactgcagattatgtaggaaattatttgtatgaaaataattcaaacagtactatagctgaaaatgacaaaaatcatctctccgaaaaacaagatacttatttaagtaacagtagcatgtctaacagctattcctaccattctgatgaggtatataatgattcaggatatctctcaaaaaataaacttgattctggtattgagccagtattgaagaatgttgaagatcaaaaaaacactagtttttccaaagtaatatccaatgtaaaagatgcaaatgcatacccacaaactgtaaatgaagatatttgcgttgaggaacttgtgactagctcttcaccctgcaaaaataaaaatgcagccattaaattgtccatatctaatagtaataattttgaggtagggccacctgcatttaggatagccagtggtaaaatcgtttgtgtttcacatgaaacaattaaaaaagtgaaagacatatttacagacagtttcagtaaagtaattaaggaaaacaacgagaataaatcaaaaatttgccaaacgaaaattatggcaggttgttacgaggcattggatgattcagaggatattcttcataactctctagataatgatgaatgtagcacgcattcacataaggtttttgctgacattcagagtgaagaaattttacaacataaccaaaatatgtctggattggagaaagtttctaaaatatcaccttgtgatgttagtttggaaacttcagatatatgtaaatgtagtatagggaagcttcataagtcagtctcatctgcaaatacttgtgggatttttagcacagcaagtggaaaatctgtccaggtatcagatgcttcattacaaaacgcaagacaagtgttttctgaaatagaagatagtaccaagcaagtcttttccaaagtattgtttaaaagtaacgaacattcagaccagctcacaagagaagaaaatactgctatacgtactccagaacatttaatatcccaaaaaggcttttcatataatgtggtaaattcatctgctttctctggatttagtacagcaagtggaaagcaagtttccattttagaaagttccttacacaaagttaagggagtgttagaggaatttgatttaatcagaactgagcatagtcttcactattcacctacgtctagacaaaatgtatcaaaaatacttcctcgtgttgataagagaaacccagagcactgtgtaaactcagaaatggaaaaaacctgcagtaaagaatttaaattatcaaataacttaaatgttgaaggtggttcttcagaaaataatcactctattaaagtttctccatatctctctcaatttcaacaagacaaacaacagttggtattaggaaccaaagtctcacttgttgagaacattcatgttttgggaaaagaacaggcttcacctaaaaacgtaaaaatggaaattggtaaaactgaaactttttctgatgttcctgtgaaaacaaatatagaagtttgttctacttactccaaagattcagaaaactactttgaaacagaagcagtagaaattgctaaagcttttatggaagatgatgaactgacagattctaaactgccaagtcatgccacacattctctttttacatgtcccgaaaatgaggaaatggttttgtcaaattcaagaattggaaaaagaagaggagagccccttatcttagtgggagaaccctcaatcaaaagaaacttattaaatgaatttgacaggataatagaaaatcaagaaaaatccttaaaggcttcaaaaagcactccagatggcacaataaaagatcgaagattgtttatgcatcatgtttctttagagccgattacctgtgtaccctttcgcacaactaaggaacgtcaagagatacagaatccaaattttaccgcacctggtcaagaatttctgtctaaatctcatttgtatgaacatctgactttggaaaaatcttcaagcaatttagcagtttcaggacatccattttatcaagtttctgctacaagaaatgaaaaaatgagacacttgattactacaggcagaccaaccaaagtctttgttccaccttttaaaactaaatcacattttcacagagttgaacagtgtgttaggaatattaacttggaggaaaacagacaaaagcaaaacattgatggacatggctctgatgatagtaaaaataagattaatgacaatgagattcatcagtttaacaaaaacaactccaatcaagcagcagctgtaactttcacaaagtgtgaagaagaacctttagatttaattacaagtcttcagaatgccagagatatacaggatatgcgaattaagaagaaacaaaggcaacgcgtctttccacagccaggcagtctgtatcttgcaaaaacatccactctgcctcgaatctctctgaaagcagcagtaggaggccaagttccctctgcgtgttctcataaacagctgtatacgtatggcgtttctaaacattgcataaaaattaacagcaaaaatgcagagtcttttcagtttcacactgaagattattttggtaaggaaagtttatggactggaaaaggaatacagttggctgatggtggatggctcataccctccaatgatggaaaggctggaaaagaagaattttatagggctctgtgtgacactccaggtgtggatccaaagcttatttctagaatttgggtttataatcactatagatggatcatatggaaactggcagctatggaatgtgcctttcctaaggaatttgctaatagatgcctaagcccagaaagggtgcttcttcaactaaaatacagatatgatacggaaattgatagaagcagaagatcggctataaaaaagataatggaaagggatgacacagctgcaaaaacacttgttctctgtgtttctgacataatttcattgagcgcaaatatatctgaaacttctagcaataaaactagtagtgcagatacccaaaaagtggccattattgaacttacagatgggtggtatgctgttaaggcccagttagatcctcccctcttagctgtcttaaagaatggcagactgacagttggtcagaagattattcttcatggagcagaactggtgggctctcctgatgcctgtacacctcttgaagccccagaatctcttatgttaaagatttctgctaacagtactcggcctgctcgctggtataccaaacttggattctttcctgaccctagaccttttcctctgcccttatcatcgcttttcagtgatggaggaaatgttggttgtgttgatgtaattattcaaagagcataccctatacagtggatggagaagacatcatctggattatacatatttcgcaatgaaagagaggaagaaaaggaagcagcaaaatatgtggaggcccaacaaaagagactagaagccttattcactaaaattcaggaggaatttgaagaacatgaagaaaacacaacaaaaccatatttaccatcacgtgcactaacaagacagcaagttcgtgctttgcaagatggtgcagagctttatgaagcagtgaagaatgcagcagacccagcttaccttgagggttatttcagtgaagagcagttaagagccttgaataatcacaggcaaatgttgaatgataagaaacaagctcagatccagttggaaattaggaaggccatggaatctgctgaacaaaaggaacaaggtttatcaagggatgtcacaaccgtgtggaagttgcgtattgtaagctattcaaaaaaagaaaaagattcagttatactgagtatttggcgtccatcatcagatttatattctctgttaacagaaggaaagagatacagaatttatcatcttgcaacttcaaaatctaaaagtaaatctgaaagagctaacatacagttagcagcgacaaaaaaaactcagtatcaacaactaccggtttcagatgaaattttatttcagatttaccagccacgggagccccttcacttcagcaaatttttagatccagactttcagccatcttgttctgaggtggacctaataggatttgtcgtttctgttgtgaaaaaaacaggacttgcccctttcgtctatttgtcagacgaatgttacaatttactggcaataaagttttggatagaccttaatgaggacattattaagcctcatatgttaattgctgcaagcaacctccagtggcgaccagaatccaaatcaggccttcttactttatttgctggagatttttctgtgttttctgctagtccaaaagagggccactttcaagagacattcaacaaaatgaaaaatactgttgagaatattgacatactttgcaatgaagcagaaaacaagcttatgcatatactgcatgcaaatgatcccaagtggtccaccccaactaaagactgtacttcagggccgtacactgctcaaatcattcctggtacaggaaacaagcttctgatgtcttctcctaattgtgagatatattatcaaagtcctttatcactttgtatggccaaaaggaagtctgtttccacacctgtctcagcccagatgacttcaaagtcttgtaaaggggagaaagagattgatgaccaaaagaactgcaaaaagagaagagccttggatttcttgagtagactgcctttacctccacctgttagtcccatttgtacatttgtttctccggctgcacagaaggcatttcagccaccaaggagttgtggcaccaaatacgaaacacccataaagaaaaaagaactgaattctcctcagatgactccatttaaaaaattcaatgaaatttctcttttggaaagtaattcaatagctgacgaagaacttgcattgataaatacccaagctcttttgtctggttcaacaggagaaaaacaatttatatctgtcagtgaatccactaggactgctcccaccagttcagaagattatctcagactgaaacgacgttgtactacatctctgatcaaagaacaggagagttcccaggccagtacggaagaatgtgagaaaaataagcaggacacaattacaactaaaaaatatatctaagcatttgcaaaggcgacaataaattattgacgcttaacctttccagtttataagactggaatataatttcaaaccacacattagtacttatgttgcacaatgagaaaagaaattagtttcaaatttacctcagcgtttgtgtatcgggcaaaaatcgttttgcccgattccgtattggtatacttttgcttcagttgcatatcttaaaactaaatgtaatttattaactaatcaagaaaaacatctttggctgagctcggtggctcatgcctgtaatcccaacactttgagaagctgaggtgggaggagtgcttgaggccaggagttcaagaccagcctgggcaacatagggagacccccatctttacgaagaaaaaaaaaaaggggaaaagaaaatcttttaaatctttggatttgatcactacaagtattattttacaatcaacaaaatggtcatccaaactcaaacttgagaaaatatcttgctttcaaattgacacta

SEQ ID NO: 29054 - DNA, 5067 bp, Homo Sapiens; identical to SEQ ID NO: 28805

SEQ ID NO: 29055 - DNA, 2011 bp, Homo Sapiens
cgacgtccagtgctccagccggtgtgaggacacgatatgctggggtttttgtccgcacgccaaacgggtttggaggaccctcttcgccttcggagagcagagtcaacacggagagttttgggactggaattaaataaagacagagatgttgaaagaatccacggcggtggaattaacacccttgacattgaacctgttgaagggagatacatgttatcaggtggttcagatggtgtgattgtactttatgaccttgagaactccagcagacaatcttattacacatgtaaagcagtgtgttccattggcagagatcatcctgatgttcacagatacagtgtggagactgtacagtggtatcctcatgacactggcatgttcacatcaagctcatttgataaaactctgaaagtatgggatacaaatacattacaaactgcagatgtatttaattttgaggaaacagtttatagtcatcatatgtctccagtctccaccaagcactgtttggtagcagttggtactagaggacccaaagtacaactttgtgacttgaagtctggatcctgttctcacattctacagggtcacagacaagaaatattagcagtttcctggtctccacgttatgactatatcttggcaacagcaagtgctgacagtagagtaaaattatgggatgtgagaagagcatcaggatgtttgattactcttgatcaacataatgggaaaaagtcacaagctgttgaatcagcaaacactgctcataatgggaaagttaatggcttatgttttacaagtgatggacttcacctcctcactgttggtacagataatcgaatgaggctctggaatagttccaatggagaaaacacacttgtgaactatggaaaagtttgtaataacagtaaaaaaggattgaaattcactgtctcctgtggctgcagttcagaatttgtttttgtaccatatggtagcaccattgctgtttatacagtttactcaggagaacagataactatgcttaagggacattataaaactgttgactgctgtgtatttcagtcaaatttccaggaactttatagtggtagcagagactgcaacattctggcttgggttccatccttatatgaaccagttcctgatgatgatgagactacaacaaaatcacaattaaatccggcctttgaagatgcctggagcagcagtgatgaagaaggatgaatatcatctttagtacctttttgtctctgctgaaactttttaaatgagactgtgtttttttcaactgtatggtctattcctgacagctaaattagccctaaatgcgggtaatatttttcctcatgttttaaaatgaggttaatatttgcataaaatcctaaaacagacttctgtatagtttatttagtcaaaatgtgttccttgatcccagatgttgtggcctgggaaagccctcattgctacagtacaagtaacacaagtcgttgtacctcagttgtgaccttcagcagattttatgaactataagatgcagtctcagaggatcagcaagtggaggccatcagtattgactttctcttacttgctgtactatcagcctgctcgtttccacctttaagaatgattttgccaagaatgattatatcaaaaatagtagttgaaatggtaacatcaaaattattttattctttcttcttcatgtattcacatttttcagtggtttcatttaattaaccatgctttatgttaaacattttggggctcaatgtctcctactatccaaaatgtgcatcacaggaggctcttaactttgtgaaaatcccatgtttgctttattttattttaatgtcagaaggcagtttgcgctaatgcttgaactctttttctgtgaaactcattaaggtatgaccaaatcctgcctcattaattcaagcagaaaatatcctggcagggaatctggcttaaacatgaaatgctgtaataaaatttctatgttattgtctca

SEQ ID NO: 29056 - DNA, 6914 bp, Homo Sapiens
tcattgcagctgggacagcccggagtgtggttagcagctcggcaagcgctgcccaggtcctggggtggtggcagccagcgggagcaggaaaggaagcatgttcccaggctgcccacgcctctgggtcctggtggtcttgggcaccagctgggtaggctgggggagccaagggacagaagcggcacagctaaggcagttctacgtggctgctcagggcatcagttggagctaccgacctgagcccacaaactcaagtttgaatctttctgtaacttcctttaagaaaattgtctacagagagtatgaaccatattttaagaaagaaaaaccacaatctaccatttcaggacttcttgggcctactttatatgctgaagtcggagacatcataaaagttcactttaaaaataaggcagataagcccttgagcatccatcctcaaggaattaggtacagtaaattatcagaaggtgcttcttaccttgaccacacattccctgcagagaagatggacgacgctgtggctccaggccgagaatacacctatgaatggagtatcagtgaggacagtggacccacccatgatgaccctccatgcctcacacacatctattactcccatgaaaatctgatcgaggatttcaactctgggctgattgggcccctgcttatctgtaaaaaagggaccctaactgagggtgggacacagaagacgtttgacaagcaaatcgtgctactatttgctgtgtttgatgaaagcaagagctggagccagtcatcatccctaatgtacacagtcaatggatatgtgaatgggacaatgccagatataacagtttgtgcccatgaccacatcagctggcatctgctgggaatgagctcggggccagaattattctccattcatttcaacggccaggtcctggagcagaaccatcataaggtctcagccatcacccttgtcagtgctacatccactaccgcaaatatgactgtgggcccagagggaaagtggatcatatcttctctcaccccaaaacatttgcaagctgggatgcaggcttacattgacattaaaaactgcccaaagaaaaccaggaatcttaagaaaataactcgtgagcagaggcggcacatgaagaggtgggaatacttcattgctgcagaggaagtcatttgggactatgcacctgtaataccagcgaatatggacaaaaaatacaggtctcagcatttggataatttctcaaaccaaattggaaaacattataagaaagttatgtacacacagtacgaagatgagtccttcaccaaacatacagtgaatcccaatatgaaagaagatgggattttgggtcctattatcagagcccaggtcagagacacactcaaaatcgtgttcaaaaatatggccagccgcccctatagcatttaccctcatggagtgaccttctcgccttatgaagatgaagtcaactcttctttcacctcaggcaggaacaacaccatgatcagagcagttcaaccaggggaaacctatacttataagtggaacatcttagagtttgatgaacccacagaaaatgatgcccagtgcttaacaagaccatactacagtgacgtggacatcatgagagacatcgcctctgggctaataggactacttctaatctgtaagagcagatccctggacaggcgaggaatacagagggcagcagacatcgaacagcaggctgtgtttgctgtgtttgatgagaacaaaagctggtaccttgaggacaacatcaacaagttttgtgaaaatcctgatgaggtgaaacgtgatgaccccaagttttatgaatcaaacatcatgagcactatcaatggctatgtgcctgagagcataactactcttggattctgctttgatgacactgtccagtggcacttctgtagtgtggggacccagaatgaaattttgaccatccacttcactgggcactcattcatctatggaaagaggcatgaggacaccttgaccctcttccccatgcgtggagaatctgtgacggtcacaatggataatgttggaacttggatgttaacttccatgaattctagtccaagaagcaaaaagctgaggctgaaattcagggatgttaaatgtatcccagatgatgatgaagactcatatgagatttttgaacctccagaatctacagtcatggctacacggaaaatgcatgatcgtttagaacctgaagatgaagagagtgatgctgactatgattaccagaacagactggctgcagcattaggaattaggtcattccgaaactcatcattgaaccaggaagaagaagagttcaatcttactgccctagctctggagaatggcactgaattcgtttcttcgaacacagatataattgttggttcaaattattcttccccaagtaatattagtaagttcactgtcaataaccttgcagaacctcagaaagccccttctcaccaacaagccaccacagctggttccccactgagacacctcattggcaagaactcagttctcaattcttccacagcagagcattccagcccatattctgaagaccctatagaggatcctctacagccagatgtcacagggatacgtctactttcacttggtgctggagaattcagaagtcaagaacatgctaagcgtaagggacccaaggtagaaagagatcaagcagcaaagcacaggttctcctggatgaaattactagcacataaagttgggagacacctaagccaagacactggttctccttccggaatgaggccctgggaggaccttcctagccaagacactggttctccttccagaatgaggccctgggaggaccctcctagtgatctgttactcttaaaacaaagtaactcatctaagattttggttgggagatggcatttggcttctgagaaaggtagctatgaaataatccaagatactgatgaagacacagctgttaacaattggctgatcagcccccagaatgcctcacgtgcttggggagaaagcacccctcttgccaacaagcctggaaagcagagtggccacccaaagtttcctagagttagacataaatctctacaagtaagacaggatggaggaaagagtagactgaagaaaagccagtttctcattaagacacgaaaaaagaaaaaagagaagcacacacaccatgctcctttatctccgaggacctttcaccctctaagaagtgaagcctacaacacattttcagaaagaagacttaagcattcgttggtgcttcataaatccaatgaaacatctcttcccacagacctcaatcagacattgccctctatggattttggctggatagcctcacttcctgaccataatcagaattcctcaaatgacactggtcaggcaagctgtcctccaggtctttatcagacagtgcccccagaggaacactatcaaacattccccattcaagaccctgatcaaatgcactctacttcagaccccagtcacagatcctcttctccagagctcagtgaaatgcttgagtatgaccgaagtcacaagtccttccccacagatataagtcaaatgtccccttcctcagaacatgaagtctggcagacagtcatctctccagacctcagccaggtgaccctctctccagaactcagccagacaaacctctctccagacctcagccacacgactctctctccagaactcattcagagaaacctttccccagccctcggtcagatgcccatttctccagacctcagccatacaaccctttctccagacctcagccatacaaccctttctttagacctcagccagacaaacctctctccagaactcagtcagacaaacctttctccagccctcggtcagatgcccctttctccagacctcagccatacaaccatttctctagacttcagccagacaaacctctctccagaactcagccatatgactctctctccagaactcagtcagacaaacctttccccagccctcggtcagatgcccatttctccagacctcagccatacaaccctttctctagacttcagccagacaaacctctctccagaactcagtcaaacaaacctttccccagccctcggtcagatgcccctttctccagaccccagccatacaaccctttctctagacctcagccagacaaacctctctccagaactcagtcagacaaacctttccccagacctcagtgagatgcccctctttgcagatctcagtcaaattccccttaccccagacctcgaccagatgacactttctccagaccttggtgagacagatctttccccaaactttggtcagatgtccctttccccagacctcagccaggtgactctctctccagacatcagtgacaccacccttctcccggatctcagccagatatcacctcctccagaccttgatcagatattctacccttctgaatctagtcagtcattgcttcttcaagaatttaatgagtcttttccttatccagaccttggtcagatgccatctccttcatctcctactctcaatgatacttttctatcaaaggaatttaatccactggttatagtgggcctcagtaaagatggtacagattacattgagatcattccaaaggaagaggtccagagcagtgaagatgactatgctgaaattgattatgtgccctatgatgacccctacaaaactgatgttaggacaaacatcaactcctccagagatcctgacaacattgcagcatggtacctccgcagcaacaatggaaacagaagaaattattacattgctgctgaagaaatatcctgggattattcagaatttgtacaaagggaaacagatattgaagactctgatgatattccagaagataccacatataagaaagtagtttttcgaaagtacctcgacagcacttttaccaaacgtgatcctcgaggggagtatgaagagcatctcggaattcttggtcctattatcagagctgaagtggatgatgttatccaagttcgttttaaaaatttagcatccagaccgtattctctacatgcccatggactttcctatgaaaaatcatcagagggaaagacttatgaagatgactctcctgaatggtttaaggaagataatgctgttcagccaaatagcagttatacctacgtatggcatgccactgagcgatcagggccagaaagtcctggctctgcctgtcgggcttgggcctactactcagctgtgaacccagaaaaagatattcactcaggcttgataggtcccctcctaatctgccaaaaaggaatactacataaggacagcaacatgcctgtggacatgagagaatttgtcttactatttatgacctttgatgaaaagaagagctggtactatgaaaagaagtcccgaagttcttggagactcacatcctcagaaatgaaaaaatcccatgagtttcacgccattaatgggatgatctacagcttgcctggcctgaaaatgtatgagcaagagtgggtgaggttacacctgctgaacataggcggctcccaagacattcacgtggttcactttcacggccagaccttgctggaaaatggcaataaacagcaccagttaggggtctggccccttctgcctggttcatttaaaactcttgaaatgaaggcatcaaaacctggctggtggctcctaaacacagaggttggagaaaaccagagagcagggatgcaaacgccatttcttatcatggacagagactgtaggatgccaatgggactaagcactggtatcatatctgattcacagatcaaggcttcagagtttctgggttactgggagcccagattagcaagattaaacaatggtggatcttataatgcttggagtgtagaaaaacttgcagcagaatttgcctctaaaccttggatccaggtggacatgcaaaaggaagtcataatcacagggatccagacccaaggtgccaaacactacctgaagtcctgctataccacagagttctatgtagcttacagttccaaccagatcaactggcagatcttcaaagggaacagcacaaggaatgtgatgtattttaatggcaattcagatgcctctacaataaaagagaatcagtttgacccacctattgtggctagatatattaggatctctccaactcgagcctataacagacctacccttcgattggaactgcaaggttgtgaggtaaatggatgttccacacccctgggtatggaaaatggaaagatagaaaacaagcaaatcacagcttcttcgtttaagaaatcttggtggggagattactgggaacccttccgtgcccgtctgaatgcccagggacgtgtgaatgcctggcaagccaaggcaaacaacaataagcagtggctagaaattgatctactcaagatcaagaagataacggcaattataacacagggctgcaagtctctgtcctctgaaatgtatgtaaagagctataccatccactacagtgagcagggagtggaatggaaaccatacaggctgaaatcctccatggtggacaagatttttgaaggaaatactaataccaaaggacatgtgaagaactttttcaaccccccaatcatttccaggtttatccgtgtcattcctaaaacatggaatcaaagtattgcacttcgcctggaactctttggctgtgatatttactagaattgaacattcaaaaacccctggaagagactctttaagacctcaaaccatttagaatgggcaatgtattttacgctgtgttaaatgttaacagttttccactatttctctttcttttctattagtgaataaaattttatac

SEQ ID NO: 29057 - DNA, 5503 bp, Homo Sapiens
agccgccgccggggctgtaggcgccaaggccatgtccgactcgtgggtcccgaactccgcctcgggccaggacccagggggccgccggagggcctgggccgagctgctggcgggaagggtcaagagggaaaaatataatcctgaaagggcacagaaattaaaggaatcagctgtgcgcctcctgcgaagccatcaggacctgaatgcccttttgcttgaggtagaaggtccactgtgtaaaaaattgtctctcagcaaagtgattgactgtgacagttctgaggcctatgctaatcattctagttcatttataggctctgctttgcaggatcaagcctcaaggctgggggttcccgtgggtattctctcagccgggatggttgcctctagcgtgggacagatctgcacggctccagcggagaccagtcaccctgtgctgctgactgtggagcagagaaagaagctgtcttccctgttagagtttgctcagtatttattggcacacagtatgttctcccgtctttccttctgtcaagaattatggaaaatacagagttctttgttgcttgaagcggtgtggcatcttcacgtacaaggcattgtgagcctgcaagagctgctggaaagccatcccgacatgcatgctgtgggatcgtggctcttcaggaatctgtgctgcctttgtgaacagatggaagcatcctgccagcatgctgacgtcgccagggccatgctttctgattttgttcaaatgtttgttttgaggggatttcagaaaaactcagatctgagaagaactgtggagcctgaaaaaatgccgcaggtcacggttgatgtactgcagagaatgctgatttttgcacttgacgctttggctgctggagtacaggaggagtcctccactcacaagatcgtgaggtgctggttcggagtgttcagtggacacacgcttggcagtgtaatttccacagatcctctgaagaggttcttcagtcataccctgactcagatactcactcacagccctgtgctgaaagcatctgatgctgttcagatgcagagagagtggagctttgcgcggacacaccctctgctcacctcactgtaccgcaggctctttgtgatgctgagtgcagaggagttggttggccatttgcaagaagttctggaaacgcaggaggttcactggcagagagtgctctcctttgtgtctgccctggttgtctgctttccagaagcgcagcagctgcttgaagactgggtggcgcgtttgatggcccaggcattcgagagctgccagctggacagcatggtcactgcgttcctggttgtgcgccaggcagcactggagggcccctctgcgttcctgtcatatgcagactggttcaaggcctcctttgggagcacacgaggctaccatggctgcagcaagaaggccctggtcttcctgtttacgttcttgtcagaactcgtgccttttgagtctccccggtacctgcaggtgcacattctccacccacccctggttcccagcaagtaccgctccctcctcacagactacatctcattggccaagacacggctggccgacctcaaggtttctatagaaaacatgggactctacgaggatttgtcatcagctggggacattactgagccccacagccaagctcttcaggatgttgaaaaggccatcatggtgtttgagcatacggggaacatcccagtcaccgtcatggaggccagcatattcaggaggccttactacgtgtcccacttcctccccgccctgctcacacctcgagtgctccccaaagtccctgactcccgtgtggcgtttatagagtctctgaagagagcagataaaatccccccatctctgtactccacctactgccaggcctgctctgctgctgaagagaagccagaagatgcagccctgggagtgagggcagaacccaactctgctgaggagcccctgggacagctcacagctgcactgggagagctgagagcctccatgacagaccccagccagcgtgatgttatatcggcacaggtggcagtgatttctgaaagactgagggctgtcctgggccacaatgaggatgacagcagcgttgagatatcaaagattcagctcagcatcaacacgccgagactggagccacgggaacacattgctgtggacctcctgctgacgtctttctgtcagaacctgatggctgcctccagtgtcgctcccccggagaggcagggtccctgggctgccctcttcgtgaggaccatgtgtggacgtgtgctccctgcagtgctcacccggctctgccagctgctccgtcaccagggcccgagcctgagtgccccacatgtgctggggttggctgccctggccgtgcacctgggtgagtccaggtctgcgctcccagaggtggatgtgggtcctcctgcacctggtgctggccttcctgtccctgcgctctttgacagcctcctgacctgtaggacgagggattccttgttcttctgcctgaaattttgtacagcagcaatttcttactctctctgcaagttttcttcccagtcacgagatactttgtgcagctgcttatctccaggccttattaaaaagtttcagttcctcatgttcagattgttctcagaggcccgacagcctctttctgaggaggacgtagccagcctttcctggagacccttgcaccttccttctgcagactggcagagagctgccctctctctctggacacacagaaccttccgagaggtgttgaaagaggaagatgttcacttaacttaccaagactggttacacctggagctggaaattcaacctgaagctgatgctctttcagatactgaacggcaggacttccaccagtgggcgatccatgagcactttctccctgagtcctcggcttcagggggctgtgacggagacctgcaggctgcgtgtaccattcttgtcaacgcactgatggatttccaccaaagctcaaggagttatgaccactcagaaaattctgatttggtctttggtggccgcacaggaaatgaggatattatttccagattgcaggagatggtagctgacctggagctgcagcaagacctcatagtgcctctcggccacaccccttcccaggagcacttcctctttgagattttccgcagacggctccaggctctgacaagcgggtggagcgtggctgccagccttcagagacagagggagctgctaatgtacaaacggatcctcctccgcctgccttcgtctgtcctctgcggcagcagcttccaggcagaacagcccatcactgccagatgcgagcagttcttccacttggtcaactctgagatgagaaacttctgctcccacggaggtgccctgacacaggacatcactgcccacttcttcaggggcctcctgaacgcctgtctgcggagcagagacccctccctgatggtcgacttcatactggccaagtgccagacgaaatgccccttaattttgacctctgctctggtgtggtggccgagcctggagcctgtgctgctctgccggtggaggagacactgccagagcccgctgccccgggaactgcagaagctacaagaaggccggcagtttgccagcgatttcctctcccctgaggctgcctccccagcacccaacccggactggctctcagctgctgcactgcactttgcgattcaacaagtcagggaagaaaacatcaggaagcagctaaagaagctggactgcgagagagaggagctattggttttccttttcttcttctccttgatgggcctgctgtcgtcacatctgacctcaaatagcaccacagacctgccaaaggctttccacgtttgtgcagcaatcctcgagtgtttagagaagaggaagatatcctggctggcactctttcagttgacagagagtgacctcaggctggggcggctcctcctccgtgtggccccggatcagcacaccaggctgctgcctttcgctttttacagtcttctctcctacttccatgaagacgcggccatcagggaagaggccttcctgcatgttgctgtggacatgtacttgaagctggtccagctcttcgtggctggggatacaagcacagtttcacctccagctggcaggagcctggagctcaagggtcagggcaaccccgtggaactgataacaaaagctcgtctttttctgctgcagttaatacctcggtgcccgaaaaagagcttctcacacgtggcagagctgctggctgatcgtggggactgcgacccagaggtgagcgccgccctccagagcagacagcaggctgcccctgacgctgacctgtcccaggagcctcatctcttctgacgggacctgccactgcacaccagcccagctcccgtgtaaataatttattacaagcataacatggagctcttgttgcactaaaaagtggattacaaatctcctcgactgctttagtggggaaaggaatcaattatttatgaactgtccggccccgagtcactcagcgtttgcgggaaaataaaccactggtcccagagcagaggaaggctacttgagccggacaccaagcccgcctccagcaccaagggcgggcagcaccctccgaccctcccatgcgggtgcacacgaagggtgaggctgacacagccactgcggagtccaggctgctagaggtgctcatcctcactgccgtcctcaggtgggttcgggcttcaccgcctggccctctgtggtcacagaggggctcggtggcccaggtggtggttccgcctccaggggcagggccttgtcctgggtctgtgtcagcgggtgcaccatggacatgtgtacattgaggttgtgggccttctcaaaccgccggccacactggtcacaggcaaagtccagctcagtctcagccttgtgtttggtcatgtggtacttgagggatgcccgctgcctgcactggaacccacagacctcacacctgggggacagaggcagataagaaggtgcgaggccacagccctgggagggggtcctgactcacacttactgcaaaggcttggctcccgaatgtcgcatttggtggacgagaaggtgcttccgctgcttgaaggtttgtccacattcgtcacagatatagttccgcacctctgagaggggagagtccagtgagtccaggcccctgatgctccaacctcccggggggacgacgatgacaatgtgaaaccatcacagctgggaagacatttctgcacatggttcaccatgcagtgggcccaagcaaggggcctatgagggcctcgtttattaagatctttaaactgctttatacactgtcacgtggcttcatcagctgtgtgcatttcaggatggtttttaaagaaacctcagaaagctatttccttaaaaaaaaaaaaaaaaaaaaaaaaaaaaaaaaaaaaaaaaaaaaaaaaaaaaaaa

SEQ ID NO: 29058 - DNA, 3127 bp, Homo Sapiens
gtttgcatagctccctggacttctgctttgcactgccctgcaggagtgggtggggaaaggaagtggctttgaggcacacagaggggcttgttgaggccaccggaggaagcttctgccaccaatatgggacctgtgcccagcctaccagaagagagcatctgaaaacatgtatcgacatggtaacccctctgcttgaagcctcacatggctccctattgccttggtgctgaacaccctatggctgaccgtggcccagcctctgcaacagctctgcctcctctccagtggtgaagacccagcctgctgagactcctcctgcagttcctcaacatgcctgcatttctgctgccgtcagggcctttgcgaaggttgttccttgtaactggaatgcccttccatccctttttttattcaaaaggctgcaattttaattgaagaaagttcccttccaaggttcatgagttgcctgacttgcccaccggtttcctgcaagatcccttggcctggcacttagtgctcaggaaatatttggtgatgggccaactgagtgagaaggtgggatctggtgggaaggaaaggcggaaggtagaaattctgctcacttcctcattcccacctcccaaggaacccctggtgtccctgtggaacccgctttgggaaccggtggttcaggtcagccttttcactttgtactcaaagccacatcgcattgaagccacaggtggggcaaggtcatgcatgactgagtctccaaatcccttcaccctgtttggttctgcaacggggattaggggagccccacgatttgttttcaaaggatgtccgggctccaggacaggatgccctgggtcacctgatgacaggtgtggtggttggaaagggccgggtttcagctccgggtacacttcctccttccttctgctgcgtggtgtggcctcttccacgtcctcagaatccagctgttactcgtccgcggcctctcagctctagggccctctgcacactggcccccccagtgtcacgggcatccagacgggatccagtgcatcctcttttagaagaaaggcctgtctccaggtccccgagtccctctagcatctcccagaaggtgtcaagacgcagcagtgtccaggagcggcagagactctgacccatggatcccctgggcccggccaagccacagtggtcgtggcgctgctgtctgaccacgctgctgtttcagctgctgatggctgtgtgtttcttctcctatctgcgtgtgtctcaagacgatcccactgtgtaccctaatgggtcccgcttcccagacagcacagggacccccgcccactccatccccctgatcctgctgtggacgtggccttttaacaaacccatagctctgccccgctgctcagagatggtgcctggcacggctgactgcaacatcactgccgaccgcaaggtgtatccacaggcagacgcggtcatcgtgcaccaccgagaggtcatgtacaaccccagtgcccagctcccacgctccccgaggcggcaggggcagcgatggatctggttcagcatggagtccccaagccactgctggcagctgaaagccatggacggatacttcaatctcaccatgtcctaccgcagcgactccgacatcttcacgccctacggctggctggagccgtggtccggccagcctgcccacccaccgctcaacctctcggccaagaccgagctggtggcctgggcagtgtccaactgggggccaaactccgccagggtgcgctactaccagagcctgcaggcccatctcaaggtggacgtgtacggacgctcccacaagcccctgccccagggaaccatgatggagacgctgtcccggtacaagttctatctggccttcgagaactccttgcaccccgactacatcaccgagaagctgtggaggaacgccctggaggcctgggccgtgcccgtggtgctgggccccagcagaagcaactacgagaggttcctgccacccgacgccttcatccacgtggacgacttccagagccccaaggacctggcccggtacctgcaggagctggacaaggaccacgcccgctacctgagctactttcgctggcgggagacgctgcggcctcgctccttcagctgggcactcgctttctgcaaggcctgctggaaactgcaggaggaatccaggtaccagacacgcggcatagcggcttggttcacctgagaggctggtgtggggcctgggctgccaggaacctcattttcctggggcctcacctgagtgggggcctcatctacctaaggactcgtttgcctgaagcttcacctgcctgaggactcacctgcctgggacggtcacctgttgcagcttcacctgcctggggattcacctacctgggtcctcactttcctggggcctcacctgctggagtcttcggtggccaggtatgtcccttacctgggatttcacatgctggcttccaggagcgtcccctgcggaagcctggcctgctggggatgtctcctggggactttgcctactggggacctcggctgttggggactttacctgctgggacctgctcccagagaccttccacactgaatctcacctgctaggagcctcacctgctggggacctcaccctggaggcactgggccctgggaactggcacccatgggcccacccatgagtgatggttctggctgatttgtttgtgatgttgttagccgcctgtgaggggtgcagagagataatcaccgcaccgtttccagatgtaatactgcaaagaaaaccaatgatgaggccgggtgcggtggctcacacctgtaatcccagcactttgggaggccgaggcaggcggatcacaaggtcaggagatcgagaccatcctggccaatatggtgaaacccgtctctattaaaaaatacaaaaattagtggggcgtggtctcaggctcctgcagtcccagctacttgggaggctgaggcaggagaatggtgtgaacctgtgaggtggagcttgcagtgagccaagatcgcgccattgcactccaacctggacgacagagcaagactccatctcaaaaaaataaaataaaggccatatgtttaatca

SEQ ID NO: 29059 - DNA, 4414 bp, Homo Sapiens
ccgcgctctctgatcagaggcgaagctcggaggtcctacaggtatggatctctggcagctgctgttgaccttggcactggcaggatcaagtgatgctttttctggaagtgaggccacagcagctatccttagcagagcaccctggagtctgcaaagtgttaatccaggcctaaagacaaattcttctaaggagcctaaattcaccaagtgccgttcacctgagcgagagactttttcatgccactggacagatgaggttcatcatggtacaaagaacctaggacccatacagctgttctataccagaaggaacactcaagaatggactcaagaatggaaagaatgccctgattatgtttctgctggggaaaacagctgttactttaattcatcgtttacctccatctggataccttattgtatcaagctaactagcaatggtggtacagtggatgaaaagtgtttctctgttgatgaaatagtgcaaccagatccacccattgccctcaactggactttactgaacgtcagtttaactgggattcatgcagatatccaagtgagatgggaagcaccacgcaatgcagatattcagaaaggatggatggttctggagtatgaacttcaatacaaagaagtaaatgaaactaaatggaaaatgatggaccctatattgacaacatcagttccagtgtactcattgaaagtggataaggaatatgaagtgcgtgtgagatccaaacaacgaaactctggaaattatggcgagttcagtgaggtgctctatgtaacacttcctcagatgagccaatttacatgtgaagaagatttctactttccatggctcttaattattatctttggaatatttgggctaacagtgatgctatttgtattcttattttctaaacagcaaaggattaaaatgctgattctgcccccagttccagttccaaagattaaaggaatcgatccagatctcctcaaggaaggaaaattagaggaggtgaacacaatcttagccattcatgatagctataaacccgaattccacagtgatgactcttgggttgaatttattgagctagatattgatgagccagatgaaaagactgaggaatcagacacagacagacttctaagcagtgaccatgagaaatcacatagtaacctaggggtgaaggatggcgactctggacgtaccagctgttgtgaacctgacattctggagactgatttcaatgccaatgacatacatgagggtacctcagaggttgctcagccacagaggttaaaaggggaagcagatctcttatgccttgaccagaagaatcaaaataactcaccttatcatgatgcttgccctgctactcagcagcccagtgttatccaagcagagaaaaacaaaccacaaccacttcctactgaaggagctgagtcaactcaccaagctgcccatattcagctaagcaatccaagttcactgtcaaacatcgacttttatgcccaggtgagcgacattacaccagcaggtagtgtggtcctttccccgggccaaaagaataaggcagggatgtcccaatgtgacatgcacccggaaatggtctcactctgccaagaaaacttccttatggacaatgcctacttctgtgaggcagatgccaaaaagtgcatccctgtggctcctcacatcaaggttgaatcacacatacagccaagcttaaaccaagaggacatttacatcaccacagaaagccttaccactgctgctgggaggcctgggacaggagaacatgttccaggttctgagatgcctgtcccagactatacctccattcatatagtacagtccccacagggcctcatactcaatgcgactgccttgcccttgcctgacaaagagtttctctcatcatgtggctatgtgagcacagaccaactgaacaaaatcatgccttagcctttctttggtttcccaagagctacgtatttaatagcaaagaattgactggggcaataacgtttaagccaaaacaatgtttaaaccttttttgggggagtgacaggatggggtatggattctaaaatgccttttcccaaaatgttgaaatatgatgttaaaaaaataagaagaatgcttaatcagatagatattcctattgtgcaatgtaaatattttaaagaattgtgtcagactgtttagtagcagtgattgtcttaatattgtgggtgttaatttttgatactaagcattgaatggctatgtttttaatgtatagtaaatcacgctttttgaaaaagcgaaaaaatcaggtggcttttgcggttcaggaaaattgaatgcaaaccatagcacaggctaattttttgttgtttcttaaataagaaacttttttatttaaaaaactaaaaactagaggtgagaaatttaaactataagcaagaaggcaaaaatagtttggatatgtaaaacatttactttgacataaagttgataaagattttttaataatttagacttcaagcatggctattttatattacactacacactgtgtactgcagttggtatgacccctctaaggagtgtagcaactacagtctaaagctggtttaatgttttggccaatgcacctaaagaaaaacaaactcgttttttacaaagcccttttatacctccccagactccttcaacaattctaaaatgattgtagtaatctgcattattggaatataattgttttatctgaatttttaaacaagtatttgttaatttagaaaactttaaagcgtttgcacagatcaacttaccaggcaccaaaagaagtaaaagcaaaaaagaaaacctttcttcaccaaatcttggttgatgccaaaaaaaaatacatgctaagagaagtagaaatcatagctggttcacactgaccaagatacttaagtgctgcaattgcacgcggagtgagttttttagtgcgtgcagatggtgagagataagatctatagcctctgcagcggaatctgttcacacccaacttggttttgctacataattatccaggaagggaataaggtacaagaagcattttgtaagttgaagcaaatcgaatgaaattaactgggtaatgaaacaaagagttcaagaaataagtttttgtttcacagcctataaccagacacatactcatttttcatgataatgaacagaacatagacagaagaaacaaggttttcagtccccacagataactgaaaattatttaaaccgctaaaagaaactttctttctcactaaatcttttataggatttatttaaaatagcaaaagaagaagtttcatcattttttacttcctctctgagtggactggcctcaaagcaagcattcagaagaaaaagaagcaacctcagtaatttagaaatcattttgcaatcccttaatatcctaaacatcattcatttttgttgttgttgttgttgttgagacagagtctcgctctgtcgccaggctagagtgcggtggcgcgatcttgactcactgcaatctccacctcccacaggttcaggcgattcccgtgcctcagcctcctgagtagctgggactacaggcacgcaccaccatgccaggctaatttttttgtattttagcagagacggggtttcaccatgttggccaggatggtctcgagtctcctgacctcgtgatccacccgactcggcctcccaaagtgctgggattacaggtgtaagccaccgtgcccagccctaaacatcattcttgagagcattgggatatctcctgaaaaggtttatgaaaaagaagaatctcatctcagtgaagaatacttctcattttttaaaaaagcttaaaactttgaagttagctttaacttaaatagtatttcccatttatcgcagaccttttttaggaagcaagcttaatggctgataattttaaattctctctcttgcaggaaggactatgaaaagctagaattgagtgtttaaagttcaacatgttatttgtaatagatgtttgatagattttctgctactttgctgctatggttttctccaagagctacataatttagtttcatataaagtatcatcagtgtagaacctaattcaattcaaagctgtgtgtttggaagactatcttactatttcacaacagcctgacaacatttctatagccaaaaatagctaaatacctcaatcagtctcagaatgtcattttggtactttggtggccacataagccattattcactagtatgactagttgtgtctggcagtttatatttaactctctttatgtctgtggattttttccttcaaagtttaataaatttattttcttggattcctgataatgtgcttctgttatcaaacaccaacataaaaatgatctaaacc

SEQ ID NO: 29060 - DNA, 7109 bp, Homo Sapiens
tggattatgatttttgtttatttttcctgtttatccatatattatttttcaacaatgagtattgattacttatataataattttaaggctgtacacattgcagacagcaccccactgtttgaaaaactcctcctcagtagaacatggcagaccttcatcttccttccctgaaccttttccaaccttaggcttgccattctccaccagtgctaatgtcatgtctcttgaaatctgtattgaagtcagtatttcattcttgccagtttccactgtgtgtttaaatttggagtctggtgtctagcattagctggggttggagcttccactcctctcagcattggtaagcctcctcacccaccccatcccatgtccaagatcacccagttacacacttaccatctacccagttcattcacatcatcagtcccagagctgcagagatgctctttttctacctcctacttctctggctcttagagaggcagcatgggataatggggcaagcgaatagggccttaaagtagagggacaagggttctcttccctatctgccacttattagctatgtgacctcgtgtaagtctcttttctttttgagacagggtctccctctgtcacctaggctggagtacagtggtatgatcatagctcactgcagcctcgaactcctgggctcaagctatccttccaccttagccttctgagcagcagggactacaggcacatgccaccatgtccggctgatttatttatttttatttgggaagatgggggtctcactatgtcgcccaggctggtcatgaactcctggtctcaagcaaccctccaaccttggactcccaaagtgctgggattacaggtgtgagccctggccttgcctcaatttcctcatctgtaaaacggggttagtgaaactcacatcctatcagtggttttgaggatgggccgactcttgtattgcctgctctagtacaatcagcagctaaggcggctcactttccggccgtgctacaataggtaagaactaggatgctttagacgtgtgactgggcagtgggagcccctcacatgatcccgagatgccagacagtgtctctccgcacagggcgtgtgctggtccagaggcccgtttttccagtcgccccacaccccgggtccgcgatcacgctccccccacccatagccgagcctgacgcggcggtggctcatgcgcctttccgtcccagcctttagccacggaccacacgtcccatctcaggcgccccgcccctcccccgccccccgcccccggcgcgcctccccaggctgccggctccggtgtctgagcggccgcgcccgcgagccgtgagcgatgattggctgcgccacggcggcgggcggtccgtgggcgcacacaccctccccgcgcagccaatgggcgtgcgcacgtcactgatccggaggcccgcgggccggcagcccctcaataagccacattgttgcatgaaactccggcgcaggagtcccgggctgccgctggcaacatcgtgtcacccagctaagaaaatccgcgggcccgagccacgcgcctgtgaatcggagaggtcccactgcccgagtggagccgggctgagattcttctcaagttgagcctcagtgatcctgtggccgaagttagcgccttgacgtgggacaaccggacacgtcgccaggagagaactgaggcgccttctagcagttgtgacgccaaaatcacgtctccggagacccgcgccctccgccagccgggcgcaccctcgccggtagccttctttgtgcgccgtccggactcccagctcccggcccggcagccgagccccagcacaaagcagtcggaccgcgccgcccgcctcccctctcgcgtctccgcctcggtttcccaactctgcgccgtcgggccgcggcaggatgattgcctcgcatctgcttgcctacttcttcacggagctcaaccatgaccaagtgcagaaggttgaccagtatctctaccacatgcgcctctctgatgagaccctcttggagatctctaagcggttccgcaaggagatggagaaagggcttggagccaccactcaccctactgcagcagtgaagatgctgcccacctttgtgaggtccactccagatgggacagaacacggagagttcctggctctggatcttggagggaccaacttccgtgtgctttgggtgaaagtaacggacaatgggctccagaaggtggagatggagaatcagatctatgccatccctgaggacatcatgcgaggcagtggcacccagctgtttgaccacattgccgaatgcctggctaacttcatggataagctacaaatcaaagacaagaagctcccactgggttttaccttctcgttcccctgccaccagactaaactagacgagagtttcctggtctcatggaccaagggattcaagtccagtggagtggaaggcagagacgttgtggctctgatccggaaggccatccagaggagaggggactttgatatcgacattgtggctgtggtgaatgacacagttgggaccatgatgacctgtggttatgatgaccacaactgtgagattggtctcattgtgggcacgggcagcaacgcctgctacatggaagagatgcgccacatcgacatggtggaaggcgatgaggggcggatgtgtatcaatatggagtggggggccttcggggacgatggctcgctcaacgacattcgcactgagtttgaccaggagattgacatgggctcactgaacccgggaaagcaactgtttgagaagatgatcagtgggatgtacatgggggagctggtgaggcttatcctggtgaagatggccaaggaggagctgctctttggggggaagctcagcccagagcttctcaacaccggtcgctttgagaccaaagacatctcagacattgaaggggagaaggatggcatccggaaggcccgtgaggtcctgatgcggttgggcctggacccgactcaggaggactgcgtggccactcaccggatctgccagatcgtgtccacacgctccgccagcctgtgcgcagccaccctggccgccgtgctgcagcgcatcaaggagaacaaaggcgaggagcggctgcgctctactattggggtcgacggttccgtctacaagaaacacccccattttgccaagcgtctacataagaccgtgcggcggctggtgcccggctgcgatgtccgcttcctccgctccgaggatggcagtggcaaaggtgcagccatggtgacagcagtggcttaccggctggccgatcaacaccgtgcccgccagaagacattagagcatctgcagctgagccatgaccagctgctggaggtcaagaggaggatgaaggtagaaatggagcgaggtctgagcaaggagactcatgccagtgcccccgtcaagatgctgcccacctacgtgtgtgctaccccggacggcacagagaaaggggacttcttggccttggaccttggaggaacaaatttccgggtcctgctggtccgtgttcggaatgggaagtggggtggagtggagatgcacaacaagatctacgccatcccgcaggaggtcatgcacggcaccggggacgagctctttgaccacattgtccagtgcatcgcggacttcctcgagtacatgggcatgaagggcgtgtccctgcctctgggttttaccttctccttcccctgccagcagaacagcctggacgagagcatcctcctcaagtggacaaaaggcttcaaggcatctggctgcgagggcgaggacgtggtgaccctgctgaaggaagcgatccaccggcgagaggagtttgacctggatgtggttgctgtggtgaacgacacagtcggaactatgatgacctgtggctttgaagaccctcactgtgaagttggcctcattgttggcacgggcagcaatgcctgctacatggaggagatgcgcaacgtggaactggtggaaggagaagaggggcggatgtgtgtgaacatggaatggggggccttcggggacaatggatgcctagatgacttccgcacagaatttgatgtggctgtggatgagctttcactcaaccccggcaagcagaggttcgagaaaatgatcagtggaatgtacctgggtgagattgtccgtaacattctcatcgatttcaccaagcgtggactactcttccgaggccgcatctcagagcggctcaagacaaggggcatctttgaaaccaagttcttgtctcagattgagagtgactgcctggccctgctgcaagtccgagccatcctgcaacacttagggcttgagagcacctgtgacgacagcatcattgttaaggaggtgtgcactgtggtggcccggcgggcagcccagctctgtggcgcaggcatggccgctgtggtggacaggatacgagaaaaccgtgggctggacgctctcaaagtgacagtgggtgtggatgggaccctctacaagctacatcctcactttgccaaagtcatgcatgagacagtgaaggacctggctccgaaatgtgatgtgtctttcctgcagtcagaggatggcagcgggaagggggcggcgctcatcactgctgtggcctgccgcatccgtgaggctggacagcgatagaacccctgaaatcggaagggacttcctctttctctccttcttccctgttttaaattataagatgtcatccccttgtgtcagagacagaccccttggcttttgcttggcagagaggaccccactggactgggttttgtctctgcatctcattgtagagcttggtggctgagcttggccctattaagataaatagagttccaaataaggatttgttcacatgcatcataaccattcccattggttctcctaaaacatgaaaattatctcccttagtaatcccccttgccaaattccatgtccctgtataattctacaggatggggacactaatgaagatacggttgcttcaccttggagcctgaacatgacatttctaagtggggtgcatcccccagcactgatgttgttactgattctcctgtcagagatctgggaggtctccactgaggatgtgagcctgattatcctataggcagacgtggggagggtggaggggtgacagtggaggaaaatccatggatatccacgcagcagcccctctttaacctcatctacaagcatttgccctgtggattccagcatttgccattcctggaatcaaggaatcctgagtctgggcaatgaaaccaaagccaggagttgacgcatcctgcagttgggccagctgtcgcatctcagcggggcgcacatgttatccacaagcaatggacctttggggaagggggagtttttagtttgttttacaaatttttcctgcaaaagtggaatcactgtattttcattttaatttatatttgaaattttatttagttcttgagtagatctgcttcttcatcttgacatgtaatgaatggtcagttgtacgtaatgtatttatatgttaatttgttatgtatatagatgtgcaagtcttgtcagaattggcctcagtgtagttaaagggcagaaggggaagatactgactagtcatagaaatacctcattcgcctgtgggaagagaagggaagcctcttcagggtgagtgaatggcaaagcggttgcttctggctcctccttcccctgtggtcttggaagtgtgtggaaggcagggacagagatggaggccgagccaatagactgaagagaccacagcaattggctcctccatctagagattttcttggcagtattccatgggatgttaagcaaaggaaaccaaaggaatcgtttcaaatggactcatggcttagaaatctttattcttagggcagtcagtagtattctaaagctttctgacaagataaaggaagtcaccaaaatttctttttttaaattgtatctaatcctcaacaacaaaccaaaacagaacaattaaacagccaaataaaacctcagggacaacatttttggtgtatttgagccctcccagcaagtttcaccttgggtttgtattttaaatgttttacaagaattgtccatgtgcttccctaggctgagctggcattggtctgctgacctgtttttgtgtttttcttttttttatacacaacatttatttcaaactattgggagggatgagagtggcttaaaaacttccatccctacttttcaagagtgcagttgattctgaatctgaaagcccgcctctgtcctaaaatacaaacaagcacagacattaaacctggatactatatgataaagagggatgtaactattgaattggatacaaggatcagaatggaaagaaactcacgatgaaattgaacctggtttttgtatatttatcaaacttgtgctgagaatagtgtctgattatacgacttttaagcaaagttgggtgtaattaggtgaaaacagcccaggtcctcccgggagcacagaggggctaggggctggtccttctcgtttgctctagtcttgctttgctgtctggtgtagctcctctgctgctcccatctgcactaattgacccaaaacgtgggtatttcctgctacacaaaagccaaaaggtttcatgtagattttagttcactaaagggtgcccacaaaatagagattaattttaacttaaattttaagcttgaagattaggtactatctgtgaagttacacttttttttttttttttaaaggtagagatgtgtgtgtgtgtaggtattaaagatgtgttgttggtttccaaaaaggaacactggaaaataaattttgaatgtttatgttctcagaatcaggttgacagtcccttgctgacatggctttgctttgtgtaaatacagtggatctcaatcttcggggtgtgatgaatagcgaatcatctcaaatccttgagcactcagtctagtgaagatgttgtcattatgtacaatacataactagtttaattaactatgtgatgttaactattattaataaattttaacattttccaaaataaaaaaaaaaaaaaaaaa

SEQ ID NO: 29061 - DNA, 3714 bp, Homo Sapiens
ggtcctacccggaagcgcgcccgggctcctgcaggcggggcgctgtgcgcgccgcgatccggtacgtgggcctccgggctgtcccctctgggggcggcgatcctccctccggagccccccttcaaccctcccggaagtgaggaccagggatgctgtgctgctctcccatgagccagtcaccgagtcggtctgctgcagccctttctgaacctctggccgtctggatgctccactgtgcttgccaagatgaagtgcgtcttggtggccactgagggcgcagaggtcctcttctactggacagatcaggagtttgaagagagtctccggctgaagttcgggcagtcagagaatgaggaagaagagctccctgccctggaggaccagctcagcaccctcctagccccggtcatcatctcctccatgacgatgctggagaagctctcggacacctacacctgcttctccacggaaaatggcaacttcctgtatgtccttcacctgtttggagaatgcctgttcattgccatcaatggtgaccacaccgagagcgagggggacctgcggcggaagctgtatgtgctcaagtacctgtttgaagtgcactttgggctggtgactgtggacggtcatcttatccgaaaggagctgcggcccccagacctggcgcagcgtgtccagctgtgggagcacttccagagcctgctgtggacctacagccgcctgcgggagcaggagcagtgcttcgccgtggaggccctggagcgactgattcacccccagctctgtgagctgtgcatagaggcgctggagcggcacgtcatccaggctgtcaacaccagccccgagcggggaggcgaggaggccctgcatgccttcctgctcgtgcactccaagctgctggcattctactctagccacagtgccagctccctgcgcccggccgacctgcttgccctcatcctcctggttcaggacctctaccccagcgagagcacagcagaggacgacattcagccttccccgcggagggcccggagcagccagaacatccccgtgcagcaggcctggagccctcactccacgggcccaactggggggagctctgcagagacggagacagacagcttctccctccctgaggagtacttcacaccagctccttcccctggcgatcagagctcaggtagcaccatctggctggaggggggcaccccccccatggatgcccttcagatagcagaggacaccctccaaacactggttccccactgccctgtgccttccggccccagaaggatcttcctggatgccaacgtgaaggaaagctactgccccctagtgccccacaccatgtactgcctgcccctgtggcagggcatcaacctggtgctcctgaccaggagccccagcgcgcccctggccctggttctgtcccagctgatggatggcttctccatgctggagaagaagctgaaggaagggccggagcccggggcctccctgcgctcccagcccctcgtgggagacctgcgccagaggatggacaagtttgtcaagaatcgaggggcacaggagattcagagcacctggctggagtttaaggccaaggctttctccaaaagtgagcccggatcctcctgggagctgctccaggcatgtgggaagctgaagcggcagctctgcgccatctaccggctgaactttctgaccacagcccccagcaggggaggcccacacctgccccagcacctgcaggaccaagtgcagaggctcatgcgggagaagctgacggactggaaggacttcttgctggtgaagagcaggaggaacatcaccatggtgtcctacctagaagacttcccaggcttggtgcacttcatctatgtggaccgcaccactgggcagatggtggcgccttccctcaactgcagtcaaaagacctcgtcggagttgggcaaggggccgctggctgcctttgtcaaaactaaggtctggtctctgatccagctggcgcgcagatacctgcagaagggctacaccacgctgctgttccaggagggggatttctactgctcctacttcctgtggttcgagaatgacatggggtacaaactccagatgatcgaggtgcccgtcctctccgacgactcagtgcctatcggcatgctgggaggagactactacaggaagctcctgcgctactacagcaagaaccgcccaaccgaggctgtcaggtgctacgagctgctggccctgcacctgtctgtcatccccactgacctgctggtgcagcaggccggccagctggcccggcgcctctgggaggcctcccgtatccccctgctctaggccaaggtggccgcagtctgcctttgcatcctgtcctccagccacccttgcttgccactgttccccatgacgagagcctcctgtctgcagtggccatcctgaggatagggcagagtgcccagggtggccccagggcttctaaaaccccacctagaccaccctccatgtcaggtactgagcaaggccccagatccttctctctggaggaagagggaagcccaggggtcctgtttgtaaaacaacggtggcaacagctcctcttccagagctgcctctgcctttatcctgggagatggggaggaagccccatctctgctgttccctgcgtggaggaagcccacccagcaagctctctcctaccccaggtaaaaggtgctcctttgcctgggtttgaattccagcgctgccacttcctctctgcacctcctggcaagtttcttctattccccacgtttaaagcgatggcacctccgtcccagggtggtgtgaggattacccagtgtggtaggtgctcaataaatgttggtcattgttatcactgaagcccaacatgctagtgcttctagacccttctgtcagtgctgataagcccttgctaagtcccagccccttcatgcttggctggcgtctgccctagggctggggttctcaagcccctggccctggcccagagatttggattcccttggcggccgtggagcccagcctttgatgtctttcaaagcttctgtggtgcgccctggattgagaaccaccacccgaggggtacagcccctctcttccaaccgagaagttcctgtcccagaatggacccagggacaagagaccctgagagccctgggactgggagtgtctgctcctctgaggccaggaggccggtgctgggccagagaggacggcgtggcgaaagtcagcgtccactgcagcacaggatcagatggccgtgtgctgtgcatgcaggagcctcgccttctgtgtctttagtcttgagccaaaatttgctcaaagactgatctcttccttgcagggaacagctttggggctgggggaactagaacccacatgttggtctaaaccctgagaaggtggcagtgaggaagtatcccctcaggtgactggatctgtgttcctccttaacatcatctgatggaatggcaatgaaaagcgtggattgtggaaaatacagaaaaacataaaggaaaaaactccaatcccctgagcccaccactgttcaggacccctgcttttgtcacctactatttccctttagtttttagcagcggctggatgtgatatgtctagtttaaccagtccccttgatctttctatataataaataacacaggagtgaacatcctgaatcag

SEQ ID NO: 29062 - DNA, 5994 bp, Homo Sapiens
gcgctgcccgcctcgtccccaccccccaaccccccgcgcccgccctcggacagtccctgctcgcccgcgcgctgcagccccatctcctagcggcagcccaggcgcggagggagcgagtccgccccgaggtaggtccaggacgggcgcacagcagcagccgaggctggccgggagagggaggaagaggatggcagggccacgccccagcccatgggccaggctgctcctggcagccttgatcagcgtcagcctctctgggaccttggcaaaccgctgcaagaaggccccagtgaagagctgcacggagtgtgtccgtgtggataaggactgcgcctactgcacagacgagatgttcagggaccggcgctgcaacacccaggcggagctgctggccgcgggctgccagcgggagagcatcgtggtcatggagagcagcttccaaatcacagaggagacccagattgacaccaccctgcggcgcagccagatgtccccccaaggcctgcgggtccgtctgcggcccggtgaggagcggcattttgagctggaggtgtttgagccactggagagccccgtggacctgtacatcctcatggacttctccaactccatgtccgatgatctggacaacctcaagaagatggggcagaacctggctcgggtcctgagccagctcaccagcgactacactattggatttggcaagtttgtggacaaagtcagcgtcccgcagacggacatgaggcctgagaagctgaaggagccctggcccaacagtgacccccccttctccttcaagaacgtcatcagcctgacagaagatgtggatgagttccggaataaactgcagggagagcggatctcaggcaacctggatgctcctgagggcggcttcgatgccatcctgcagacagctgtgtgcacgagggacattggctggcgcccggacagcacccacctgctggtcttctccaccgagtcagccttccactatgaggctgatggcgccaacgtgctggctggcatcatgagccgcaacgatgaacggtgccacctggacaccacgggcacctacacccagtacaggacacaggactacccgtcggtgcccaccctggtgcgcctgctcgccaagcacaacatcatccccatctttgctgtcaccaactactcctatagctactacgagaagcttcacacctatttccctgtctcctcactgggggtgctgcaggaggactcgtccaacatcgtggagctgctggaggaggccttcaatcggatccgctccaacctggacatccgggccctagacagcccccgaggccttcggacagaggtcacctccaagatgttccagaagacgaggactgggtcctttcacatccggcggggggaagtgggtatataccaggtgcagctgcgggcccttgagcacgtggatgggacgcacgtgtgccagctgccggaggaccagaagggcaacatccatctgaaaccttccttctccgacggcctcaagatggacgcgggcatcatctgtgatgtgtgcacctgcgagctgcaaaaagaggtgcggtcagctcgctgcagcttcaacggagacttcgtgtgcggacagtgtgtgtgcagcgagggctggagtggccagacctgcaactgctccaccggctctctgagtgacattcagccctgcctgcgggagggcgaggacaagccgtgctccggccgtggggagtgccagtgcgggcactgtgtgtgctacggcgaaggccgctacgagggtcagttctgcgagtatgacaacttccagtgtccccgcacttccgggttcctgtgcaatgaccgaggacgctgctccatgggccagtgtgtgtgtgagcctggttggacaggcccaagctgtgactgtcccctcagcaatgccacctgcatcgacagcaatgggggcatctgtaatggacgtggccactgtgagtgtggccgctgccactgccaccagcagtcgctctacacggacaccatctgcgagatcaactactcggcgatccacccgggcctctgcgaggacctacgctcctgcgtgcagtgccaggcgtggggcaccggcgagaagaaggggcgcacgtgtgaggaatgcaacttcaaggtcaagatggtggacgagcttaagagagccgaggaggtggtggtgcgctgctccttccgggacgaggatgacgactgcacctacagctacaccatggaaggtgacggcgcccctgggcccaacagcactgtcctggtgcacaagaagaaggactgccctccgggctccttctggtggctcatccccctgctcctcctcctcctgccgctcctggccctgctactgctgctatgctggaagtactgtgcctgctgcaaggcctgcctggcacttctcccgtgctgcaaccgaggtcacatggtgggctttaaggaagaccactacatgctgcgggagaacctgatggcctctgaccacttggacacgcccatgctgcgcagcgggaacctcaagggccgtgacgtggtccgctggaaggtcaccaacaacatgcagcggcctggctttgccactcatgccgccagcatcaaccccacagagctggtgccctacgggctgtccttgcgcctggcccgcctttgcaccgagaacctgctgaagcctgacactcgggagtgcgcccagctgcgccaggaggtggaggagaacctgaacgaggtctacaggcagatctccggtgtacacaagctccagcagaccaagttccggcagcagcccaatgccgggaaaaagcaagaccacaccattgtggacacagtgctgatggcgccccgctcggccaagccggccctgctgaagcttacagagaagcaggtggaacagagggccttccacgacctcaaggtggcccccggctactacaccctcactgcagaccaggacgcccggggcatggtggagttccaggagggcgtggagctggtggacgtacgggtgcccctctttatccggcctgaggatgacgacgagaagcagctgctggtggaggccatcgacgtgcccgcaggcactgccaccctcggccgccgcctggtaaacatcaccatcatcaaggagcaagccagagacgtggtgtcctttgagcagcctgagttctcggtcagccgcggggaccaggtggcccgcatccctgtcatccggcgtgtcctggacggcgggaagtcccaggtctcctaccgcacacaggatggcaccgcgcagggcaaccgggactacatccccgtggagggtgagctgctgttccagcctggggaggcctggaaagagctgcaggtgaagctcctggagctgcaagaagttgactccctcctgcggggccgccaggtccgccgtttccacgtccagctcagcaaccctaagtttggggcccacctgggccagccccactccaccaccatcatcatcagggacccagatgaactggaccggagcttcacgagtcagatgttgtcatcacagccaccccctcacggcgacctgggcgccccgcagaaccccaatgctaaggccgctgggtccaggaagatccatttcaactggctgcccccttctggcaagccaatggggtacagggtaaagtactggattcagggcgactccgaatccgaagcccacctgctcgacagcaaggtgccctcagtggagctcaccaacctgtacccgtattgcgactatgagatgaaggtgtgcgcctacggggctcagggcgagggaccctacagctccctggtgtcctgccgcacccaccaggaagtgcccagcgagccagggcgtctggccttcaatgtcgtctcctccacggtgacccagctgagctgggctgagccggctgagaccaacggtgagatcacagcctacgaggtctgctatggcctggtcaacgatgacaaccgacctattgggcccatgaagaaagtgctggttgacaaccctaagaaccggatgctgcttattgagaaccttcgggagtcccagccctaccgctacacggtgaaggcgcgcaacggggccggctgggggcctgagcgggaggccatcatcaacctggccacccagcccaagaggcccatgtccatccccatcatccctgacatccctatcgtggacgcccagagcggggaggactacgacagcttccttatgtacagcgatgacgttctacgctctccatcgggcagccagaggcccagcgtctccgatgacactggctgcggctggaagttcgagcccctgctgggggaggagctggacctgcggcgcgtcacgtggcggctgcccccggagctcatcccgcgcctgtcggccagcagcgggcgctcctccgacgccgaggcccccacggccccccggacgacggcggcgcgggcgggaagggcggcagccgtgccccgcagtgcgacacccgggccccccggagagcacctggtgaatggccggatggactttgccttcccgggcagcaccaactccctgcacaggatgaccacgaccagtgctgctgcctatggcacccacctgagcccacacgtgccccaccgcgtgctaagcacatcctccaccctcacacgggactacaactcactgacccgctcagaacactcacactcgaccacactgcccagggactactccaccctcacctccgtctcctcccacgactctcgcctgactgctggtgtgcccgacacgcccacccgcctggtgttctctgccctggggcccacatctctcagagtgagctggcaggagccgcggtgcgagcggccgctgcagggctacagtgtggagtaccagctgctgaacggcggtgagctgcatcggctcaacatccccaaccctgcccagacctcggtggtggtggaagacctcctgcccaaccactcctacgtgttccgcgtgcgggcccagagccaggaaggctggggccgagagcgtgagggtgtcatcaccattgaatcccaggtgcacccgcagagcccactgtgtcccctgccaggctccgccttcactttgagcactcccagtgccccaggcccgctggtgttcactgccctgagcccagactcgctgcagctgagctgggagcggccacggaggcccaatggggatatcgtcggctacctggtgacctgtgagatggcccaaggaggagggccagccaccgcattccgggtggatggagacagccccgagagccggctgaccgtgccgggcctcagcgagaacgtgccctacaagttcaaggtgcaggccaggaccactgagggcttcgggccagagcgcgagggcatcatcaccatagagtcccaggatggaggacccttcccgcagctgggcagccgtgccgggctcttccagcacccgctgcaaagcgagtacagcagcatcaccaccacccacaccagcgccaccgagcccttcctagtggatgggctgaccctgggggcccagcacctggaggcaggcggctccctcacccggcatgtgacccaggagtttgtgagccggacactgaccaccagcggaacccttagcacccacatggaccaacagttcttccaaacttgaccgcaccctgccccacccccgccatgtcccactaggcgtcctcccgactcctctcccggagcctcctcagctactccatccttgcacccctgggggcccagcccacccgcatgcacagagcaggggctaggtgtctcctgggaggcatgaagggggcaaggtccgtcctctgtgggcccaaacctatttgtaaccaaagagctgggagcagcacaaggacccagcctttgttctgcacttaataaatggttttgctactgctaaaaaaaaaaaaaaaaaaaaaaaaaaaaaaaaaaaaaaaaaaaaaaaaaaaaaaaaaaaaaaaaaaaaaaaaaaaa

SEQ ID NO: 29063 - DNA, 2524 bp, Homo Sapiens
attggctgaaggcacttccgttgagcatctagacgtttccttggctcttctggcgccaaaatgtcgttcgtggcaggggttattcggcggctggacgagacagtggtgaaccgcatcgcggcgggggaagttatccagcggccagctaatgctatcaaagagatgattgagaactgtttagatgcaaaatccacaagtattcaagtgattgttaaagagggaggcctgaagttgattcagatccaagacaatggcaccgggatcaggaaagaagatctggatattgtatgtgaaaggttcactactagtaaactgcagtcctttgaggatttagccagtatttctacctatggctttcgaggtgaggctttggccagcataagccatgtggctcatgttactattacaacgaaaacagctgatggaaagtgtgcatacagagcaagttactcagatggaaaactgaaagcccctcctaaaccatgtgctggcaatcaagggacccagatcacggtggaggaccttttttacaacatagccacgaggagaaaagctttaaaaaatccaagtgaagaatatgggaaaattttggaagttgttggcaggtattcagtacacaatgcaggcattagtttctcagttaaaaaacaaggagagacagtagctgatgttaggacactacccaatgcctcaaccgtggacaatattcgctccatctttggaaatgctgttagtcgagaactgatagaaattggatgtgaggataaaaccctagccttcaaaatgaatggttacatatccaatgcaaactactcagtgaagaagtgcatcttcttactcttcatcaaccatcgtctggtagaatcaacttccttgagaaaagccatagaaacagtgtatgcagcctatttgcccaaaaacacacacccattcctgtacctcagtttagaaatcagtccccagaatgtggatgttaatgtgcaccccacaaagcatgaagttcacttcctgcacgaggagagcatcctggagcgggtgcagcagcacatcgagagcaagctcctgggctccaattcctccaggatgtacttcacccagactttgctaccaggacttgctggcccctctggggagatggttaaatccacaacaagtctgacctcgtcttctacttctggaagtagtgataaggtctatgcccaccagatggttcgtacagattcccgggaacagaagcttgatgcatttctgcagcctctgagcaaacccctgtccagtcagccccaggccattgtcacagaggataagacagatatttctagtggcagggctaggcagcaagatgaggagatgcttgaactcccagcccctgctgaagtggctgccaaaaatcagagcttggagggggatacaacaaaggggacttcagaaatgtcagagaagagaggacctacttccagcaaccccagaaagagacatcgggaagattctgatgtggaaatggtggaagatgattcccgaaaggaaatgactgcagcttgtaccccccggagaaggatcattaacctcactagtgttttgagtctccaggaagaaattaatgagcagggacatgaggttctccgggagatgttgcataaccactccttcgtgggctgtgtgaatcctcagtgggccttggcacagcatcaaaccaagttataccttctcaacaccaccaagcttagtgaagaactgttctaccagatactcatttatgattttgccaattttggtgttctcaggttatcggagccagcaccgctctttgaccttgccatgcttgccttagatagtccagagagtggctggacagaggaagatggtcccaaagaaggacttgctgaatacattgttgagtttctgaagaagaaggctgagatgcttgcagactatttctctttggaaattgatgaggaagggaacctgattggattaccccttctgattgacaactatgtgccccctttggagggactgcctatcttcattcttcgactagccactgaggtgaattgggacgaagaaaaggaatgttttgaaagcctcagtaaagaatgcgctatgttctattccatccggaagcagtacatatctgaggagtcgaccctctcaggccagcagagtgaagtgcctggctccattccaaactcctggaagtggactgtggaacacattgtctataaagccttgcgctcacacattctgcctcctaaacatttcacagaagatggaaatatcctgcagcttgctaacctgcctgatctatacaaagtctttgagaggtgttaaatatggttatttatgcactgtgggatgtgttcttctttctctgtattccgatacaaagtgttgtatcaaagtgtgatatacaaagtgtaccaacataagtgttggtagcacttaagacttatacttgccttctgatagtattcctttatacacagtggattgattataaataaatagatgtgtcttaacataa

SEQ ID NO: 29064 - DNA, 6401 bp, Homo Sapiens
aatacaccccgggcaggtggagcgctcgcggctgctcgcggcgagcccgggagtgatggcgaggcccctgcgggcggccagcgcctgaggcgccccgccccgccccgccccgcgcggccctccccgcccggccctgccctgccctgctccctgccggcggctgcgggcgcttcctagtccgctcgggcggccgcccaggcgaggtgcggcctccgcacaggccggggggcgtaggcgcgcggggcccgccatggctgcgtcggagctctacacaaagtttgccagggtttggatacctgatccagaggaagtctggaagtcagcagagctgctcaaagattataagccaggagataaagtcctcctgcttcacctcgaggaaggaaaggatttggaataccatctagatccaaagaccaaggagctgcctcacttacgaaatcctgacatacttgttggtgaaaatgacctcacagccctcagctatcttcatgagcctgctgtgctccataatctcagagtccgctttattgattccaaacttatttatacgtattgtggtatagtcctagtagctataaatccctatgaacagctgcctatttatggagaagatattattaatgcatacagtggtcagaacatgggtgatatggatccacatatctttgcagtagctgaagaagcttacaagcaaatggccagagatgaacgaaatcagtccatcatcgtaagtggagagtctggggcaggaaaaacagtctcagctaagtatgccatgcgatactttgcaactgtgagtggttctgccagtgaggccaatgtggaggaaaaggtcttgacctccaaccccatcatggagtccattggaaatgctaaaacaaccaggaatgataatagcagccgttttgggaagtatattgagattggttttgataagagatatcgaatcattggtgccaatatgagaacttatcttttagagaaatccagagtggtattccaggcagaagaggagagaaactatcatatcttctatcagctttgtgcctcagcaaagttacctgaatttaaaatgctacgattaggaaatgcagataactttaattacacaaaacaaggaggcagtcctgtgattgaaggagtggatgatgcaaaggagatggcacatactaggcaggcctgcactttgctaggaattagtgaatctcatcaaatgggaattttccgaatacttgctggcatccttcacttaggcaatgttggatttacatcccgagatgcagacagctgcacaatacctcccaagcatgaacctctctgcatcttctgtgacctcatgggtgtggactatgaggagatgtgtcactggctctgccatcggaaactggctactgccacagagacatacatcaagcccatctccaagctgcaggccacgaatgcccgcgatgctttggccaaacacatctatgccaagctctttaactggattgtagataatgtcaatcaggctctccattctgctgtcaaacagcactcttttattggtgtgctagacatttacggatttgaaacatttgagataaatagttttgaacagttttgcataaattatgcaaatgaaaaactacagcaacaattcaatatgcatgtcttcaaattggagcaagaagaatatatgaaggaacaaattccatggacactcatagatttttatgataatcagccttgtattaatcttatagaatcaaaactaggcattctagatttactggatgaggaatgcaagatgcctaaaggcacagatgacacctgggcccaaaaattgtacaacacacatttgaacaaatgtgcactctttgaaaagcctcgtctatcaaacaaagctttcatcatccaacattttgctgacaaagtggaataccagtgtgaaggatttctcgaaaagaataaagacaccgtttttgaagaacaaattaaagttcttaaatcaagcaagtttaagatgctaccagaactatttcaagatgatgagaaggccatcagtccaacttcagccacctcctcagggcgcacacccctcacacgaactcctgcaaagcccaccaaaggcagaccaggccaaatggccaaagagcacaagaaaacagtggggcatcagttcagaaactccctgcacctgcttatggagacactcaatgccactacccctcactatgtgcgctgtatcaagcctaatgacttcaagctcccattcacgtttgatgagaagagggcagtgcagcagctgagagcatgtggtgtcctggaaaccatccgaatcagtgcggccggtttcccctcacggtggacttaccaagaatttttcagccgctaccgtgtcctaatgaagcagaaagatgtgctgagtgacagaaagcaaacatgcaagaatgtgttagagaaactgatactggacaaggacaaataccagtttggtaagacaaagatctttttccgtgccggtcaagtggcctatctagaaaaattgagagctgacaaactgagagctgcctgcatccggatccagaagaccatccgagggtggctgctgagaaagaagtacctacgcatgcggaaggcagccatcaccatgcagagatacgtgcggggctaccaggcccgatgctatgctaagtttctgcgcagaaccaaggcagcaaccatcattcaaaagtactggcgcatgtatgtggtccgcaggaggtacaagattagacgagctgccactattgttcttcagtcttacttgcgaggcttcttggccagaaataggtatcgcaagatactccgtgggcacaaagcagtcatcattcagaagcgagtccggggctggctggcccgcacacactacaagaggagcatgcatgccatcatctaccttcagtgctgcttcaggcggatgatggccaagcgtgagctaaagaagctcaaaatcgaggctcgctcagtggagcgctataagaagctgcgcatcggcatggagaacaagatcatgcagctgcagcgcaaagttgatgagcagaacaaagactacaaatgccttgtggagaaactaaccaatctggaaggaatatacaactctgagactgagaaactacgaagtgacttagaacgtcttcaactaagtgaagaggaagcgaaagttgccactgggcgggtccttagtctgcaggaggaaattgccaagctccggaaagacctggagcaaactcgttcagagaaaaaatgcattgaggaacatgcagatcgatacaaacaagaaacagagcagctggtatcaaatctgaaggaagaaaatactttgctgaagcaagaaaaagaagccctcaatcaccgcatcgtgcagcaggctaaggagatgacagaaactatggagaagaagttagtagaagaaacgaaacaactggaactcgaccttaatgatgaaaggctgagatatcagaaccttctgaatgagttcagtcgcctggaagaaagatatgatgacctcaaggaagagatgacccttatggtgcatgtgcctaagcctggacacaagagaacagactccacccacagcagcaacgagtctgaatatatctttagctctgaaattgcagaaatggaagacattccatcaaggacagaggaaccaagtgagaagaaggtacctctggacatgtcattgttccttaagctccagaagcgggtcacagagctggagcaggagaagcaggtgatgcaggatgagctggaccgcaaggaggagcaggtgctccgcagcaaggccaaggaagaagaaagaccacaaattagaggtgcagaactggaatatgagtcactcaagcgtcaagaactagaatcagaaaacaaaaaactgaagaatgagctaaatgagttgcgcaaggccctcagtgagaaaagtgccccagaggtgaccgccccaggtgcacctgcctaccgtgtcctcatggagcagctgacctctgtgagcgaggagcttgatgtccgcaaggaggaagtcctcatcttaaggtctcaactggtgagccagaaagaggccatccaacccaaggatgacaagaatacaatgacagattccacaatacttttggaagatgtacaaaaaatgaaagataaaggtgaaatagcacaagcatacattggtttgaaagaaacaaatagatcatctgctctggattaccatgagttgaatgaggatggagagctgtggctggtttatgaagggttaaaacaagccaataggctcctggaatcccagctgcagtcacagaagaggagccatgagaatgaggccgaggccctccgtggggagatccagagcctgaaggaggagaacaaccgacagcagcagctgctggcccagaacctgcagctgcccccagaggcccgcattgaggccagcctgcagcacgagatcacccggctgaccaacgaaaacttggatttgatggaacaacttgaaaaacaggataagacggtccgtaaactgaaaaaacaactgaaagtatttgccaaaaaaattggcgaactagaagtgggccagatggagaacatatccccaggacagatcattgatgaacccatccgaccagtcaacattcccaggaaagaaaaggatttccaagggatgctggaatacaagaaggaggatgagcaaaaacttgttaagaacctgattctggaactgaagccacgtggtgtagcagtcaatttgattccaggattaccggcatatatcctgttcatgtgtgttcgacatgctgactacctgaatgatgatcagaaagtaaggtcgttgctaacatcaacaattaacagcatcaaaaaagtattgaagaaaagaggtgatgattttgaaaccgtctccttctggctctctaacacatgccgatttttgcactgcttgaaacagtacagtggagaagagggctttatgaagcacaacacatctcgccagaatgaacactgcctcaccaattttgacctggctgagtatcggcaggtgctgagtgacttggccattcagatctaccagcagctcgtgcgggtgttagagaacatccttcagccaatgattgtctcaggcatgctggaacatgaaacgattcagggcgtgtctggggtgaagcccacagggttgagaaagcgaacctccagtatcgccgatgagggcacctacacactggactccatcctccggcagctcaactccttccactcggtcatgtgtcagcatggcatggaccctgaactgatcaagcaggtggtcaagcagatgttctacatcataggggccatcaccctgaacaaccttctcctgcggaaggacatgtgctcctggagtaaaggcatgcagatcaggtacaatgtcagtcaactggaagaatggctgcgtgacaagaatctgatgaatagtggggctaaagaaaccctggaacctctcattcaggctgctcaacttttgcaagtgaaaaagaaaacagatgatgatgcagaagccatttgttctatgtgcaatgctttaactactgcccagattgtgaaagtgttgaatttgtatactccagttaatgagtttgaagaaagagtctctgtgtcgttcattcgtactatacagatgcgtttacgagacaggaaagactctccccagctgctcatggatgctaaacacatctttcctgtcacctttcctttcaacccatcttccctcgcactagaaaccatccagattccagccagcctcggcctgggctttatttcacgggtctgaaagtgatgtccaggcaaaaattgacaatacatttcttgcccgaaataagaacccattatttccagtgagttactgaaaatacatttttaaagagaaagtactgattatctcccaaatgagaagtcattaactggaaatctccctagaatactttcatcactttggaaacaaagataggctctttcgtgctgtgttatctttatagcaacactcatccttaaccaactaggtaccgtgagtttacatacaggagaatgatggaaggaagggaggaaggaaaggaggagaaaaatgtgtcttcagctggcagcatttattttaaatccttagcactgagtttgaatggtataaaaagtataacttccatagatgagctgttgttaggaaggcaccaaagaacctcctctgcactaaacaggagaatggaaagaaaagtctccattgagtacatatcatgtcagtttagtaatcaattatgttgatattgttaaactggttcaaagaaataaactggcaatatgtaaagtaattcctcatttgtgtcactatgatatagagatattaaaggaatgttggtttgcta

SEQ ID NO: 29065 - DNA, 1846 bp, Homo Sapiens
cctctctctctctccctctctctctccctctctctctctccctgtgtcgcttaaacaacagtcctaacttttgtgtgttgcaaatataaaaggcaagccatgtgacagagggacagaagaacaaaagcatttggaagtaacaggacctctttctagctctcagaaaagtctgagaagaaaggagccctgcgttcccctaagctgtgcagcagatactgtgatgatggattgcaagtgcaaagagtaagacaaaactccagcacataaaggacaatgacaaccagaaagcttcagcccgatcctgccctttccttgaacgggactggatcctaggaggtgaagccatttccaattttttgtcctctgcctccctctgctgttcttctagagaagtttttccttacaacaatgagaaaacatgtactagctgcatccttttctatgctctccctgctggtgataatgggagatacagacagtaaaacggacagctcattcataatggactcggaccctcgacgctgcatgaggcaccactatgtggattctatcagtcacccattgtacaagtgtagctcaaagatggtgctcctggccaggtgcgaggggcactgcagccaggcgtcacgctccgagcctttggtgtcgttcagcactgtcctcaagcaacccttccgttcctcctgtcactgctgccggccccagacttccaagctgaaggcactgcggctgcgatgctcagggggcatgcgactcactgccacctaccggtacatcctctcctgtcactgcgaggaatgcaattcctgaggcccgctgctgtgtgtggcttctggatgggacaactgtagaggcagttcgaccagccagggaaagactggcaagaaaagagttaaggcaaaaaaggatgcaacaattctcccgggactctgcatattctagtaataaagactctacatgcttgttgacagagagagatactctgggaacttctttgcagttcccatctcctttctctggtacaatttcttttggttcattttcagattcaggcattttcccccttggctctcaatgctgtttgggtttccaacaattcagcattagtgggaaaaagtgggccctcatacacaagcgtgtcaggctgtcagtgtttggtgcacgctggggaagaatttactttggaaagtagaaaagcccagcttttcctgggacatcttctgttattgttgatgtttttttttaccttgtcattttggtctaaggttgccattgctgctaaaggttaccgatttcaaagtccagataccaagcatgtggatatgtttagctacgtttactcacagccagcgaactgacattaaaataactaacaaacagattcttttatgtgatgctggaactcttgacagctataattattattcagaaatgactttttgaaagtaaaagcagcataaagaatttgtcacaggaaggctgtctcagataaattatggtaaaattttgtaagggagcagacttttaaagacttgcacaaatacggatcctgcactgactctggaaaaggcatatatgtactagtggcatggagaatgcaccatactcatgcatgcaaattagacaaccaagtatgaatctatttgtgggtgtgctatagctttagcgtgtcacgggcatcattctctaatatccacttgtccatgtgaaacatgttgccaaaatggtggcctggcttgtcttctgaacgtttggttcaaatgtgttttggtcctggaggctcaaattttgagttattcccacgttttgaaataaaaagagtatattcaaaaaaaaaaaaaaaaaa

SEQ ID NO: 29066 - DNA, 5165 bp, Homo Sapiens
tctcagctcccagctccccgctcccggctcccggcgcccggcgcccggcgcggagctgttcctcaaacgacacgcagccgaggtgggtgggtgtggggacgcgggagccagtgtcgtcggatcggcccgcagtccgctgtcctgctgagcccggaggccgcctggatggagccgccgctcccggtcggagcccagccgcttgccactgtcgagggtatggagatgaagggtcctctccgggagccctgcgccctgaccctagcccagaggaacgggcaatatgagttaataatccagttgcatgagaaggaacagcatgttcaagatatcattcctataaatagccacttcagatgtgttcaagaagcagaagaaactcttttgattgacatagcttctaacagtggctgcaaaattcgggttcagggggactggatcagagagcgccgctttgaaatccctgatgaggaacactgtttgaagttcctctcagctgtccttgctgctcagaaagctcagtcacagcttcttgttccagagcaaaaggactcatctagctggtaccagaaattagacactaaggacaaaccttctgttttttcagggcttcttggatttgaagacaatttttcttctatgaatttggacaagaaaataaattcacaaaatcagcctactgggattcatcgggaacccccacctccacccttttcagtgaataaaatgcttccacgtgaaaaagaagcttctaacaaggagcagcccaaagtgaccaacaccatgcggaagctctttgtaccaaatacccaatctgggcagcgggagggtctcatcaaacatatcctggcaaagcgagagaaagaatatgtcaacattcagactttcagattttttgttggaacttggaatgtgaatggccagtctccagatagcgggttagaaccttggctgaactgtgatcccaatcctcctgatatctactgcattggattccaagaactggacttgagcacagaagccttcttctactttgaatctgtgaaggaacaagaatggtccatggctgtagagagaggtttgcattccaaagccaagtataagaaagttcaactggtgcgccttgttgggatgatgcttcttatatttgccagaaaggatcagtgtcgatacattcgtgatattgctacagaaacagttggaactggaatcatggggaaaatgggaaacaaaggtggggtagctgtgagatttgtatttcacaacaccaccttttgcattgtcaattcccatctggctgcacacgtggaggactttgagagaaggaatcaagattataaggacatttgtgcgagaatgagttttgtggtcccaaatcagaccctcccgcagttgaacatcatgaaacatgaggttgtcatttggttgggagatttgaattatagactttgcatgcctgatgccaatgaggtgaaaagtcttattaataagaaagaccttcagagactcttgaaattcgaccagctaaatattcagcgcacacagaaaaaagcttttgttgacttcaatgaaggggaaatcaagttcatccccacttataagtatgactctaaaacagaccggtgggattccagtgggaaatgccgggttccagcctggtgtgaccgaattctttggagaggaacaaatgttaatcagcttaattatcggagtcacatggaactgaaaaccagcgaccacaagcctgttagcgccctcttccatattggggtgaaggttgtggatgaacgaaggtaccggaaagtctttgaagatagtgtacgcatcatggacagaatggaaaatgacttccttccttccttagaactcagcaggagggagtttgtgtttgaaaatgtgaagtttcggcaactacaaaaggagaagttccagatcagcaacaatggacaggttccctgccatttttctttcatccctaaacttaatgacagccagtactgcaagccatggcttcgggctgaaccttttgagggctacttggagccaaatgagacagtggacatttctcttgatgtgtatgtcagcaaagactctgtaaccatcctgaactcgggagaagataagattgaagatattctcgtccttcacctggatcgaggcaaagattacttcttgactatcagtggaaattacctcccaagttgttttggcacatccttagaggctctgtgccgtatgaaaagaccaatccgagaagttcctgttaccaaactcatagacttggaagaagacagcttcctagaaaaggagaaatcccttctgcaaatggttcctttggatgaaggtgccagtgagagaccccttcaggttcccaaggagatctggcttctagtagatcacctattcaaatacgcctgtcaccaggaggacctgttccagacccctggaatgcaggaagagctccagcagatcattgattgtctggataccagcattcctgagacaatccctggcagcaaccactctgtggctgaagcactgctcattttcttggaagccctgccagagccagtcatctgttacgagctgtatcagcgatgtcttgactctgcttatgatccccggatctgccgacaggtgatctcccagcttccgagatgccatagaaatgttttccgttacttgatggcattccttcgagaactcttaaaattctctgaatacaatagcgtcaatgccaacatgatcgctactctcttcactagtcttctcctgaggcctccacccaaccttatggcaagacagactccaagtgaccgccagcgtgctattcagttccttctgggctttctgcttgggagcgaagaagactaaggcttttactgttctctgatattctagaagcagacgatctcgggctccaagtatttcagaatgatttaaaaagtcatgccacaggaagggtctattgcagaatttcaagttctgtttatagtaaaaaggaagagcgtttcctaatccctcctttaccatatcctacacagaaaaatacttttagacttatattgccaagccaaagttaccatattttggtgtttttgtgttttctctttataaggcaaaaagatctgtatttacactccttcacctagggatgtgtttgttgccctcctacccaattgtcatgattgtccttagtaccctaggcctagattctgagatcttcccattctaggcctacaagcactacttgctgtagctgagacttgtctagagtcctttgttttgcacttttgacccaccccttcctggatcactcctttgcactccactcccctcgttctgtcactttgaacgaagtctgagtgaggctagtgactccttgggtgtcctcaacagtgaattcactgtctgcgtgcagttattacatgcatttgtgcatttctactacaatggcatctttatgtctctgtaacattggccttttcatggctccacactgggtggaaccatattctcttagatcacatttagtagcataactgtagggactattagagatggcatctcatcgatgagagagaatcacaatcagaatggaagcactttgagtatctgaagagtgagagcattcatgtttgacaggtcctgcttcccactatccttttcctgttattattcaaattttacacaaggactaatcctgggtgtctctgagacccatctcctgcctagacatccacctccagagcaacactggccccacagtaaaagaggaagtcttgtacctcaggcaggcccatctagagctattgctccttcccacagcaaaggtattgtggatgacccttagaatccattctctggtcttctgaaataccaagggcagatgtcacctccttcctcagcaggactgactctgggctctacaaccagctccttcacataaagggtttagagactccccttggctcccagtcaccatatccagtgttgtgtaaagagactggccaacaggaccaaccaagcaccttacctctcccatacaagatgaccctctgagcttttcatttattcaagctctgtggtacagcctttttttaaaataaattaatctatattggttgacaaacaagccaccaaccactgactgcaaaactgcctgatgcagttgggttcctcctggttttcttttgttacaaccacccttgcctgtttacattaattgcaaggagcataacgtacaggctgtatgtacaatcctgggcattgactctgtgacatttctagcatatccaaggcaccaccagtgatttctcctgtttcttggtgggggtgggggggaaggtacgtattctgcaatatggctaaaccctttcctgattgagagttaaagcaataggagtcaagttactggtgccacagatctggaggtatgataggtcaggggctaggtgttgaacttagttaatggaagactgagagcagaacaggtttgtcatctccgcaaggccagaaagtgatcacaaaaagaggcagatgatagacactggggtagggtcataccacagggaaatacctttcctgggcttgttttctagcatatcactgacctgggatctttgggtgatcaagggtgtggttagtggaggctctgtgctgcacgtatgcagtatcctatctctttctacatcagatcaaaacactaagttggtgtactgcctcgaccttttttcagctcatcctggaacatatacagagttgagagttttagacaatctctaggtagaggagacaagatgtagacccagacagaagaaatctgcttccctaccatggctattccagcaccccaacctgtaattgccaagtcctctaaggtactaatttgtagctgctctgaagtaaggatttcggattcagctggtagggaaagactctgcacctgctgtcttagggaagaaatggttcaaatccatgtggtgacattgcattagtctccctttcactgttttcttattctgtaattgtttgttatatttcccaaaaacgtcttgatcactaagcaaagctgctagtgggattctatatttcgtgtcatcttttttattataatttattgcaaatttttttctgaataaatatatgttgtgtgaaaaaaaaaaaaa

SEQ ID NO: 29067 - DNA, 3287 bp, Homo Sapiens
atggcgctggctgtcttgcgggtcctggagccctttccgaccgagacacccccgttggcagtgctgctgccacccgggggcccgtggccggcggcggagctgggcctggtgctggccctgaggcctgcaggggagagcccggcagggccggcgctgctggtggcagccctggaggggccggacgcgggcaccgaagagcagggtcccgggccgccgcagctactggttagccgcgcgctgctgcggctcctggcactgggctccggggcctgggtgcgggcgcgggcggtgcggcggcccccggcgctaggttgggcactgcttggcacctcgctggggcctgggctcggaccgcgagtcgggccgctgctggtgaggcgcggagagaccctcccagttcccggaccgcgggtgctggagacgcggccggcgttgcaagggctgctgggcccagggactcggctggctgtgactgagctccgcgggcgggccagactgtgtccagagtctggggacagcagtcggcccccacccccgcccgtggtgtcctcctttgcggtttctggcacagtgcggcgactccagggagttctgggagggactggagattcactaggggtgagccggagctgtctccgtggccttggcctcttccagggcgaatgggtgtgggtggcccaggccagagagtcatcgaacacttcacagccgcacttggctagggtgcaggtcctagaacctcgctgggacctctctgatagactgggacccggctctggaccgctgggagagcccctcgctgacggactggcgcttgtccctgccactttggcttttaatcttggctgtgaccccctggaaatgggagagctcagaattcagaggtacttggaaggctccatcgcccctgaagacaaaggaagctgctcattgctgcctgggcctccatttgccagagagttacacatcgaaattgtgtcttctccccactacagcactaatggaaattatgacggtgttctttaccggcactttcagatacccagggtagtccaggaaggggatgttctatgtgtgccaacaattgggcaagtagagatcctggaaggaagtccagagaaactgcccaggtggcgggaaatgttttttaaagtgaagaaaacagttggggaagctccagatggaccagccagtgcctacttggccgacaccacccatacctccttgtacatggtgggttctaccctgagccctgttccatggctcccttcagaggaatccactctctggagcagtttgtctcctccaggcctggaggccttggtgtctgaactctgtgctgtcctgaagcctcgcctccagccagggggtgccctgctgacaggaactagcagtgtccttctacggggccccccaggctgtgggaagaccacagtagttgctgctgcctgtagtcaccttgggctccacttactgaaggtgccctgctccagcctctgtgcagaaagtagtggggctgtggagacaaaactgcaggccatcttctcccgggcccgccgttgccggcctgcagtcctgttgctcacagctgtggaccttctgggccgggaccgtgatgggctgggtgaggatgcccgtgtgatggctgtgctgcgtcacctcctcctcaatgaggaccccctcaacagctgccctcccctcatggttgtggccaccacaagccgggcccaggacctgcctgctgatgtgcagacagcatttcctcatgagctcgaggtgcctgctctgtcagaggggcagcggctcagcatcctgcgggccctcactgcccaccttcccctgggccaggaggtgaacttggcacagctagcacggcggtgtgcaggctttgtggtaggggatctctatgcccttctgacccacagcagccgggcagcctgcaccaggatcaagaactcaggtttggcaggtggcttgactgaggaggatgagggggagctgtgtgctgccggctttcctctcctggctgaggactttgggcaggcactggagcaactgcagacagctcactcccaggccgttggagcccccaagatcccctcagtgtcctggcatgatgtgggtgggctgcaggaggtgaagaaggagatcctggagaccattcagctccccctggagcaccctgagctactgagcctgggcctgagacgctcaggccttctgctccatgggccccctggcaccggcaagacccttctggccaaggcagtagccactgagtgcagccttaccttcctcagcgtgaaggggccagagctcattaacatgtatgtgggccaaagtgaggagaatgtgcgggaagtgtttgccagggccagggctgcagctccatgcattatcttctttgatgaactggactctttggccccaagccgggggcgaagtggagattctggaggagtgatggacagggtggtgtctcagctccttgccgagctagatgggctgcacagcactcaggatgtgtttgtgattggagccaccaacagaccagatctcctggaccctgcccttctgcggcctggcagatttgacaagctggtgtttgtgggggcaaatgaggaccgggcctcccagctacgcgttctaagtgccatcacacgcaaattcaagctagagccatctgtgagcctggtaaacgtgctagattgctgccctccccagctgacgggcgcggacctctactctctctgctctgatgctatgacagctgccctcaaacgcagggttcatgacctggaggaagggctggaacaaggtagctcagcactgatgctcaccatggaggacttgctgcaggctgccgcccggctgcaaccctcagtcagtgagcaggagctgctccggtacaagcgcatccagcgcaagtttgctgcctgctaggagccccccagggtctgggaccccgctcagcatggctgcaggtaccttgatagcccacagagagatctgggaaggaagggctcctcctcaggctgctgccaacccacctggaggccacctccctccaggagatcccagggtgcaaagtggcattgagacagcagcaacagctcaagagatatctcctgcctacttgcccctccttccaggccggctctaagagaaaggcccatctactcaggaagagggccagggccttgggttctggggattgggccctgagagggctagttctgtggctgaaaataaagcatgtcccgccccctaaaaaaaaaaaaaaaaaa

SEQ ID NO: 29068 - DNA, 2680 bp, Homo Sapiens
ggggtggtgcagggcaggggtggtatatcctgtctgacggagggcgggcctcgccagtgccagagagggacgaaccagggtggaagcgccaggagcagctgcagggagccctcacgcggacctcgcactctatggccgtagggagccgctgagagcgagaagagcacgctcctgcccgcccgctgcaccgcacctcgcctcgcctctctgctctcctaggccccggccgcgcgccacccgcctcccgccaccatgaaccactcgccgctcaagaccgccttggcgtacgaatgcttccaggaccaggacaactccacgttggctttgccgtcggaccaaaagatgaaaacaggcacgtctggcaggcagcgcgtgcaggagcaggtgatgatgaccgtcaagcggcagaagtccaagtcttcccagtcgtccaccctgagccactccaatcgaggttccatgtatgatggcttggctgacaattacaactatgggaccaccagcaggagcagctactactccaagttccaggcagggaatggctcatggggatatccgatctacaatggaaccctcaagcgggagcctgacaacaggcgcttcagctcctacagccagatggagaactggagccggcactacccccggggcagctgtaacaccaccggcgcaggcagcgacatctgcttcatgcagaaaatcaaggcgagccgcagtgagcccgacctctactgtgacccacggggcaccctgcgcaagggcacgctgggcagcaagggccagaagaccacccagaaccgctacagcttttacagcacctgcagtggtcagaaggccataaagaagtgccctgtgcgcccgccctcttgtgcctccaagcaggaccctgtgtatatcccgcccatctcctgcaacaaggacctgtcctttggccactctagggccagctccaagatctgcagtgaggacatcgagtgcagtgggctgaccatccccaaggctgtgcagtacctgagctcccaggatgagaagtaccaggccattggggcctattacatccagcatacctgcttccaggatgaatctgccaagcaacaggtctatcagctgggaggcatctgcaagctggtggacctcctccgcagccccaaccagaacgtccagcaggccgcggcaggggccctgcgcaacctggtgttcaggagcaccaccaacaagctggagacccggaggcagaatgggatccgcgaggcagtcagcctcctgaggagaaccgggaacgccgagatccagaagcagctgactgggctgctctggaacctgtcttccactgacgagctgaaggaggaactcattgccgacgccctgcctgttctggccgaccgcgtcatcattcccttctctggctggtgcgatggcaatagcaacatgtcccgggaagtggtggaccctgaggtcttcttcaatgccacaggctgcttgaggaacctgagctcggccgatgcaggccgccagaccatgcgtaactactcagggctcattgattccctcatggcctatgtccagaactgtgtagcggccagccgctgtgacgacaagtctgtggaaaactgcatgtgtgttctgcacaacctctcctaccgcctggacgccgaggtgcccacccgctaccgccagctggagtataacgcccgcaacgcctacaccgagaagtcctccactggctgcttcagcaacaagagcgacaagatgatgaacaacaactatgactgccccctgcctgaggaagagaccaaccccaagggcagcggctggttgtaccattcagatgccatccgcacctacctgaacctcatgggcaagagcaagaaagatgctaccctggaggcctgtgctggtgccctgcagaacctgacagccagcaaggggctgatgtccagtggcatgagccagttgattgggctgaaggaaaagggcctgccacaaattgcccgcctcctgcaatctggcaactctgatgtggtgcggtccggagcctccctcctgagcaacatgtcccgccaccctctgctgcacagagtgatggggaaccaggtgttcccggaggtgaccaggctcctcaccagccacactggcaataccagcaactccgaagacatcttgtcctcggcctgctacactgtgaggaacctgatggcctcgcagccacaactggccaagcagtacttctccagcagcatgctcaacaacatcatcaacctgtgccgaagcagtgcctcacccaaggccgcagaagctgcccggcttctcctgtctgacatgtggtccagcaaggaactgcagggtgtcctcagacagcaaggtttcgataggaacatgctgggaaccttagctggggccaacagcctcaggaacttcacctcccgattctaagaagagactgtccaagcaagttaggcttgcaggaagatatgacccagctgagaagccctcaggcctcgctggatggggttttctgtccatcctgtgcagtatttgggaaagttcacaagaaactgagaagaaacctaaaaactgtggatagtggaaagatttttagattttttttttccttggggaaactggcaggcaatgggggttagggaggttggggcggggggggctttcttgagttaaaggg

SEQ ID NO: 29069 - DNA, 2680 bp, Homo Sapiens; identical to SEQ ID NO: 29068

SEQ ID NO: 29070 - DNA, 3215 bp, Homo Sapiens
cggacgcgtgggggcgctcggcgagagctggcggtcaccatggcaatgcgggagctggtggaggccgaatgcgggggtgccaacccgctcatgaagctcgccgggcacttcacccaggacaaggcccttcggcaggagggattgaggcctggcccctggccccccggagccccggcctctgaggcagcctccaagcctttgggagtagcttctgaagatgagttggtggctgaattcctgcaggaccagaatgcaccccttgtgtcccgtgcccctcagaccttcaagatggatgacctcctggctgagatgcagcagattgagcagtcaaacttccgccaggctccccagagagcccctggtgtggcagacttggccttgtctgagaactgggcccaggagtttcttgcagctggagatgctgtggatgtaactcaggattataatgagactgactggtcccaagaattcatctctgaagttacagaccccttgtctgtgtcccctgcccgctgggctgaggaatatttggagcaatcagaggagaagctgtggctgggagaacctgagggaacagccaccgatcgctggtatgatgaatatcatcctgaggaggatctgcagcacacggccagtgactttgtggccaaagtggatgaccccaaattggctaattctgagttcctgaaattcgtgcggcagattggcgaagggcaggtgtccctggagtccggtgcagggtcgggccgagctcaggcagaacagtgggcagcagagtttatacagcagcagggtacatcagatgcctgggttgaccagttcacaagaccagtaaacacatctgcccttgatatggagtttgaacgagccaagtcagctatagagttgcaggcagagttggaggagatggcaaaacgggatgctgaggcccacccctggctttctgactatgatgaccttacgtcagctacctatgataaggggtaccagtttgaggaggagaaccccttgcgtgatcaccctcagccttttgaagaagggctgcggcgccttcaggagggggacctgccaaatgctgtgctgctttttgaggcagctgtgcagcaggatcctaagcacatggaagcttggcagtatctgggtaccacccaggcagagaatgaacaagaactattagccatcagtgcattgcggaggtgtctggagctaaagccagataaccagacagcactgatggcgctggctgtgagcttcaccaacgagtccctgcagcgacaggcctgtgaaaccctacgagactggctgcggtacacaccagcctatgcccatctggtgacacctgctgaagaaggggctggtggggcaggactgggccccagcaagcgtatcctgggatctctcttgtctgactccctgtttcttgaagtgaaagagctcttcctggcagctgtgcggctggaccctacctccattgaccctgatgtgcagtgtggcttgggagtccttttcaacctgagtggggagtatgacaaggccgtggactgcttcacagctgccctcagcgttcgtcccaatgactatttgctgtggaataagctaggcgccaccctggccaatggaaaccagagtgaagaagcagtagctgcgtaccgccgggccctcgagctccagcctggctatatccggtcccgctataacctgggcatcagctgcatcaacctcggggctcaccgggaggctgtggagcactttctggaggccctgaacatgcagaggaaaagccggggcccccggggtgaaggaggtgccatgtcggagaacatctggagcaccctgcgtttggcattgtctatgttaggccagagcgatgcctatggggcagccgacgcgcgggatctgtccaccctcctaactatgtttggcctgccccagtgacagtgggacgggctgccctgtgagtgtccacctggagggatccccgctttggatgtgattccctctccccaaatgggcctaccaagggggcgggctgatgaccataagcggtacggcctttcaggagctgcctcaacgtaggggtgggtagtctgtgttctagttcctacataattgtaggaaaatgagctgtgtcatctctgagtcccttggtaattcaagggctgtacatccagctacagatctctctgctcatcatgccctttcttggtgctgctttttgggtaggaccccacgatttagggtaactgttatcatcagctgccatttctgatagggtctaccacatctgtaatgtctgtcctttcccccacttttactgggaattgatagtccagcttccttgggcagtgtaagtaggaggttcatctgctgtgcgcctctaatgtctgtctggatgggatgtgttaggagttggcctgttgggttgaattgttgatttggctgagcagagctgagttttggtaggagtgctcatggttctgtcattcttggacctctcctggctgagctctgattccctgtgagcacgatgctgatgcaatagtcctgtgtcatcactgcagcggtcctcaggagctgccagggccaattgctacagagtgtctgggtgtgtggcataggaggaaggtttgcttgtgaaatgaggctgggtgggagcggggagggactagatcagaagagatcaagggctgtattcaggaacgttggtgggaggacagagcaagtgggaagggggtatggtgagtgcggcaatccctcatcctcttagaagcacctgtgaatgggaattgagccaactgttatagaaaattggttcagaaagtgcaatcttgccagatttctagcaaataggttcagtgttaccataagcctttgctgtacttcttgaaatgtttctaggggagagcattggaaaatccccttcccccatctagatcgaaggaagatgagggagcagcttggattcttctcagttgtcccctgcatggggagatacactaacccccagaaatgactgctaagcctcttgccttgtctttagtagctaatgatcagagagattttttttttaaactaccatggtcccaggattccatcctgaaatttatttttctttgtatgaatatgtgtaaatgatttaaaaataaaactgtaaaatatttgtacgaagaataaatggaactgatgtgggtaaaaaaaaaaaaaaaaaaaaaaaa

SEQ ID NO: 29071 - DNA, 4740 bp, Homo Sapiens
ttccggtttttctcaggggacgttgaaattatttttgtaacgggagtcgggagaggacggggcgtgccccgcgtgcgcgcgcgtcgtcctccccggcgctcctccacagctcgctggctcccgccgcggaaaggcgtcatgccgcccaaaaccccccgaaaaacggccgccaccgccgccgctgccgccgcggaacccccggcaccgccgccgccgccccctcctgaggaggacccagagcaggacagcggcccggaggacctgcctctcgtcaggcttgagtttgaagaaacagaagaacctgattttactgcattatgtcagaaattaaagataccagatcatgtcagagagagagcttggttaacttgggagaaagtttcatctgtggatggagtattgggaggttatattcaaaagaaaaaggaactgtggggaatctgtatctttattgcacgagttgacctagatgagatgtcgttcactttactgagctacagaaaaacatacgaaatcagtgtccataaattctttaacttactaaaagaaattgataccagtaccaaagttgataatgctatgtcaagactgttgaagaagtatgatgtattgtttgcactcttcagcaaattggaaaggacatgtgaacttatatatttgacacaacccagcagttcgatatctactgaaataaattctgcattggtgctaaaagtttcttggatcacatttttattagctaaaggggaagtattacaaatggaagatgatctggtgatttcatttcagttaatgctatgtgtccttgactattttattaaactctcacctcccatgttgctcaaagaaccatataaaacagctgttatacccattaatggttcacctcgaacacccaggcgaggtcagaacaggagtgcacggatagcaaaacaactagaaaatgatacaagaattattgaagttctctgtaaagaacatgaatgtaatatagatgaggtgaaaaatgtttatttcaaaaattttataccttttatgaattctcttggacttgtaacatctaatggacttccagaggttgaaaatctttctaaacgatacgaagaaatttatcttaaaaataaagatctagatcgaagattatttttggatcatgataaaactcttcagactgattctatagacagttttgaaacacagagaacaccacgaaaaagtaaccttgatgaagaggtgaatataattcctccacacactccagttaggactgttatgaacactatccaacaattaatgatgattttaaattctgcaagtgatcaaccttcagaaaatctgatttcctattttaacaactgcacagtgaatccaaaagaaagtatactgaaaagagtgaaggatataggatacatctttaaagagaaatttgctaaagctgtgggacagggttgtgtcgaaattggatcacagcgatacaaacttggagttcgcttgtattaccgagtaatggaatccatgcttaaatcagaagaagaacgattatccattcaaaattttagcaaacttctgaatgacaacatttttcatatgtctttattggcgtgcgctcttgaggttgtaatggccacatatagcagaagtacatctcagaatcttgattctggaacagatttgtctttcccatggattctgaatgtgcttaatttaaaagcctttgatttttacaaagtgatcgaaagttttatcaaagcagaaggcaacttgacaagagaaatgataaaacatttagaacgatgtgaacatcgaatcatggaatcccttgcatggctctcagattcacctttatttgatcttattaaacaatcaaaggaccgagaaggaccaactgatcaccttgaatctgcttgtcctcttaatcttcctctccagaataatcacactgcagcagatatgtatctttctcctgtaagatctccaaagaaaaaaggttcaactacgcgtgtaaattctactgcaaatgcagagacacaagcaacctcagccttccagacccagaagccattgaaatctacctctctttcactgttttataaaaaagtgtatcggctagcctatctccggctaaatacactttgtgaacgccttctgtctgagcacccagaattagaacatatcatctggacccttttccagcacaccctgcagaatgagtatgaactcatgagagacaggcatttggaccaaattatgatgtgttccatgtatggcatatgcaaagtgaagaatatagaccttaaattcaaaatcattgtaacagcatacaaggatcttcctcatgctgttcaggagacattcaaacgtgttttgatcaaagaagaggagtatgattctattatagtattctataactcggtcttcatgcagagactgaaaacaaatattttgcagtatgcttccaccaggccccctaccttgtcaccaatacctcacattcctcgaagcccttacaagtttcctagttcacccttacggattcctggagggaacatctatatttcacccctgaagagtccatataaaatttcagaaggtctgccaacaccaacaaaaatgactccaagatcaagaatcttagtatcaattggtgaatcattcgggacttctgagaagttccagaaaataaatcagatggtatgtaacagcgaccgtgtgctcaaaagaagtgctgaaggaagcaaccctcctaaaccactgaaaaaactacgctttgatattgaaggatcagatgaagcagatggaagtaaacatctcccaggagagtccaaatttcagcagaaactggcagaaatgacttctactcgaacacgaatgcaaaagcagaaaatgaatgatagcatggatacctcaaacaaggaagagaaatgaggatctcaggaccttggtggacactgtgtacacctctggattcattgtctctcacagatgtgactgtataactttcccaggttctgtttatggccacatttaatatcttcagctctttttgtggatataaaatgtgcagatgcaattgtttgggtgagtcctaagccacttgaaatgttagtcattgttatttatacaagattgaaaatcttgtgtaaatcctgccatttaaaaagttgtagcagattgtttcctcttccaaagtaaaattgctgtgctttatggatagtaagaatggccctagagtgggagtcctgataacccaggcctgtctgactactttgccttcttttgtagcatataggtgatgtttgctcttgtttttattaatttatatgtatatttttttaatttaacatgaacacccttagaaaatgtgtcctatctatcttccaaatgcaatttgattgactgcccattcaccaaaattatcctgaactcttctgcaaaaatggatattattagaaattagaaaaaaattactaattttacacattagattttattttactattggaatctgatatactgtgtgcttgttttataaaattttgcttttaattaaataaaagctggaagcaaagtataaccatatgatactatcatactactgaaacagatttcatacctcagaatgtaaaagaacttactgattattttcttcatccaacttatgtttttaaatgaggattattgatagtactcttggtttttataccattcagatcactgaatttataaagtacccatctagtacttgaaaaagtaaagtgttctgccagatcttaggtatagaggaccctaacacagtatatcccaagtgcactttctaatgtttctgggtcctgaagaattaagatacaaattaattttactccataaacagactgttaattataggagccttaatttttttttcatagagatttgtctaattgcatctcaaaattattctgccctccttaatttgggaaggtttgtgttttctctggaatggtacatgtcttccatgtatcttttgaactggcaattgtctatttatcttttatttttttaagtcagtatggtctaacactggcatgttcaaagccacattatttctagtccaaaattacaagtaatcaagggtcattatgggttaggcattaatgtttctatctgattttgtgcaaaagcttcaaattaaaacagctgcattagaaaaagaggcgcttctcccctcccctacacctaaaggtgtatttaaactatcttgtgtgattaacttatttagagatgctgtaacttaaaataggggatatttaaggtagcttcagctagcttttaggaaaatcactttgtctaactcagaattatttttaaaaagaaatctggtcttgttagaaaacaaaattttattttgtgctcatttaagtttcaaacttactattttgacagttattttgataacaatgacactagaaaacttgactccatttcatcattgtttctgcatgaatatcatacaaatcagttagtttttaggtcaagggcttactatttctgggtcttttgctactaagttcacattagaattagtgccagaattttaggaacttcagagatcgtgtattgagatttcttaaataatgcttcagatattattgctttattgcttttttgtattggttaaaactgtacatttaaaattgctatgttactattttctacaattaatagtttgtctattttaaaataaattagttgttaagagtc

SEQ ID NO: 29072 - DNA, 1439 bp, Homo Sapiens
ggctcgcctcggcgtgcagtgcgcgtgcgtggagctgggagctaggtcctcggagtgggccggagatggcggcggccgacggggctttgccggaggcggcggctttagagcaacccgcggagctgcctgcctcggtgcgggcgagtatcgagcggaagcggcagcgggcactgatgctgcgccaggcccggctggctgcccggccctactcggcgacggcggctgcggctactggaggcatggctaatgtaaaagcagccccaaagataattgacacaggaggaggcttcattttagaagaggaagaagaagaagaacagaaaattggaaaagttgttcatcaaccaggacctgttatggaatttgattatgtaatatgcgaagaatgtgggaaagaatttatggattcttatcttatgaaccactttgatttgccaacttgtgataactgcagagatgctgatgataaacacaagcttataaccaaaacagaggcaaaacaagaatatcttctgaaagactgtgatttagaaaaaagagagccacctcttaaatttattgtgaagaagaatccacatcattcacaatggggtgatatgaaactctacttaaagttacagattgtgaagaggtctcttgaagtttggggtagtcaagaagcattagaagaagcaaaggaagtccgacaggaaaaccgagaaaaaatgaaacagaagaaatttgataaaaaagtaaaagaattgcggcgagcagtaagaagcagcgtgtggaaaagggagacgattgttcatcaacatgagtatggaccagaagaaaacctagaagatgacatgtaccgtaagacttgtactatgtgtggccatgaactgacatatgaaaaaatgtgattttttagttcagtgacctgttttatagaattttatatttaaataaaggaaatttagattggtccttttcaaaattcaaaaaaaaaagcaacatcttcatagatgaatgaaacccttgtataagtaatacttcagtaataattatgtatgttatggcttaaaagcaagtttcagtgaaggtcacctggcctggttgtgtgcacaatgtcatgtctgtgattgccttcttacaacagagatgggagctgagtgctagagtaggtgcagaagtggtaggtcagctacaaatttgaggacaagataccaaggcaaaccctagattggggtagagggaaaagggttcaacaaaggctgaactggattcttaaccaagaaacaaataatagcaatggtggtgcaccactgtaccccaggttctagtcatgtgttttttaggacgatttctgtctccacgatggtggaaacagtggggaactactgctggaaaaagccctaatagcagaaataaacattgagttgtacgagtctgaaaaaaaaaaaaaaaaaaaaaaa

SEQ ID NO: 29073 - DNA, 1803 bp, Homo Sapiens
acccaaaagtgggtgaaaggtcggcggcgccggcactgcagctggggctgagaagccaggacggcccgagaactgacagacggagtgacagacggactgaccatggccgaccagccaaaacccatcagcccgctcaagaacctgctggccggcggctttggcggcgtgtgcctggtgttcgtcggtcaccctctggacacggtcaaggtccgactgcagacacagccaccgagtttgcctggacaacctcccatgtactctgggacctttgactgtttccggaagactctttttagagagggcatcacggggctatatcggggaatggctgcccctatcatcggggtcactcccatgtttgccgtgtgcttctttgggtttggtttggggaagaaactacaacagaaacacccagaagatgtgctcagctatccccagctttttgcagctgggatgttatctggcgtattcaccacaggaatcatgactcctggagaacggatcaagtgcttattacagattcaggcttcttcaggagaaagcaagtacactggtaccttggactgtgcaaagaagctgtaccaggagtttgggatccgaggcatctacaaagggactgtgcttacccttatgcgagatgtcccagctagtggaatgtatttcatgacatatgaatggctgaaaaatatcttcactccggagggaaagagggtcagtgagctcagtgcccctcggatcttggtggctgggggcattgcagggatcttcaactgggctgtggcaatccccccagatgtgctcaagtctcgattccagactgcacctcctgggaaatatcctaatggtttcagagatgtgctgagggagctgatccgggatgaaggagtcacatccttgtacaaagggttcaatgcagtgatgatccgagccttcccagccaatgcggcctgtttccttggctttgaagttgccatgaagttccttaattgggccacccccaacttgtgaggctgaaggctgctcaagttcacttctggatgctggaagctgtcgttgaggagaaggagtagtaagcagaactaagcagtcttggagggcaaggggaggggaatggtgagatccgagccctgtgcatggacttggtgagactgttgccttaatgacatcctgcaccgtgtataacttagtgtgtcattttgaaacttgaattcattcttatcaatttaagggatcttaaaaggatttggaaatggaacaagtagcttccagaccagatactacctgtggcaagaatgctgcctaccagttaactgctggtcctaccacagtcaaagtattcctcattaaagagagaatctcaggttctcactggaggcactgtgcatattttcaaccagatcaccaggagctgagatcttcttcagtccctagccaggaatacccatttgatttccagggtgccatctaatcctgggctgtacatgtggatatggacttgaggcccacctctgtgtccaagtggattgagcatatatgcctaggaggagatagactgttaatcgttggattttgattttttttttttatgcctgcaaataatcaaaagtaaaactggagtagcctaattttctgggagcaggtggagaactttccctcctacacagtgaggacagtcccagtctgctgggataagtgagaaagcccagggtgtaggaaggccctttttacatactcttttctcatgagagctcactattttaacaataaacaataaacgttgtttctaaaaaaaaaaaaaaaaaa

SEQ ID NO: 29074 - DNA, 6217 bp, Homo Sapiens
cgcagactgtgctggagctggtgctgaaaaagggggtttgcagaggctgccctggggctggtgctgaaagaagagcccacagctgacttcatggtgctacaataacctcagaatctacttttcactctcaggagaacccacagtctaatatttagacatgatggcaaactgggcggaagcaagacctctcctcattcttattgttttattagggcaatttgtctcaataaaagcccaggaagaagacgaggatgaaggatatggtgaagaaatagcctgcactcagaatggccagatgtacttaaacagggacatttggaaacctgccccttgtcagatctgtgtctgtgacaatggagccattctctgtgacaagatagaatgccaggatgtgctggactgtgccgaccctgtaacgccccctggggaatgctgtcctgtctgttcacaaacacctggaggtggcaatacaaattttggtagaggaagaaagggacaaaagggagaaccaggattagtgcctgttgtaacaggcatacgtggtcgtccaggaccggcaggacctccaggatcacagggaccaagaggagagcgagggccaaaaggaagacctggccctcgtggacctcagggaattgatggagaaccaggtgttcctggtcaacctggtgctccaggacctcctggacatccgtcccacccaggacccgatggcttgagcaggccgttttcagctcaaatggctgggttggatgaaaaatctggacttgggagtcaagtaggactaatgcctggctctgtgggtcctgttggcccaaggggaccacagggtttacaaggacagcaaggtggtgcaggacctacaggacctcctggtgaacctggtgatcctggaccaatgggtccgattggttcacgtggaccagagggccctcctggtaaacctggggaagatggtgaacctggcagaaatggaaatcctggtgaagtgggatttgcaggatctccgggagctcgtggatttcctggggctcctggtcttccaggtctgaagggtcaccgaggacacaaaggtcttgaaggccctaaaggtgaagttggagcacctggttccaagggtgaagctggccccactggtccaatgggtgccatgggtcctctgggtccgaggggaatgccaggagagagagggagacttgggccacagggtgctcctggacaacgaggtgcacatggtatgcctggaaaacctggaccaatgggtcctcttgggataccaggctcttctggttttccaggaaatcctggaatgaagggagaagcaggtcctacaggggcgcgaggccctgaaggtcctcaggggcagagaggtgaaactgggcccccaggtccagttggctctccaggtcttcctggtgcaataggaactgatggtactcctggtcccaaaggcccaacgggctctccgggtacctctggtcctcctggctcagcagggcctcctggatctccaggacctcagggtagcactggtcctcaggggaattcgggccttccgggtgatccaggtttcaaaggagaagctggcccaaaaggggaaccagggccacatggtattcagggtccgataggcccacccggtgaagaaggcaaaagaggtcccagaggtgacccaggaacacttggtcctccagggccagtgggagaaaggggtgctcctggcaatcgtggttttccaggctctgatggtttacctgggccaaagggtgctcaaggagaacggggtcctgtaggttcttcaggacccaaaggaagccagggggatccaggacgtccaggggaacctgggcttccaggtgctcggggtttgacaggaaatcctggtgttcaaggtcctgaaggaaaacttggacctttgggtgcgccaggggaagatggccgtccaggtcctccaggctccataggaatcaaagggcagcccgggaccatgggccttccaggccccaaaggtagcaatggtgaccctgggaaacctggagaagcaggaaatcctggagttcctgggcaaaggggagctcctggaaaagatggtaaagttggtccttatggtcctcctgggccgccgggtctacgtggtgaaagaggagaacaaggacctccagggcccacaggttttcaggggcatcctggtcctccaggtcctcctggagaaggtggaaaaccaggtgatcaaggtgttcctggaggtcccggagcagttggcccgttaggacctagaggagaacgaggaaatcctggggaaagaggagaacctgggataactggactccctggtgagaagggaatggctggaggacatggtcctgatggcccaaaaggcagtccaggtccatctgggacccctggagatacaggcccaccaggtcttcaaggtatgccgggagaaagaggaattgcaggaactcctggccccaagggtgacagaggtggcataggagaaaaaggtgctgaaggcacagctggaaatgatggtgcaggaggtcttccaggtcctttgggccctccaggtccggcaggcctactgggagaaaagggtgaacctggtcctcgaggtttagttggtcctcctggctcccggggcaatcctggttctcgaggtgaaaatgggccaactggagctgttggttttgccggaccccaggggtctgacggacagcctggagtaaaaggtgaacctggagagccaggacagaagggagatgctggttctcctggaccacaaggtttagcaggatcccctggccctcatggtcctaatggtgttcctggactaaaaggtggtcgaggaacccaaggtccgcctggtgctacaggatttcctggttctgcgggcagagttggacctccaggccctgctggagctccaggacctgcgggacccctaggggaacccgggaaggagggacctccaggtcctcgtggggaccctggctctcatgggcgtgtgggagtccgaggaccagctggcccccctggtggcccaggagacaaaggggacccaggagaagatgggcaacctggtccagatggcccccctggtccagctggaacgaccgggcagagaggaattgttggcatgcctgggcaacgtggagagagaggcatgcccggcctaccaggcccagcgggaacaccaggaaaagtaggaccaactggtgcaacaggagataaaggtccacctggacctgtggggcccccaggctccaatggtcctgtaggggaacctggaccagaaggtccagctggcaatgatggtaccccaggacgggatggtgctgttggagaacgtggtgatcgtggagaccctgggcctgcaggtctgccaggctctcagggtgcccctggaactcctggccctgtgggtgctccaggagatgcaggacaaagaggagatccgggttctcggggtcctataggacacctgggtcgagctggaaaacgtggattacctggaccccaaggacctcgtggtgacaaaggtgatcatggagaccgaggcgacagaggtcagaagggccacagaggctttactggtcttcagggtcttcctggccctcctggtccaaatggtgaacaaggaagtgctggaatccctggaccatttggcccaagaggtcctccaggcccagttggtccttcaggtaaagaaggaaaccctgggccacttgggccattgggacctccaggtgtacgaggcagtgtaggagaagcaggacctgagggccctcctggtgagcctggcccacctggccctccgggtccccctggccaccttacagctgctcttggggatatcatggggcactatgatgaaagcatgccagatccacttcctgagtttactgaagatcaggcggctcctgatgacaaaaacaaaacggacccaggggttcatgctaccctgaagtcactcagtagtcagattgaaaccatgcgcagccccgatggctcgaaaaagcacccagcccgcacgtgtgatgacctaaagctttgccattccgcaaagcagagtggtgaatactggattgatcctaaccaaggatctgttgaagatgccatcaaagtttactgcaacatggaaacaggagaaacatgtatttcagcaaacccatccagtgtaccacgtaaaacctggtgggccagtaaatctcctgacaataaacctgtttggtatggtcttgatatgaacagagggtctcagttcgcttatggagaccaccaatcacctaatacagccattactcagatgacttttttgcgccttttatcaaaagaagcctcccagaacatcacttacatctgtaaaaacagtgtaggatacatggacgatcaagctaagaacctcaaaaaagctgtggttctcaaaggggcaaatgacttagatatcaaagcagagggaaatattagattccggtatatcgttcttcaagacacttgctctaagcggaatggaaatgtgggcaagactgtctttgaatatagaacacagaatgtggcacgcttgcccatcatagatcttgctcctgtggatgttggcggcacagaccaggaattcggcgttgaaattgggccagtttgttttgtgtaaagtaagccaagacacatcgacaatgagcaccaccatcaatgaccaccgccattcacaagaactttgactgtttgaagttgatcctgagactcttgaagtaatggctgatcctgcatcagcattgtatatatggtcttaagtgcctggcctccttatccttcagaatatttattttacttacaatcctcaagttttaattgattttaaatatttttcaatacaacagtttaggtttaagatgaccaatgacaatgaccacctttgcagaaagtaaactgattgaataaataaatctccgttttcttcaatttatttcagtgtaatgaaaaagttgcttagtatttatgaggaaattcttcttcctggcaggtagcttaaagagtggggtatatagagccacaacacatgtttattttgcttggctgcagttgaaaaatagaaattagtgcccttttgtgacctctcattccaagattgtcaattaaaaatgagtttaaaatgtttaacttgtgatcgagacctacatgcatgtcttgatattgtgtaactataatagagactctttaaggagaatcttaaaaaaaaaaaacgtttctcactgtcttaaatagaatttttaaatagtatatattcagtggcattttggagaacaaagtgaatttacttcgacttcttaaatttttgtaaaagactataagtttagacatctttctcattcaaatttaaagatatctttctcctcttgatcaatctatcaatattgatagaagtcacactagtatataccatttaatacatttacactttcttatttaagaagatattgaatgcaaaataattgacatatagaactttacaaacatatgtccaaggactctaaattgagactcttccacatgtacaatctcatcatcctgaagcctataatgaagaaaaagatctagaaactgagttgtggagctgactctaatcaaatgtgatgattggaattagaccatttggcctttgaactttcataggaaaaatgacccaacatttcttagcatgagctacctcatctctagaagctgggatggacttactattcttgtttatattttagatactgaaaggtgctatgcttctgttattattccaagactggagataggcagggctaaaaaggtattattatttttcctttaatgatggtgctaaaattcttcctataaaattccttaaaaataaagatggtttaatcactaccattgtgaaaacataactgttagacttcccgtttctgaaagaaagagcatcgttccaatgcttgttcactgttcctctgtcatactgtatctggaatgctttgtaatacttgcatgcttcttagaccagaacatgtaggtccccttgtgtctcaatactttttttttcttaattgcatttgttggctctattttaatttttttcttttaaaataaacagctgggaccatcccaaaagacaagccatgcatacaactttggtcatgtatctctgcaaagcatcaaattaaatgcacgcttttgtcatgtcaaaaaaaaaaaaaaa

SEQ ID NO: 29075 - DNA, 5991 bp, Homo Sapiens
gcgggcgaccacccggcgcaggagcggccgcgtttcggcctcagaatccattgaagacttgaacaagtgggccctatttcttgtgtctccttttatacttgaagcagaacacatagcatttgtgacggagagcatttgggtacaaagtgagaatttacagagatcatcctcttcagaaacagttcggtttttgcccactagggatgatgtggtttctcatgaggttacttgctctaaaggactttatattttggaaccataagagcacccttgtggcccaggcactttatggatgatcccttttagtgctcccagtaaccttccaagattgtcaagtggtcagactgttgtttgccattagcttgcagacctggggatccttatcggctaattgctgaagcaagtgtggacaacttcagcaagctgggggtggcgttcatggaagatagactccacatggataatggactggtaccccaaaagattgtgtcggtgcacttgcaggactccactctgaaggaagttaaggatcaggtctcaaacaagcaagcccagatcctagagccgaagcctgaaccttctcttgagattaagcctgagcaggacggtatggagcatgttggcagagatgacccaaaggctcttggtgaagaacccaaacaaaggagaggcagtgcctctgggagtgagcctgctggggacagtgacaggggagggggccccgttgagcattatcacctccatctgtctagttgccacgagtgtctggaacttgagaacagcaccattgagtcagtcaagtttgcgtctgccgagaacattccagaccttccctacgattatagcagcagtttggagagtgttgctgatgagacctcccccgaaagagaagggaggagagtcaacctcacgggaaaggcacccaacatcctcctctatgtgggctccgactcccaggaagccctcggccggttccacgaggtccggtctgtgctggccgactgtgtggacattgacagttatattctctaccacctgctggaggacagtgctctcagagacccgtggacggacaactgtctgctgttggtcattgctaccagggagtccattcccgaagacctgtaccagaagttcatggcctatctttctcagggagggaaggtgttgggcctgtcttcatccttcacctttggtggctttcaggtgacaagcaagggtgcactgcacaagacagtccagaacttggttttctccaaggctgaccagagcgaggtgaagctcagcgtcttgagcagtggctgcaggtaccaggaaggccccgtccggctcagccccggcaggctccagggccacctggagaatgaggacaaggacaggatgattgtgcatgtgccttttggaactcgcgggggagaagctgttctttgccaggtgcacttagaactacctcccagctccaacatagtgcaaactccagaagattttaacttgctcaagtcaagcaattttagaagatacgaagtccttagagagattctgacaacccttggcctcagctgtgacatgaaacaagttcctgccttaactcctctttacttgctgtcagctgcggaggaaatcagggatcctcttatgcagtggcttgggaaacatgtggactccgagggagaaataaaatccggccagctctctcttagatttgtttcatcctacgtgtctgaagtagaaataaccccatcttgtatacctgtggtgaccaacatggaggccttctcatcagaacatttcaacttagagatctatcgccaaaatctgcagaccaagcagttggggaaagtaattttgtttgccgaagtgacccccacaacgatgcgtctcctggatgggctgatgtttcagacaccgcaggaaatgggcttaatagtgatcgcggcccggcagaccgagggcaaaggacggggagggaatgtgtggctgagccctgtgggatgtgctctttctactctgctcatctccattccactgagatcccagctgggacagaggatcccgtttgtccagcatctgatgtccgtggctgtcgtggaagcagtgaggtccattcccgagtatcaggatatcaacttacgagtgaagtggcccaacgatatttattacagtgacctcatgaagatcggcggagttctggttaactcaacactcatgggagaaacattttatatacttattggctgtggatttaatgtgactaacagtaaccctaccatctgcatcaacgacctcatcacagaatacaataaacaacacaaggcagaactgaagcccttaagagccgattatctcatcgccagagtcgtgactgtgctggagaaactgatcaaagagtttcaggacaaagggcccaacagcgtccttcccctttattaccgatactgggtccacagtggtcagcaagtccatctgggcagcgcagagggaccaaaggtgtccatcgttggcctggacgattctggcttcctccaggttcaccaggagggcggcgaggttgtgactgtgcacccggacggcaactccttcgacatgctgagaaacctcatcctccccaaacggcggtaatgccgggcgtccccgagacgcggctgcctgtccgtgcccatgcatctggaaatctaatttagagttgtaggtgaattttcttttcctccaattcatttgttaagtctttgttctttttctgtgtttctgtttgtttttaggtttgttttgttgtcgttttctttggtgtttgaagaggctctgggatagatggttaagaagtagaaaatttagtttagggaaagccctcccacaggtgggaaattgctctcccctctgtggcttggacttacgtttattgtcaaggggagtttttacatggaaatgacaatgggaaaattcagatattttcttagtagtgcagacctttacccctagtctatgaaaaaacaaaccaaaatatgctcttgcgcccaggccagtggtgagttagaggtatgctatcactgtttgtaagcatctggggaggtactgaactgtaagaacatgcttggacacttagtcattgttctgtgtttttattaatgaagaaaagggaagacagacttccaagagttactgtccacccggtggtgtggccccatagcgaagtctaaatgcctgtagagatagagctagctggtgtggttgcagtgaccttgtagaggaaatcagttcattactttgacatcattcagtgagctctcctttcctaaggaagtttaaatgtccttagttagggactgactttcttaagtaagtttaaatttactacatattgtgaagagacaggatcaagttcagaatccttaaatgtctgattaggcatcacttggatgaggaggtgggcgatttggctctgacagctggagatgaaggcacactcataccacatacaagggaggatttggagcttttaagccagtttcagatttactctgaaatgtggagcattcctgcaagactgtgcagctcacggaatatagaagacatggcattttactcagaagtcataagtttttgcccccctcatttacctcgtattaccaagaaagaaaatgttatcgatactaaacaccatcagttcagagggaggatgtgtgtgtgtgcccgcatatgtgtgtgcgtgcgtgtgtgcgcacatagctttaaaagaagacattcaaaatttgatgtgctacaagcctcatgaaagaacaaaagaaatgaagccttttgatatgcattcgctattcccagatgtacgccatgccttttccatgtccctcctatctctgttgaacttatgaatcatactcattacttttcagctttttaaaaggccaatttttgtccagttttctctcttccagtcccagctgaaattagtggaaagaaagtttgatggagctttcagctttgaacaaaatcccttcattgtaaactagcaccatctttatccaggtcttacccagtcaggctaattccagaaacttgtggtttttagtatagtctgtctacctttagccaggcacaggacagccctatgaaaaaatacccaatatatattttttggaaatgaaacattaaaagaacttaaaaagtaatttttggaaatgaggcttcaattagaattatttttctcaaaaaacaaacaaacaaaaaacacaaaaaaaaccactcttctccaaatgcccaagccttctttcaaaattagttagaaacttaagtaaaatacaagtccacaccatccccaaattacaaaatggacttacccttgagagggcatctgcagaatatcatcagggacaaagatctcgaggctaacgatgtaggtttcatttctcagactttgtaatataaggcaagccctctctcagagctgccatcatcactttttgaatttctttgggggttatttaatgaaaaacatgctatgttttgttttaagctgaagtcctattctggacactctgctttgggaaaaaatgttatcatttaatttcctttctgcaaattaaaactaatgaagtgtggccttgtcaaaggctatggagatgttccgggcatactgctgtgctctgtgctttccagcaggcgctcctccctcacgcaggagactcagttgtcctgagagagatgaagcagccttgaagcagatgctgcgttttccataaacctgattttgcctcacatgaaccaaagactctcaaaactccgcttctatagaattagctgaataaaggcattttactgatagctgttcgtgttagcgaaacctgtctacctgctatagcacactctccgatttgggccatttatgcaccccgcaacctgggatctcaaggagctttaaagtcttaatgggaacttggcattttcctgatgatctttaaaatgtggtcactaaactcaggattggcgtgtgcttttagaacactggagtagcccttgttttagaggctgtgcattgagtatcgaccgtattttgtaaaaggcaagatatcctcccttccaggctggtaacgggtttcaaggggactcttgaggaagtgccccctaaaatagaacacagcaataactgggcttcctgtccccacccccaccccagcagtgctctctggcactgggaactctgctagggagtggtggaagtaggaaggatttgtgtgcaaaggaaaatcgtggttgagtttcactgcagcaggctgacgttgcctgatgtgagagcaagtggccgactggggtgcgggtgcacaggtcgggggagcacaggccacagagcgcagcctctgggggtcccccaaggcacagcatatacagcatggtcgccccttgccctggagtctgggaacaaagagaggagccagcctccccgcactgcttcagatggaaaagggaggcagggtgggcttccgttctccagatctgtttgctcttaacaggcagaacatgggagaatccttattcctggttaatcactatgcatatttgaaataaaagaaagcgtaagcctctgcaattttaacttctcaaaggatgtctctgaaaagaatcactttaaaccaatgcctataaaaagcaagtctaccaaaataaactaagactttctatgtggtttgggctccctcttatttttacaagtttcatttttaaaagtaggcaactactttgggttacagtatttttattcatatttaaacatttttacaaaataaataaagtgttttacatagtaaggaatatgtacgtatttccaagtattaagaagccaagtgtttttttttttgacgtattattgacaaatgtattcagcgccatacacaagagaaatattattactccaaagaacgaaagttaacaaaactccaaagcaaaaacccttttaatggaggtgagaaataaatttaatgtaacaacaaaaaaaaaaaaaaa

SEQ ID NO: 29076 - DNA, 1964 bp, Homo Sapiens
atagcaagggatggtttaacaaaatgaaggcactcattgcagcactgcttttgatcacattgcagtattcgtgtgccgtgagtcccactgactgcagtgctgttgagccggaggctgagaaagctctagacctgatcaataaaaggcgacgggatggctaccttttccaattgctgcggattgctgatgcccacttggacagagtggaaaatacaactgtatattacttagtcttagatgtgcaagaatcggactgttcggtcctatccaggaaatactggaatgactgtgagccacctgattccagacgtccatctgaaatagtgatcggacaatgtaaggtaatagctacaagacattcccatgaatctcaggacctcagagtgattgactttaactgcaccacaagttctgtctcttcagcactggccaataccaaagatagtccggtcctcatagatttctttgaggatactgagcgctacagaaaacaagccaacaaagcccttgagaagtacaaagaggagaatgatgactttgcctctttcagagtggaccgaatcgagagagttgcaagagtgagaggaggggaaggaactggttacttcgtggacttctctgtgcggaactgccccagacaccatttccccagacaccccaatgtctttggattctgcagagcagatttgttctatgatgtagaagccttggacttggaaagcccgaaaaaccttgtcataaactgtgaagtcttcgaccctcaggaacatgagaacatcaatggtgtaccgcctcatttgggacatcccttccactggggtgggcatgagcgttcttctaccaccaagcctccattcaagccccatggatctagagatcatcatcatccccacaagccacacgaacatggacccccacctcctccagatgaaagagatcactcacatggacccccacttccacaaggccctcctccactattgcccatgtcctgctcaagttgtcaacatgccacttttggcacaaatggggcccaaagacattctcataataataattccagtgacctccatccccataagcatcattcccatgaacagcatccccacggacaccatccccatgcacaccatcctcatgaacatgatacccatagacagcatccccatggacaccacccccatggacaccatcctcatggacaccacccccatggacaccatccccatggacaccatccccactgccatgatttccaagactatggaccttgtgacccaccaccccataaccaaggtcactgttgccatggccacggcccaccacctgggcacttaagaaggcgaggcccaggtaaaggaccccgtcccttccattgcagacaaattggatctgtgtaccgactccctcctctaagaaaaggtgaggtgctgccacttcctgaggccaattttcccagcttcccattgccgcaccacaaacatcctctaaagccagacaatcagccctttcctcaatcagtctctgaatcatgtccagggaagttcaagagtgggtttccacaagtttccatgttttttacacatacatttccaaaataaaatgtgattcctttgaagaggaaaatgaataatacattgaattagaaacataaataaaatgaccagtaattgtgaaaattacagttcttttcaacctactttcatactgaagatgcagcaaaatgtgaatgggaaaagagatggcctgagaagagagatcaaatggaaaggagaggaaagaactcagtgctgcctattagtagttaattctgtcactcaccactacatcacttgagacaaatctatgccactcagaatctccttctttcctggacttaactctaattctagagtctctgttactgcttgggctatacctgggcatactaataaagtatggtattgaaactaaaaaaaaaaaaa

SEQ ID NO: 29077 - DNA, 3597 bp, Homo Sapiens
ggcgaatggagcaggggcgcgcagataattaaagatttacacacagctggaagaaatcatagagaagccgggcgtggtggctcatgcctataatcccagcacttttggaggctgaggcgggcagatcacttgagatcaggagttcgagaccagcctggtgccttggcatctcccaatggggtggctttgctctgggctcctgttccctgtgagctgcctggtcctgctgcaggtggcaagctctgggaacatgaaggtcttgcaggagcccacctgcgtctccgactacatgagcatctctacttgcgagtggaagatgaatggtcccaccaattgcagcaccgagctccgcctgttgtaccagctggtttttctgctctccgaagcccacacgtgtatccctgagaacaacggaggcgcggggtgcgtgtgccacctgctcatggatgacgtggtcagtgcggataactatacactggacctgtgggctgggcagcagctgctgtggaagggctccttcaagcccagcgagcatgtgaaacccagggccccaggaaacctgacagttcacaccaatgtctccgacactctgctgctgacctggagcaacccgtatccccctgacaattacctgtataatcatctcacctatgcagtcaacatttggagtgaaaacgacccggcagatttcagaatctataacgtgacctacctagaaccctccctccgcatcgcagccagcaccctgaagtctgggatttcctacagggcacgggtgagggcctgggctcagtgctataacaccacctggagtgagtggagccccagcaccaagtggcacaactcctacagggagcccttcgagcagcacctcctgctgggcgtcagcgtttcctgcattgtcatcctggccgtctgcctgttgtgctatgtcagcatcaccaagattaagaaagaatggtgggatcagattcccaacccagcccgcagccgcctcgtggctataataatccaggatgctcaggggtcacagtgggagaagcggtcccgaggccaggaaccagccaagtgcccacactggaagaattgtcttaccaagctcttgccctgttttctggagcacaacatgaaaagggatgaagatcctcacaaggctgccaaagagatgcctttccagggctctggaaaatcagcatggtgcccagtggagatcagcaagacagtcctctggccagagagcatcagcgtggtgcgatgtgtggagttgtttgaggccccggtggagtgtgaggaggaggaggaggtagaggaagaaaaagggagcttctgtgcatcgcctgagagcagcagggatgacttccaggagggaagggagggcattgtggcccggctaacagagagcctgttcctggacctgctcggagaggagaatgggggcttttgccagcaggacatgggggagtcatgccttcttccaccttcgggaagtacgagtgctcacatgccctgggatgagttcccaagtgcagggcccaaggaggcacctccctggggcaaggagcagcctctccacctggagccaagtcctcctgccagcccgacccagagtccagacaacctgacttgcacagagacgcccctcgtcatcgcaggcaaccctgcttaccgcagcttcagcaactccctgagccagtcaccgtgtcccagagagctgggtccagacccactgctggccagacacctggaggaagtagaacccgagatgccctgtgtcccccagctctctgagccaaccactgtgccccaacctgagccagaaacctgggagcagatcctccgccgaaatgtcctccagcatggggcagctgcagcccccgtctcggcccccaccagtggctatcaggagtttgtacatgcggtggagcagggtggcacccaggccagtgcggtggtgggcttgggtcccccaggagaggctggttacaaggccttctcaagcctgcttgccagcagtgctgtgtccccagagaaatgtgggtttggggctagcagtggggaagaggggtataagcctttccaagacctcattcctggctgccctggggaccctgccccagtccctgtccccttgttcacctttggactggacagggagccacctcgcagtccgcagagctcacatctcccaagcagctccccagagcacctgggtctggagccgggggaaaaggtagaggacatgccaaagcccccacttccccaggagcaggccacagacccccttgtggacagcctgggcagtggcattgtctactcagcccttacctgccacctgtgcggccacctgaaacagtgtcatggccaggaggatggtggccagacccctgtcatggccagtccttgctgtggctgctgctgtggagacaggtcctcgccccctacaacccccctgagggccccagacccctctccaggtggggttccactggaggccagtctgtgtccggcctccctggcaccctcgggcatctcagagaagagtaaatcctcatcatccttccatcctgcccctggcaatgctcagagctcaagccagacccccaaaatcgtgaactttgtctccgtgggacccacatacatgagggtctcttaggtgcatgtcctcttgttgctgagtctgcagatgaggactagggcttatccatgcctgggaaatgccacctcctggaaggcagccaggctggcagatttccaaaagacttgaagaaccatggtatgaaggtgattggccccactgacgttggcctaacactgggctgcagagactggaccccgcccagcattgggctgggctcgccacatcccatgagagtagagggcactgggtcgccgtgccccacggcaggcccctgcaggaaaactgaggcccttgggcacctcgacttgtgaacgagttgttggctgctccctccacagcttctgcagcagactgtccctgttgtaactgcccaaggcatgttttgcccaccagatcatggcccacgtggaggcccacctgcctctgtctcactgaactagaagccgagcctagaaactaacacagccatcaagggaatgacttgggcggccttgggaaatcgatgagaaattgaacttcagggagggtggtcattgcctagaggtgctcattcatttaacagagcttccttaggttgatgctggaggcagaatcccggctgtcaaggggtgttcagttaaggggagcaacagaggacatgaaaaattgctatgactaaagcagggacaatttgctgccaaacacccatgcccagctgtatggctgggggctcctcgtatgcatggaacccccagaataaatatgctcagccaccctgtgggccgggcaatccagacagcaggcataaggcaccagttaccctgcatgttggcccagacctcaggtgctagggaaggcgggaaccttgggttgagtaatgctcgtctgtgtgttttagtttcatcacctgttatctgtgtttgctgaggagagtggaacagaaggggtggagttttgtataaataaagtttctttgtctc

SEQ ID NO: 29078 - DNA, 9649 bp, Homo Sapiens
cagcgactcctctggctcccgagaagtggatccggtcgcggccactacgatgccgggagccgccggggtcctcctccttctgctgctctccggaggcctcgggggcgtacaggcgcagcggccgcagcagcagcggcagtcacaggcacatcagcaaagaggtttattccctgctgtcctgaatcttgcttctaatgctcttatcacgaccaatgcaacatgtggagaaaaaggacctgaaatgtactgcaaattggtagaacatgtccctgggcagcctgtgaggaacccgcagtgtcgaatctgcaatcaaaacagcagcaatccaaaccagagacacccgattacaaatgctattgatggaaagaacacttggtggcagagtcccagtattaagaatggaatcgaataccattatgtgacaattacactggatttacagcaggtgttccagatcgcgtatgtgattgtgaaggcagctaactccccccggcctggaaactggattttggaacgctctcttgatgatgttgaatacaagccctggcagtatcatgctgtgacagacacggagtgcctaacgctttacaatatttatccccgcactgggccaccgtcatatgccaaagatgatgaggtcatctgcacttcattttactccaagatacaccccttagaaaatggagagattcacatctctttaatcaatgggagaccaagtgccgatgatccttctccagaactgctagaatttacctccgctcgctatattcgcctgagatttcagaggatccgcacactgaatgctgacttgatgatgtttgctcacaaagacccaagagaaattgaccccattgtcaccagaagatattactactcggtcaaggatatttcagttggagggatgtgcatctgctatggtcatgccagggcttgtccacttgatccagcgacaaataaatctcgctgtgagtgtgagcataacacatgtggcgatagctgtgatcagtgctgtccaggattccatcagaaaccctggagagctggaacttttctaactaaaactgaatgtgaagcatgcaattgtcatggaaaagctgaagaatgctattatgatgaaaatgttgccagaagaaatctgagtttgaatatacgtggaaagtacattggagggggtgtctgcattaattgtacccaaaacactgctggtataaactgcgagacatgtacagatggcttcttcagacccaaaggggtatctccaaattatccaaggccatgccagccatgtcattgcgatccaattggttccttaaatgaagtctgtgtcaaggatgagaaacatgctcgacgaggtttggcacctggatcctgtcattgcaaaactggttttggaggtgtgagctgtgatcggtgtgccaggggctacactggctacccggactgcaaagcctgtaactgcagtgggttagggagcaaaaatgaggatccttgttttggcccctgtatctgcaaggaaaatgttgaaggaggagactgtagtcgttgcaaatccggcttcttcaatttgcaagaggataattggaaaggctgcgatgagtgtttctgttcaggggtttcaaacagatgtcagagttcctactggacctatggcaaaatacaagatatgagtggctggtatctgactgaccttcctggccgcattcgagtggctccccagcaggacgacttggactcacctcagcagatcagcatcagtaacgcggaggcccggcaagccctgccgcacagctactactggagcgcgccggctccctatctgggaaacaaactcccagcagtaggaggacagttgacatttaccatatcatatgaccttgaagaagaggaagaagatacagaacgtgttctccagcttatgattatcttagagggtaatgacttgagcatcagcacagcccaagatgaggtgtacctgcacccatctgaagaacatactaatgtattgttacttaaagaagaatcatttaccatacatggcacacattttccagtccgtagaaaggaatttatgacagtgcttgcgaatttgaagagagtcctcctacaaatcacatacagctttgggatggatgccatcttcaggttgagctctgttaaccttgaatccgctgtctcctatcctactgatggaagcattgcagcagctgtagaagtgtgtcagtgcccaccagggtatactggctcctcttgtgaatcttgttggcctaggcacaggcgagttaacggcactatttttggtggcatctgtgagccatgtcagtgctttggtcatgcggagtcctgtgatgacgtcactggagaatgcctgaactgtaaggatcacacaggtggcccatattgtgataaatgtcttcctggtttctatggcgagcctactaaaggaacctctgaagactgtcaaccctgtgcctgtccactcaatatcccatccaataactttagcccaacgtgccatttagaccggagtcttggattgatctgtgatggatgccctgtcgggtacacaggaccacgctgtgagaggtgtgcagaaggctattttggacaaccctctgtacctggaggatcatgtcagccatgccaatgcaatgacaaccttgacttctccatccctggcagctgtgacagcttgtctggctcctgtctgatatgtaaaccaggtacaacaggccggtactgtgagctctgtgctgatggatattttggagatgcagttgatgcgaagaactgtcagccctgtcgctgtaatgccggtggctctttctctgaggtttgccacagtcaaactggacagtgtgagtgcagagccaacgttcagggtcagagatgtgacaaatgcaaggctgggacctttggcctacaatcagcaaggggctgtgttccctgcaactgcaattcttttgggtctaagtcattcgactgtgaagagagtggacaatgttggtgccaacctggagtcacagggaagaaatgtgaccgctgtgcccacggctatttcaacttccaagaaggaggctgcacagcttgtgaatgttctcatctgggtaataattgtgacccaaagactgggcgatgcatttgcccacccaataccattggagagaaatgttctaaatgtgcacccaatacctggggccacagcattaccactggttgtaaggcttgtaactgcagcacagtgggatccttggatttccaatgcaatgtaaatacaggccaatgcaactgtcatccaaaattctctggtgcaaaatgtacagagtgcagtcgaggtcactggaactaccctcgctgcaatctctgtgactgcttcctccctgggacagatgccacaacctgtgattcagagactaaaaaatgctcctgtagtgatcaaactgggcagtgcacttgtaaggtgaatgtggaaggcatccactgtgacagatgccggcctggcaaattcggactcgatgccaagaatccacttggctgcagcagctgctattgcttcggcactactacccagtgctctgaagcaaaaggactgatccggacgtgggtgactctgaaggctgagcagaccattctacccctggtagatgaggctctgcagcacacgaccaccaagggcattgtttttcaacatccagagattgttgcccacatggacctgatgagagaagatctccatttggaacctttttattggaaacttccagaacaatttgaaggaaagaagttgatggcctatgggggcaaactcaagtatgcaatctatttcgaggctcgggaagaaacaggtttctctacatataatcctcaagtgatcattcgaggtgggacacctactcatgctagaattatcgtcaggcatatggctgctcctctgattggccaattgacaaggcatgaaattgaaatgacagagaaagaatggaaatattatggggatgatcctcgagtccatagaactgtgacccgagaagacttcttggatatactatatgatattcattacattcttatcaaagctacttatggaaatttcatgcgacaaagcaggatttctgaaatctcaatggaggtagctgaacaaggacgtggaacaacaatgactcctccagctgacttgattgaaaaatgtgattgtcccctgggctattctggcctgtcctgtgaggcatgcttgccgggattttatcgactgcgttctcaaccaggtggccgcacccctggaccaaccctgggcacctgtgttccatgtcaatgtaatggacacagcagcctgtgtgaccctgaaacatcgatatgccagaattgtcaacatcacactgctggtgacttctgtgaacgatgtgctcttggatactatggaattgtcaagggattgccaaatgactgtcagcaatgtgcctgccctctgatttcttccagtaacaatttcagcccctcttgtgtcgcagaaggacttgacgactaccgctgcacggcttgtccacggggatatgaaggccagtactgtgaaaggtgtgcccctggctatactggcagtccaggcaaccctggaggctcctgccaagaatgtgagtgtgatccctatggctcactgcctgtgccctgtgaccctgtcacaggattctgcacgtgccgacctggagccacgggaaggaagtgtgacggctgcaagcactggcatgcacgcgagggctgggagtgtgttttttgtggagatgagtgcactggccttcttctcggtgacttggctcgcctggagcagatggtcatgagcatcaacctcactggtccgctgcctgcgccatataaaatgctgtatggtcttgaaaatatgactcaggagctaaagcacttgctgtcacctcagcgggccccagagaggcttattcagctggcagagggcaatctgaatacactcgtgaccgaaatgaacgagctgctgaccagggctaccaaagtgacagcagatggcgagcagaccggacaggatgctgagaggaccaacacaagagcaaagtccctgggagaattcattaaggagcttgcccgggatgcagaagctgtaaatgaaaaagctataaaactaaatgaaactctaggaactcgagacgaggcctttgagagaaatttggaagggcttcagaaagagattgaccagatgattaaagaactgaggaggaaaaatctagagacacaaaaggaaattgctgaagatgagttggtagctgcagaagcccttctgaaaaaagtgaagaagctgtttggagagtcccggggggaaaatgaagaaatggagaaggatctccgggaaaaactggctgactacaaaaacaaagttgatgatgcttgggaccttttgagagaagccacagataaaatcagagaagctaatcgcctatttgcagtaaatcagaaaaacatgactgcattggagaaaaagaaggaggctgttgagagcggcaaacgacaaattgagaacactttaaaagaaggcaatgacatactcgatgaagccaaccgtcttgcagatgaaatcaactccatcatagactatgttgaagacatccaaactaaattgccacctatgtctgaggagcttaatgataaaatagatgacctctcccaagaaataaaggacaggaagcttgctgagaaggtgtcccaggctgagagccacgcagctcagttgaatgactcatctgctgtccttgatggaatccttgatgaggctaaaaacatctccttcaatgccactgcagccttcaaagcttacagcaatattaaggactatattgatgaagctgagaaagttgccaaagaagccaaagatcttgcacatgaagctacaaaactggcaacaggtcctcggggtttattaaaggaagatgccaaaggctgtcttcagaaaagcttcaggattcttaacgaagccaagaagttagcaaatgatgtaaaagaaaatgaagaccatctaaatggcttaaaaaccaggatagaaaatgctgatgctagaaatggggatctcttgagaactttgaatgacactttgggaaagttatcagctattccaaatgatacagctgctaaactgcaagctgttaaggacaaagccagacaagccaacgacacagctaaagatgtactggcacagattacagagctccaccagaacctcgatggcctgaagaagaattacaataaactagcagacagcgtcgccaaaacgaatgctgtggttaaagatccttccaagaacaaaatcattgccgatgcagatgccactgtcaaaaatttagaacaggaagctgaccggctaatagataaactcaaacccatcaaggaacttgaggataacctaaagaaaaacatctctgagataaaggaattgataaaccaagctcggaaacaagccaattctatcaaagtatctgtgtcttcaggaggtgactgcattcgaacatacaaaccagaaatcaagaaaggaagttacaataatattgttgtcaacgtaaagacagctgttgctgataacctcctcttttatcttggaagtgccaaatttattgactttctggctatagaaatgcgtaaaggcaaagtcagcttcctctgggatgttggatctggagttggacgtgtagagtacccagatttgactattgatgactcatattggtaccgtatcgtagcatcaagaactgggagaaatggaactatttctgtgagagccctggatggacccaaagccagcattgtgcccagcacacaccattcgacgtctcctccagggtacacgattctagatgtggatgcaaatgcaatgctgtttgttggtggcctgactgggaaattaaagaaggctgatgctgtacgtgtgattacattcactggctgcatgggagaaacatactttgacaacaaacctataggtttgtggaatttccgagaaaaagaaggtgactgcaaaggatgcactgtcagtcctcaggtggaagatagtgaggggactattcaatttgatggagaaggttatgcattggtcagccgtcccattcgctggtaccccaacatctccactgtcatgttcaagttcagaacattttcttcgagtgctcttctgatgtatcttgccacacgagacctgagagatttcatgagtgtggagctcactgatgggcacataaaagtcagttacgatctgggctcaggaatggcttccgttgtcagcaatcaaaaccataatgatgggaaatggaaatcattcactctgtcaagaattcaaaaacaagccaatatatcaattgtagatatagatactaatcaggaggagaatatagcaacttcgtcttctggaaacaactttggtcttgacttgaaagcagatgacaaaatatattttggtggcctgccaacgctgagaaacttgagtatgaaagcaaggccagaagtaaatctgaagaaatattccggctgcctcaaagatattgaaatttcaagaactccgtacaatatactcagtagtcccgattatgttggtgttaccaaaggatgttccctggagaatgtttacacagttagctttcctaagcctggttttgtggagctctcccctgtgccaattgatgtaggaacagaaatcaacctgtcattcagcaccaagaatgagtccggcatcattcttttgggaagtggagggacaccagcaccacctaggagaaaacgaaggcagactggacaggcctattatgtaatactcctcaacaggggccgtctggaagtgcatctctccacaggggcacgaacaatgaggaaaattgtcatcagaccagagccgaatctgtttcatgatggaagagaacattccgttcatgtagagcgaactagaggcatctttacagttcaagtggatgaaaacagaagatacatgcaaaacctgacagttgaacagcctatcgaagttaaaaagcttttcgttgggggtgctccacctgaatttcaaccttccccactcagaaatattcctccttttgaaggctgcatatggaatcttgttattaactctgtccccatggactttgcaaggcctgtgtccttcaaaaatgctgacattggtcgctgtgcccatcagaaactccgtgaagatgaagatggagcagctccagctgaaatagttatccagcctgagccagttcccaccccagcctttcctacgcccaccccagttctgacacatggtccttgtgctgcagaatcagaaccagctcttttgatagggagcaagcagttcgggctttcaagaaacagtcacattgcaattgcatttgatgacaccaaagttaaaaaccgtctcacaattgagttggaagtaagaaccgaagctgaatccggcttgcttttttacatggctcgcatcaatcatgctgattttgcaacagttcagctgagaaatggattgccctacttcagctatgacttggggagtggggacacccacaccatgatccccaccaaaatcaatgatggccagtggcacaagattaagataatgagaagtaagcaagaaggaattctttatgtagatggggcttccaacagaaccatcagtcccaaaaaagccgacatcctggatgtcgtgggaatgctgtatgttggtgggttacccatcaactacactacccgaagaattggtccagtgacctatagcattgatggctgcgtcaggaatctccacatggcagaggcccctgccgatctggaacaacccacctccagcttccatgttgggacatgttttgcaaatgctcagaggggaacatattttgacggaaccggttttgccaaagcagttggtggattcaaagtgggattggaccttcttgtagaatttgaattccgcacaactacaacgactggagttcttctggggatcagtagtcaaaaaatggatggaatgggtattgaaatgattgatgaaaagttgatgtttcatgtggacaatggtgcgggcagattcactgctgtctatgatgctggggttccagggcatttgtgtgatggacaatggcataaagtcactgccaacaagatcaaacaccgcattgagctcacagtcgatgggaaccaggtggaagcccaaagcccaaacccagcatctacatcagctgacacaaatgaccctgtgtttgttggaggcttcccagatgacctcaagcagtttggcctaacaaccagtattccgttccgaggttgcatcagatccctgaagctcaccaaaggcacaggcaagccactggaggttaattttgccaaggccctggaactgaggggcgttcaacctgtatcatgcccagccaactaataaaaataagtgtaaccccaggaagagtctgtcaaaacaagtatatcaagtaaaacaaacaaatatattttacctatatatgttaattaaactaatttgtgcatgtacatagaattctttctgtattcagatggtgctaattcagactccagactgaattttaattcaagttctttctcaagtctataaatattaaactgattatttcattctaaaaaaaaaaaaaaaaaa

SEQ ID NO: 29079 - DNA, 5764 bp, Homo Sapiens
atctctatccttcttctggtccttcctagaaaatcaggtggagatgatagtggcttgcatgatggtggtagagctggaggtgcagggcaaaggtcagattctgaatatattttgaaagtaaaggcaacaagatttcctgacagattgattatggtgtgtcaaagaaagagaggaatgcaggatgattccagtgtttttgttgacaactataagtctggagctgccaactggatgcagaagttcactggagggcccagcctggggaaaggatcaggagcaggttaggcatgttaagcttgagatgtctgttaaacatccagataggaatgtcaaagatgcacttgtgtttaagagtcaggaatgcaagagggaattttaggctagaaacaaaaagttagaaattattcgatacagatggtatttaaagctgtgtgactgactgacatgacagaagtggcgagaatagactgagaagtccaaggaatgagccttggaccactccagtgttaggtaagtagttgaaaaaaagagagagagagaaggcatcaaaggagactgaggaagagtgatcaggaaagcataggaaaatccgagaaacatatggtgtcctggaatctatatgaaaaagatatattcagaaagacagagtgataaatctgtcaaattattgaatttgtcaggtaaaataagaacagagaattgatctttggacttagcaaagcagagattatcagtgacttttataaaaatagtttcggtagtgtggaaagatcaaacttctgtttagagtgggtttcagagagaacaacaggaattgaagaagtaataaactttgccaaccagtttagctccaaaggaaaagagggaaatatgatggtagctggcaggggaagtgtggtcaagagaggttttttgtttgtttttcaagatggaagaaataacagtatgtatgtaagctcacaggagggatccagcaggcatggggaaattgatgatataggacagaaagggaagaatggctccttgtgaaagtgaaaggggatgggatctacaggatgaacatgcaaacaaagactggctgcaaagagaggcatgaatagttcatttacagaaacagcaaaggcagagtgttggtacagatgctggtaagtggaaaaatatcatggtaggaggttatggagttccattctaaacacttcaacttcatcagtgaaataagcacggtaatttagcagaatgtgaagatgtaaaagaacagaatttgagaaaacagacgatatgaaataattattagaaaagcagagactgaagaaactgtcatctccttatgtgctaatgagtttaataatgtcctccagtcaccacaagccttctttcaaactacacaattccaactgcttccgtctcagagtatcttgaaataatgatctgaccgcctgttagaccagtgaagggaaggaatttgggttgatttaagaagagaatcctcatggtcatggtagactgatatggagagaaaacattttgaggaaaaatactcaactaaattcatttctactccagcatgcagtttcaagtcaagttccaccttagctccaggtggcaggcagagcaggatgcagaggcacagcacaagtaagggatccaatgactgagtcaagaattacataacctggccagacagctggtacatgggaaagtgctaagagggcaccaacagcgttcctcctccccaaggagcataatgtgatggttcctgccggccctggctgactctcgccgtccttggagataattgggttcagtgccacctggaccagaactggggatgcggaagcaacctgccagacacgcgcgaggttcgaggctgagatggatcttgaggcggcaaagaacggaacagcctggcgccccacgagcgcggagggcgactttgaactgggcatcagcagcaaacaaaaaaggaaaaaaacgaagacagtgaaaatgattggagtattaacattgtttcgatactccgattggcaggataaattgtttatgtcgctgggtaccatcatggccatagctcacggatcaggtctccccctcatgatgatagtatttggagagatgactgacaaatttgttgatactgcaggaaacttctcctttccagtgaacttttccttgtcgctgctaaatccaggcaaaattctggaagaagaaatgactagatatgcatattactactcaggattgggtgctggagttcttgttgctgcctatatacaagtttcattttggactttggcagctggtcgacagatcaggaaaattaggcagaagttttttcatgctattctacgacaggaaataggatggtttgacatcaatgacaccactgaactcaatacgcggctaacagatgacatctccaaaatcagtgaaggaattggtgacaaggttggaatgttctttcaagcagtagccacgttttttgcaggattcatagtgggattcatcagaggatggaagctcacccttgtgataatggccatcagccctattctaggactctctgcagccgtttgggcaaagatactctcggcatttagtgacaaagaactagctgcttatgcaaaagcaggcgccgtggcagaagaggctctgggggccatcaggactgtgatagctttcgggggccagaacaaagagctggaaaggtatcagaaacatttagaaaatgccaaagagattggaattaaaaaagctatttcagcaaacatttccatgggtattgccttcctgttaatatatgcatcatatgcactggccttctggtatggatccactctagtcatatcaaaagaatatactattggaaatgcaatgacagtttttttttcaatcctaattggagctttcagtgttggccaggctgccccatgtattgatgcttttgccaatgcaagaggagcagcatatgtgatctttgatattattgataataatcctaaaattgacagtttttcagagagaggacacaaaccagacagcatcaaagggaatttggagttcaatgatgttcacttttcttacccttctcgagctaacgtcaagatcttgaagggcctcaacctgaaggtgcagagtgggcagacggtggccctggttggaagtagtggctgtgggaagagcacaacggtccagctgatacagaggctctatgaccctgatgagggcacaattaacattgatgggcaggatattaggaactttaatgtaaactatctgagggaaatcattggtgtggtgagtcaggagccggtgctgttttccaccacaattgctgaaaatatttgttatggccgtggaaatgtaaccatggatgagataaagaaagctgtcaaagaggccaacgcctatgagtttatcatgaaattaccacagaaatttgacaccctggttggagagagaggggcccagctgagtggtgggcagaagcagaggatcgccattgcacgtgccctggttcgcaaccccaagatccttctgctggatgaggccacgtcagcattggacacagaaagtgaagctgaggtacaggcagctctggataaggccagagaaggccggaccaccattgtgatagcacaccgactgtctacggtccgaaatgcagatgtcatcgctgggtttgaggatggagtaattgtggagcaaggaagccacagcgaactgatgaagaaggaaggggtgtacttcaaacttgtcaacatgcagacatcaggaagccagatccagtcagaagaatttgaactaaatgatgaaaaggctgccactagaatggccccaaatggctggaaatctcgcctatttaggcattctactcagaaaaaccttaaaaattcacaaatgtgtcagaagagccttgatgtggaaaccgatggacttgaagcaaatgtgccaccagtgtcctttctgaaggtcctgaaactgaataaaacagaatggccctactttgtcgtgggaacagtatgtgccattgccaatggggggcttcagccggcattttcagtcatattctcagagatcatagcgatttttggaccaggcgatgatgcagtgaagcagcagaagtgcaacatattctctttgattttcttatttctgggaattatttctttttttactttcttccttcagggtttcacgtttgggaaagctggcgagatcctcaccagaagactgcggtcaatggcttttaaagcaatgctaagacaggacatgagctggtttgatgaccataaaaacagtactggtgcactttctacaagacttgccacagatgctgcccaagtccaaggagccacaggaaccaggttggctttaattgcacagaatatagctaaccttggaactggtattatcatatcatttatctacggttggcagttaaccctattgctattagcagttgttccaattattgctgtgtcaggaattgttgaaatgaaattgttggctggaaatgccaaaagagataaaaaagaactggaagctgctggaaagattgcaacagaggcaatagaaaatattaggacagttgtgtctttgacccaggaaagaaaatttgaatcaatgtatgttgaaaaattgtatggaccttacaggaattctgtgcagaaggcacacatctatggaattacttttagtatctcacaagcatttatgtatttttcctatgccggttgttttcgatttggtgcatatctcattgtgaatggacatatgcgcttcagagatgttattctggtgttttctgcaattgtatttggtgcagtggctctaggacatgccagttcatttgctccagactatgctaaagctaagctgtctgcagcccacttattcatgctgtttgaaagacaacctctgattgacagctacagtgaagaggggctgaagcctgataaatttgaaggaaatataacatttaatgaagtcgtgttcaactatcccacccgagcaaacgtgccagtgcttcaggggctgagcctggaggtgaagaaaggccagacactagccctggtgggcagcagtggctgtgggaagagcacggtggtccagctcctggagcggttctacgaccccttggcggggacagtgcttctcgatggtcaagaagcaaagaaactcaatgtccagtggctcagagctcaactcggaatcgtgtctcaggagcctatcctatttgactgcagcattgccgagaatattgcctatggagacaacagccgggttgtatcacaggatgaaattgtgagtgcagccaaagctgccaacatacatcctttcatcgagacgttaccccacaaatatgaaacaagagtgggagataaggggactcagctctcaggaggtcaaaaacagaggattgctattgcccgagccctcatcagacaacctcaaatcctcctgttggatgaagctacatcagctctggatactgaaagtgaaaaggttgtccaagaagccctggacaaagccagagaaggccgcacctgcattgtgattgctcaccgcctgtccaccatccagaatgcagacttaatagtggtgtttcagaatgggagagtcaaggagcatggcacgcatcagcagctgctggcacagaaaggcatctatttttcaatggtcagtgtccaggctgggacacagaacttatgaacttttgctacagtatattttaaaaataaattcaaattattctacccatttt

SEQ ID NO: 29080 - DNA, 3565 bp, Homo Sapiens
aaggtggctacgagttttccagatttaggagacttcagaaaggtggggcagatagaatggagatggcaaagatctctttgggcatatatgggcctggcgaagtaatggaataatttctaattttcggagaaggcaagtgccctcatgccgggatggcagaagatgagcctgatgctaagagccccaagactgggggaagggcccccccaggtggtgctgaggctggggaacctaccacccttcttcagaggctccgaggtaccatttccaaggccgtgcagaacaaagtagaggggatcctgcaagatgtacagaaattttctgacaatgacaagctgtatctctaccttcagctcccctcaggacccaccactggagacaaaagctcagagccaagtacactgagcaatgaggagtacatgtatgcctataggtggatccgcaaccacctggaagagcacactgacacctgtctgccaaagcaaagtgtttatgatgcctatcggaagtactgtgagagtcttgcctgttgccgcccactcagcacagccaactttggcaagatcatcagagagatcttccctgacatcaaagctcgaaggcttggtggccggggccagtccaaatattgctacagtggcataaggaggaagaccttggtgtctatgccacccctgcctggacttgacctaaagggttctgagagtccagaaatgggcccagaagtaaccccagcacctcgagatgaactggtggaggcagcgtgtgccctgacctgtgactgggcagagcggatcctgaaacggtccttcagttccatcgttgaggtcgcccgcttcctgctacagcagcatctcatctctgcccgatctgcacatgcccatgtgcttaaggccatggggcttgctgaagaggacgaacatgcacctcgggaacggtcatctaaaccaaagaatggtttagagaacccagagggtggagcccacaagaagccagagagactggcccagcctcctaaggatctggaagcccgaactggggccggtcctctcgcacgtggagagcggaagaagagtgtagttgagagctcggccccaggagccaataacctgcaggttaatgccctagtggctcggctgcctctgctccttccccgggcccctcgctcactaattccgccaatcccagtctctccacctattctggcccccaggctttcttcaggtgccctgaaagtggctacactgcctctgtctagtagggccggggcacccccagcagctgtgcccatcattaacatgatcttaccaactgttcctgctttgcctggacctggacctgggcctgggcgagctccacctgggggactcactcagccccggggcacagagaacagagaggtaggcataggtggtgaccaaggaccacatgacaagggtgtcaagaggacagctgaagtacctgtgagtgaggccagtgggcaggctccaccagctaaagcagcaaagcaggatatagaggatacagcaagtgatgccaaaaggaaacgggggcgccctcgaaaaaagtcaggtggaagtggggaaaggaattctacccctctcaagtcagcagctgccatggaatctgcccagtcctcaaggttaccatgggagacatggggctcaggaggggaaggcaactcagctggaggggcagagaggccagggccaatgggagaggctgaaaagggggcagtacttgcccagggtcagggagatggtactgtttccaaaggaggaaggggccccggttcccagcataccaaagaagcagaagataaaattcccttggtcccctcaaaagtgagtgtcatcaagggcagcagaagccaaaaggaggcttttcctttggcaaagggagaggtagacactgcaccacagggtaataaagacttaaaggagcatgtgcttcaaagttccttatcccaggagcataaagacccaaaagcaacacccccatgatacaggtctgtggggaagagtgtttatatccctacgttaactttgcctagtagaggcccttctttgcacttgcttctcatttggctattcttttcctaaggaagtccattctcctctgtacagacagctgagtcacccagtctactagtacctggttgctgcctctgaccttttcagattgataccctgggcctttagtgtaaccaataaatctgtagtgaccttacctgtattccctgtgctatcctgtgggaaggtaggaatgggctaagtatgatgaatgtataggttagggatcttttggttttaaatcacagaaaacctaattcaaactggcttaaaataaaaaggatttattggttcatgtaactagaaagtccataggtagtgctggctccaggtgaagacttgacccagtagttcagtatgtctctaaataccggactgacttttttctcactgttgcatcttctgtaggaccatttaagtctgggccacttaatggctgccagcattcctaagattacacttttccccatttatgtccaatcagaaaaagaaggcatctttgtaccagaaatctcagcaaaagccctaatattcacactgattaggcctgggtcacatgtccaccctgaccaatcactgtggccaggaggatgatacatgctaatttgcttattctatatcatggacaacacctttggggaaaagggtgggggtcagcctccccaaaatcacatggattccccaagtggaaactaggagcagggagttgcttgggtggccgctaacaccaggctactcttattttagcttgctaagttgagatcagctagacctgctttcttttctcctcagtcttgcatttccctcaatacaagctgcagcctctttcctcgtttctagtctcagaaggaaggagagggaagccattctcctctagggactcttcagtctcatttagatgatagtccctttttttctacctccatattagagatggagctccttccttttcctgtttcttaatttttgtcttctcattcctgcttccctctcaccctattgccagttccaccaactagagtgaaagacttcctagccatttcattaaatctattctgtatccaccaggtggcagcatcttgtcatacgtgtcaggacttaggactgcggggtttaggttagatgtcacggaaaaagctagttctgtggtcaggcggcaccaatgagaaaggaatgcagaccctccagatgtatccttgggaaaagcagtaaaccaactaatatttattgaagacctactttgtcctctacatagggtagcttctgtcagggaatcttggttcttcccaagaaacactgattttctttcagggagacttcatgtgttcatttatttccaccacagcagattttaagaaattataatatgtaatatttgatatctataaagagtatatctaacgtgaataaattatgaagcatactaatgagtacctatgacccataacacatatacattaaaacattttaaataccaaaaaaaaaaaaaaaaa

SEQ ID NO: 29081 - DNA, 3239 bp, Homo Sapiens
gggaggaggcagtgggagggcggagggcgggggccttcggggtgggcgcccagggtagggcaggtggccgcggcgtggaggcagggagaatgcgactctccaaaaccctcgtcgacatggacatggccgactacagtgctgcactggacccagcctacaccaccctggaatttgagaatgtgcaggtgttgacgatgggcaatgacacgtccccatcagaaggcaccaacctcaacgcgcccaacagcctgggtgtcagcgccctgtgtgccatctgcggggaccgggccacgggcaaacactacggtgcctcgagctgtgacggctgcaagggcttcttccggaggagcgtgcggaagaaccacatgtactcctgcagatttagccggcagtgcgtggtggacaaagacaagaggaaccagtgccgctactgcaggctcaagaaatgcttccgggctggcatgaagaaggaagccgtccagaatgagcgggaccggatcagcactcgaaggtcaagctatgaggacagcagcctgccctccatcaatgcgctcctgcaggcggaggtcctgtcccgacagatcacctcccccgtctccgggatcaacggcgacattcgggcgaagaagattgccagcatcgcagatgtgtgtgagtccatgaaggagcagctgctggttctcgttgagtgggccaagtacatcccagctttctgcgagctccccctggacgaccaggtggccctgctcagagcccatgctggcgagcacctgctgctcggagccaccaagagatccatggtgttcaaggacgtgctgctcctaggcaatgactacattgtccctcggcactgcccggagctggcggagatgagccgggtgtccatacgcatccttgacgagctggtgctgcccttccaggagctgcagatcgatgacaatgagtatgcctacctcaaagccatcatcttctttgacccagatgccaaggggctgagcgatccagggaagatcaagcggctgcgttcccaggtgcaggtgagcttggaggactacatcaacgaccgccagtatgactcgcgtggccgctttggagagctgctgctgctgctgcccaccttgcagagcatcacctggcagatgatcgagcagatccagttcatcaagctcttcggcatggccaagattgacaacctgttgcaggagatgctgctgggagggtcccccagcgatgcaccccatgcccaccaccccctgcaccctcacctgatgcaggaacatatgggaaccaacgtcatcgttgccaacacaatgcccactcacctcagcaacggacagatgtgtgagtggccccgacccaggggacaggcagccacccctgagaccccacagccctcaccgccaggtggctcagggtctgagccctataagctcctgccgggagccgtcgccacaatcgtcaagcccctctctgccatcccccagccgaccatcaccaagcaggaagttatctagcaagccgctggggcttgggggctccactggctccccccagccccctaagagagcacctggtgatcacgtggtcacggcaaaggaagacgtgatgccaggaccagtcccagagcaggaatgggaaggatgaagggcccgagaacatggcctaagggccacatcccactgccacccttgacgccctgctctggataacaagactttgacttggggagacctctactgccttggacaacttttctcatgttgaagccactgccttcaccttcaccttcatccatgtccaacccccgacttcatcccaaaggacagccgcctggagatgacttgaggccttacttaaacccagctcccttcttccctagcctggtgcttctcctctcctagcccctgtcatggtgtccagacagagccctgtgaggctgggtccaattgtggcacttggggcaccttgctcctccttctgctgctgcccccacctctgctgcctccctctgctgtcaccttgctcagccatcccgtcttctccaacaccacctctccagaggccaaggaggccttggaaacgattcccccagtcattctgggaacatgttgtaagcactgactgggaccaggcaccaggcagggtctagaaggctgtggtgagggaagacgcctttctcctccaacccaacctcatcctccttcttcagggacttgggtgggtacttgggtgaggatccctgaaggccttcaacccgagaaaacaaacccaggttggcgactgcaacaggaacttggagtggagaggaaaagcatcagaaagaggcagaccatccaccaggcctttgagaaagggtagaattctggctggtagagcaggtgagatgggacattccaaagaacagcctgagccaaggcctagtggtagtaagaatctagcaagaattgaggaagaatggtgtgggagagggatgatgaagagagagagggcctgctggagagcatagggtctggaacaccaggctgaggtcctgatcagcttcaaggagtatgcagggagctgggcttccagaaaatgaacacagcagttctgcagaggacgggaggctggaagctgggaggtcaggtggggtggatgatataatgcgggtgagagtaatgaggcttggggctggagaggacaagatgggtaaaccctcacatcagagtgacatccaggaggaataagctcccagggcctgtctcaagctcttccttactcccaggcactgtcttaaggcatctgacatgcatcatctcatttaatcctcccttcctccctattaacctagagattgtttttgttttttattctcctcctccctccccgccctcacccgccccactccctcctaacctagagattgttacagaagctgaaattgcgttctaagaggtgaagtgattttttttctgaaactcacacaactaggaagtggctgagtcaggacttgaacccaggtctccctggatcagaacaggagctcttaactacagtggctgaatagcttctccaaaggctccctgtgttctcaccgtgatcaagttgaggggcttccggctcccttctacagcctcagaaaccagactcgttcttctgggaaccctgcccactcccaggaccaagattggcctgaggctgcactaaaattcacttagggtcgagcatcctgtttgctgataaatattaaggagaattca

SEQ ID NO: 29082 - DNA, 4222 bp, Homo Sapiens
gaaagagagcgatagagtgcgagagcgagtgcccggagcatcctggccctgagacagctgggccagccccgcagggctctgcagcatgtgggagctccgctccatagccttctccagggctgtgttcgcagagttcctggccacactcctcttcgtcttctttggcctcggctctgccctcaactggccacaggccctgccctctgtgctacagattgccatggcgtttggcttgggtattggcaccctggtacaggctctgggccacataagcggggcccacatcaaccctgccgtgactgtggcctgcctggtgggctgccacgtctccgttctccgagccgccttctacgtggctgcccagctgctgggggctgtggccggagccgctctgctccatgagatcacgccagcagacatccgcggggacctggctgtcaatgctctcagcaacagcacgacggctggccaggcggtgactgtggagctcttcctgacactgcagctggtgctctgcatcttcgcctccaccgatgagcgccgcggagagaacccgggcacccctgctctctccataggcttctctgtggccctgggccacctccttgggatccattacaccggctgctctatgaatcctgcccgctccctggctccagctgtcgtcactggcaaatttgatgaccactgggtcttctggatcggacccctggtgggcgccatcctgggctccctcctctacaactacgtgctgtttccgccagccaagagcctgtcggagcgcctggcagtgctgaagggcctggagccggacaccgattgggaggagcgcgaggtgcgacggcggcagtcggtggagctgcactcgccgcagagcctgccacggggtaccaaggcctgagggccgccagcggcctctacggccccgacggacgcttgtgaggcccgaggcagaagggcccaccccgtccctcctctcccgcaggtctgaagttggccccccagcgcagagtagctgcttcctggacgtgcgcgcccaggccagtgctgtgagcaggcggggaggaggctgccggagggagccctgagcctggcaggtcccctgccctgaggctgtgagcagctagtggtggcttctccagcctttttcagggaactgggaacttaggggactgagctggggagggaggcaggtgggtggtaagagggaaactctggagagcctgcacccaggtactgagtggggagtgtacagacccctgccttgggggttccgggaatgatgcaactggttttactagtgtgcaagtgtgttcatccccaagttctcttttgtcctcacatgcagagttgtgcatgcccctgagtgtgaacaggtttgcctacgttggtgcaagtgtgcatggctggggacttctcacttccccttgcaccccttcctccccaacctgcaataaatccgcttctcctgcagtggatgagtgtgggtgccagtcctcctcaggagaaggggaagggaaggaggccactttgagagggctgaagggagggccttgatttccagccgcaatctggctcctcctggaaaatttcccccacctgcagcgctgggccccaaggcttgccaagactcattgctggaggtagagaggtgtcaaccagagaacagctcccctagacatggcctctggaaaaaggaaatctttggtggccaaagatttcctttctgtggtgagggagaacctctccaaagaggaagcaggcatatgagtgcgcacgccttcacgtgtgtgtatgctgtgtgtgcccgggacccccgtctccaggggtgccccagacccagagattagcctcccacttcggcgcagaaaacaaaagccctttgtgggacccgggcctttgtcttgggtgaggggagatttgcacctagacacttcttgaaaggagacactcagtttcacaagtgagccctcttgcccagcacacacctatggctggctgggcaaggcgctcaggcatgcaaccatgggcaccaggcaatacccatccatcacccatctcactctccccagtcctcaggcagcagcttttccaccccaggaatctctgttccttctctgtctgcctctccacagcccgtgatcccctgcttctggctcctaccactggacagtcattgtggatagagcagcctgctgctctcaggaccagagaagggaaatgacttctccaggcagaggcagatctgagtctagaacccaggcttctaaatttctaggccagtactactgctctcaaaagagattaactgggattaagtgagatgacgcatgtaaagatgctgtgtaaactgtaattcttaataccattatcacgcattactagaatcatttcattatttctgcttcctgggggaaggatgcagaaggagtctgatgctcaacatcccttacctcctttcgctgatggccaaagcaaaggagagtcctgggagcccacaagatccaggcagaaggagatgggtttggggctggccccatcctggcccagcctcttaacctcttcttaccctgaatgtgtgccctatcttttctcccacctccttcctcctaccacccagccctatccattctctccttccctctccagcctgctgtataagtaacatgtgggtcataccttgaacccccctccgcccccatgctctctgtggcctccatgccttcaagacttctgtctgtatctatctcacactgcaccaagcacccactgtgcaccaggcactaagtctctagcctctttctcccttctgctcccatccaagaaagacagtgtataaggaacatctctgtaattgtgtcccctctcatctatgctctttcctgtcttccttgaccaaagctctctttgaggtccaaaaaaggctgccctgggccatatgtgctatggagaggactctcccaaacccccaatagctagtgacagccacttggcctcactaccagaagaagggtggagtcagaaaccaaagtgacctccagagctgtcctcctggcacctgagtgtccttgctctagaggttcaaaggcagcaaggcagtgagctatgagcccagcatggatgtgtctcaggcacctcatccccaccccacctcaccccaacaaactcctctagaagaagccaagaatttctctctatgtctgtttcactttttggattgcatctccccaaaaactaaatgtgaaatccctaccatttctagcctctattgcccagattggagtcagaggtcaaaaaaggattccaagtgatggaactccaggggtggagggaaattggcagttcctggcatctcttgtgtaccagctgctgtgctgggtgccttgcatgcacgggcttatctgatcttcctcaaacttcagataggttagggaaggacaaaggcccccagccatgaagggttttgctatttccaaagcttccccttatcgtcccctgtgattatctcccaaccccgtgacaaaggtagagcaaatattgttcttcccattttacagattcagaaaccaaggctaagggactggtctaaagtctcacaggtagtatatggtggagccaacacttgaactcagacctttttacacaaaatcccatgatttttccactgagacaaatcctaggctcctgggaggccctggcagaagccagaacacatggctgggcctttccagcccaacccactgtcttgcagtggacggagagccttggcgagggcagcagggtagagaggacaaagaatgtggggctggtttctgccctttaagagcacccggtcagtcagagaacagagatcacacacaccaaaccagacagaggcagggcagcatggagacaggtagacagacctccaggtccctaagctggggacagagaaggttctgagctgtcccatactcccactttgtgccaaatgactttgcacctgcaaatggtgcttcaatgtcgttttgtatctttaagctgtgatgttgtatatatacaatgcctcccagctagactgtaagccctttggggacaagggctgcttccagttcttggatggcgttctcctatctaccttccttcaactgctctgcatataataagcactcaataaatgctcatttgccaataaaaaaaaaaaaaaaaaaaaaaaaaaaaaaaaaaaaaaaaaaaaaaaaaa

SEQ ID NO: 29083 - DNA, 3285 bp, Homo Sapiens
caccttctgcactgctcatctgggcagaggaagcttcagaaagctgccaaggcaccatctccaggaactcccagcacgcagaatccatctgagaatatgctgccacaaataccctttttgctgctagtatccttgaacttggttcatggagtgttttacgctgaacgataccaaatgcccacaggcataaaaggcccactacccaacaccaagacacagttcttcattccctacaccataaagagtaaaggtatagcagtaagaggagagcaaggtactcctggtccaccaggccctgctggacctcgagggcacccaggtccttctggaccaccaggaaaaccaggctacggaagtcctggactccaaggagagccagggttgccaggaccaccgggaccatcagctgtagggaaaccaggtgtgccaggactcccaggaaaaccaggagagagaggaccatatggaccaaaaggagatgttggaccagctggcctaccaggaccccggggcccaccaggaccacctggaatccctggaccggctggaatttctgtgccaggaaaacctggacaacagggacccacaggagccccaggacccaggggctttcctggagaaaagggtgcaccaggagtccctggtatgaatggacagaaaggggaaatgggatatggtgctcctggtcgtccaggtgagaggggtcttccaggccctcagggtcccacaggaccatctggccctcctggagtgggaaaaagaggtgaaaatggggttccaggacagccaggcatcaaaggtgatagaggttttccgggagaaatgggaccaattggcccaccaggtccccaaggccctcctggggaacgagggccagaaggcattggaaagccaggagctgctggagccccaggccagccagggattccaggaacaaaaggtctccctggggctccaggaatagctgggcccccagggcctcctggctttgggaaaccaggcttgccaggcctgaagggagaaagaggacctgctggccttcctgggggtccaggtgccaaaggggaacaagggccagcaggtcttcctgggaagccaggtctgactggaccccctgggaatatgggaccccaaggaccaaaaggcatcccgggtagccatggtctcccaggccctaaaggtgagacagggccagctgggcctgcaggataccctggggctaagggtgaaaggggttcccctgggtcagatggaaaaccagggtacccaggaaaaccaggtctcgatggtcctaagggtaacccagggttaccaggtccaaaaggtgatcctggagttggaggacctcctggtctcccaggccctgtgggcccagcaggagcaaagggaatgcccggacacaatggagaggctggcccaagaggtgcccctggaataccaggtactagaggccctattgggccaccaggcattccaggattccctgggtctaaaggggatccaggaagtcccggtcctcctggcccagctggcatagcaactaagggcctcaatggacccaccgggccaccagggcctccaggtccaagaggccactctggagagcctggtcttccagggccccctgggcctccaggcccaccaggtcaagcagtcatgcctgagggttttataaaggcaggccaaaggcccagtctttctgggacccctcttgttagtgccaaccagggggtaacaggaatgcctgtgtctgcttttactgttattctctccaaagcttacccagcaataggaactcccataccatttgataaaattttgtataacaggcaacagcattatgacccaaggactggaatctttacttgtcagataccaggaatatactatttttcataccacgtgcatgtgaaagggactcatgtttgggtaggcctgtataagaatggcacccctgtaatgtacacctatgatgaatacaccaaaggctacctggatcaggcttcagggagtgccatcatcgatctcacagaaaatgaccaggtgtggctccagcttcccaatgccgagtcaaatggcctatactcctctgagtatgtccactcctctttctcaggattcctagtggctccaatgtgagtacaccccacagagctaatctaaatcttgtgctagaaaaagcattctctaactctaccccaccctacaaaatgcatatggaggtaggctgaaaagaatgtaatttttattttctgaaatacagatttgagctatcagaccaacaaaccttccccctgaaaagtgagcagcaacgtaaaaacgtatgtgaagcctctcttgaatttctagttagcaatcttaaggctctttaaggttttctccaatattaaaaaatatcaccaaagaagtcctgctatgttaaaaacaaacaacaaaaaacaaagcaacaaaaaaaaaaattaaaaaaaaaaacagaaatagagctctaagttatgtgaaatttgatttgagaaactcggcatttcctttttaaaaaagcctgtttctaactatgaatatgagaacttctaggaaacatccaggaggtatcatataactttgtagaacttaaatacttgaatattcaaatttaaaagacactgtatcccctaaaatatttctgatggtgcactactctgaggcctgtatggcccctttcatcaatatctattcaaatatacaggtgcatatatacttgttaaagctcttatataaaaaagccccaaaatattgaagttcatctgaaatgcaaggtgctttcatcaatgaaccttttcaaaacttttctatgattgcagagaagctttttatatacccagcataacttggaaacaggtatctgacctattcttatttagttaacacaagtgtgattaatttgatttctttaattccttattgaatcttatgtgatatgattttctggatttacagaacattagcacatgtaccttgtgcctcccattcaagtgaagttataatttacactgagggtttcaaaattcgactagaagtggagatatattatttatttatgcactgtactgtatttttatattgctgtttaaaacttttaagctgtgcctcacttattaaagcacaaaatgttttacctactccttatttacgacacaataaaataacatcaatagatttttaggctgaattaatttgaaagcagcaatttgctgttctcaaccattctttcaaggcttttcattcgacacaataaaataacatcaatag

SEQ ID NO: 29084 - DNA, 5610 bp, Homo Sapiens
aacatttttgaaagatcactcagctttaacacaccttggctgggtctggataaaaaaaaagtgagcactgcaaatttctagaagaaaacatcaggagaagaaagagagagggggatttattcaaagttgtttccaattccttcaaaacctcaaaccaggtggctatggtatggatgtaaccaagaaaaacaaacgagatggaactgaagtcactgagagaattgtcactgaaacagtaaccacaagacttacatccttaccaccaaaaggcgggaccagcaatggctatgctaaaacagcctctcttggtggagggagccggctggagaaacaaagcctgactcatggcagcagcggctacataaactcaactggaagcacacgaggccatgcctccacctctagttacaggagggctcactcacctgcctccactctgcccaactccccaggctcaacctttgaaaggaaaactcacgttacccgccatgcgtatgaagggagctccagtggcaactcttctccggagtaccctcggaaggaatttgcatcttcttcaaccagaggacggagtcaaacacgagagagtgaaattcgagttcgactgcagagtgcgtccccatccacccgatggacagaattggatgatgttaagcgtttgctcaaggggagtcgatcggcaagtgtgagccccacccggaattcctccaacacactccccatccccaagaaaggcactgtggagaccaaaattgtgacagcgagctcccagtcggtgtcaggcacctacgatgcaacgatcctggatgccaaccttccctcccatgtgtggtcctccaccctgcccgcggggtcctccatggggacctatcacaacaacatgacaacccagagctcatccctcctcaacaccaatgcctactctgcgggatcagtcttcggagttccaaacaacatggcgtcctgctcacccactttgcaccctggactcagcacatcctcctcagtgtttggcatgcagaacaatctggcccccagcttgaccaccctgtcccatggcaccaccaccacttccacagcatatggggtgaagaaaaacatgccccagagtcctgcggctgtgaacactggcgtttccacctccgccgcctgcaccacaagtgtgcagagcgatgaccttttgcacaaggactgcaagttcctgatcctagagaaagacaacacacctgctaagaaggagatggagctgctcatcatgaccaaggacagcgggaaggtctttacagcctcccctgccagcatcgctgcaacttctttttcagaagacaccctaaaaaaagaaaagcaagctgcctacaatgctgactcaggcctaaaagccgaagctaatggagacctgaagactgtgtccacaaagggcaagaccaccactgcagatatccacagctacagcagcagtggtggtggtggcagtggaggaggtggcggtgttggtggcgctggcggcggcccttggggaccagcgccagcctggtgcccctgcggctcctgctgcagctggtggaagtggctgctgggcctgctgctcacctggctgctactcctggggctgctcttcggcctcattgctctggcggaggaggtgaggaagctgaaggcgcgtgtggatgagctggagaggatcaggaggagcatactgccctatggggacagcatggatagaatagaaaaggaccgcctccagggcatggcacccgcggcgggagcagacctggacaaaattgggctgcacagtgacagccaggaggagctctggatgttcgtgaggaagaagctaatgatggaacaggaaaatggaaatctccgaggaagccctggccctaaaggtgacatgggaagtccaggccctaaaggagatcgagggttccctgggactccaggtatccctgggcccttgggccacccaggtccacaaggaccaaagggtcaaaaaggcagcgtgggagatcctggcatggaaggccccatgggccagagagggcgagaaggccccatgggacctcgtggtgaggcagggcctcctggatctggagagaaaggggaaagaggggctgctggtgaaccaggtcctcatggcccacctggtgtcccaggttctgtgggtcccaaaggttccagcggctctcctggcccacagggccctccaggtcctgtaggtctccaagggctccgaggtgaagtaggacttcctggtgtcaaaggtgacaaaggaccaatgggaccaccaggacccaaaggtgaccagggtgagaaaggacctcgaggcctcacaggcgagcctggcatgagaggtttgcctggtgctgttggtgagcccggggctaaaggagcaatgggtcctgctggcccagacggacaccaaggcccaagaggtgaacaaggtcttactgggatgcctggaatccgtggcccaccaggaccttctggagacccaggaaagccaggtctcacaggaccccagggacctcagggacttcccggtacccctggccgaccaggaataaaaggtgaaccaggagctccaggcaagatcgtgacttcggaggggtcatcgatgctcactgtcccaggccccccaggacctcctggagccatgggacccccaggacctccaggtgccccaggccctgccggcccagctggtctcccaggacatcaagaagttcttaatttacaaggtcccccaggcccacccggcccacgtgggccaccagggccttccattccaggcccaccaggaccccgaggcccaccaggggagggtttgccaggcccaccaggcccaccaggatcgttcctgtccaactcagaaaccttcctcttcggccccccaggcccacctggccccccaggtcccaagggagaccaaggtcccccaggccccagaggacaccaaggcgagcaaggcctcccaggtttctcaacctcagggtccagttctttcggactcaaccttcagggaccaccaggcccacctggcccccagggaccaaaaggtgacaaaggtgatccgggtgttccaggggctcttggcattcctagtggtccttctgaagggggatcatcaagtaccatgtacgtgtcaggcccgccagggccccctgggccccctgggcctccgggctctatcagcagctctggccaggagattcagcagtacatctctgagtacatgcagagtgacagtattagatcttacctatccggagttcagggtcccccaggcccacctggtcccccaggacctgtcaccaccatcacaggcgagactttcgactactcagagctggcaagccacgttgtgagctacttacggacttcggggtacggtgtcagcttgttctcgtcctccatctcttctgaagacatcctggctgtgctgcagcgggatgacgtgcgtcagtacctacgtcagtacttgatgggccctcggggtccgccagggccaccaggagccagtggagatgggtccctcctgtctttggactatgcagagctgagtagtcgcattctcagctacatgtcgagttctgggatcagcattgggcttcctggtcccccggggccccctggcttgccgggaacctcctatgaggagctcctctccttgctgcgagggtctgaattcagaggcatcgttggacccccaggtcccccgggtccaccagggatcccaggcaatgtgtggtccagcatcagcgtggaggacctctcgtcttacttacatactgccggcttgtcattcatcccaggccctccaggacctcctggtcccccagggcctcgagggcccccgggtgtctcaggagccctggcaacctatgcagctgaaaacagcgacagcttccggagcgagctgatcagctacctcacaagtcctgatgtgcgcagcttcattgttggccccccaggccctcctgggccgcagggaccccctggggacagccgcctcctgtccacggatgcctcccacagtcggggtagcagctcctcctcacacagctcatctgtcaggcggggcagctcctacagctcttccatgagcacaggaggaggtggtgcaggctccctgggtgcaggcggtgcctttggtgaagctgcaggagacaggggtccctatggcactgacatcggcccaggcggaggctatggggcagcagcagaaggcggcatgtatgctggcaatggcggactattgggagctgactttgctggagatctggattacaatgagctggctgtgagggtgtcagagagcatgcagcgtcagggcctactgcaagggatggcctacactgtccagggcccaccaggccagcctgggccacaggggccacccggcatcagcaaggtcttctctgcctacagcaacgtgactgcggacctcatggacttcttccaaacttatggagccattcaaggaccccctgggcaaaaaggagagatgggcactccaggacccaaaggtgacaggggccctgctgggccaccaggtcatcctgggccacctggccctcgaggacacaagggagaaaaaggagacaaaggtgaccaagtctatgctgggcggagaaggagaagaagtattgctgtcaagccgtgagctagccatggcaggacagctcctggaccaggtctcataatgcatgtggcacttaggtccaaggtctccagagggtgaaagctggagtctgtcaatgtcctactgagacagcacagccaacctagctagcaacatttgttttagtctgaacaatatatacttatagaattcagtcaaagatacacaatctgaaacagcttcatggggtggactctaacagtagttgcaatgttttagaatgagacttacttctctgctatctagatctgaactccttggcttctttacttagttcaagccccagcctaggaaagccagttacataaaagttggctcaggagtcttagagctttacctaaatatgagcccagaaaacggaggatgggggtggggcgccttcctggaggtgacacttgatgggggtgtgttctggttactgttctaaggctgtgccatcagctccttcctcccctgttcattctgcattctctagtcagttggctaagaagtgactcttgcaactaaaaaaattaagaaattcacttcccctctaggaggtgatgatagggtttctaatggttatatgtatatcacattcccatttgcttagaaagtctgattgtagctatgattgtccgtaggcccatactagagttcatggatatgttatactgaaccaggccagagcaaacagaaaaagaaggttgagggcaatggacaaggaaggaataaagggagaagagggaaaacagaaaacctgatgctggggacacagcatcagctcaagacgtcaccctccattctgcactcagaaaatggcacttgggggactgggcgcagttggtctttaaccacttttcaatgtctaaaaacatttgtttgtggtctataagatgaaacatcatttcaatcgtaaaatttcccattaaagaagtttttttttctaa

SEQ ID NO: 29085 - DNA, 2485 bp, Homo Sapiens
atgacagcctccgtgctcctccacccccgctggatcgagcccaccgtcatgtttctctacgacaacggcggcggcctggtggccgacgagctcaacaagaacatggaaggggcggcggcggctgcagcagcggctgcagcggcggcggctgccggggccgggggcgggggcttcccccacccggcggctgcggcggcagggggcaacttctcggtggcggcggcggccgcggctgcggcggcggccgcggccaaccagtgccgcaacctgatggcgcacccggcgcccttggcgccaggagccgcgtccgcctacagcagcgcccccggggaggcgcccccgtcggctgccgccgctgctgccgcggctgccgctgcagccgccgccgccgccgccgcgtcgtcctcgggaggtcccggcccggcgggcccggcgggcgcagaggccgccaagcaatgcagcccctgctcggcagcggcgcagagctcgtcggggcccgcggcgctgccctatggctacttcggcagcggctactacccgtgcgcccgcatgggcccgcaccccaacgccatcaagtcgtgcgcgcagcccgcctcggccgccgccgccgccgccttcgcggacaagtacatggataccgccggcccagctgccgaggagttcagctcccgcgctaaggagttcgccttctaccaccagggctacgcagccgggccttaccaccaccatcagcccatgcctggctacctggatatgccagtggtgccgggcctcgggggccccggcgagtcgcgccacgaacccttgggtcttcccatggaaagctaccagccctgggcgctgcccaacggctggaacggccaaatgtactgccccaaagagcaggcgcagcctccccacctctggaagtccactctgcccgacgtggtctcccatccctcggatgccagctcctataggagggggagaaagaagcgcgtgccttataccaaggtgcaattaaaagaacttgaacgggaatacgccacgaataaattcattactaaggacaaacggaggcggatatcagccacgacgaatctctctgagcggcaggtcacaatctggttccagaacaggagggttaaagagaaaaaagtcatcaacaaactgaaaaccactagttaatggattaaaaatagagcaagaaggcaacttgaagaaacgcttcagaactcgttgctttgcccagataatgataataatgcttaataataattgaagaatgggaaagagaaagagacagagactggcattttcctctcccgaaggagatctctttctctttaatggaatctacaactgttttaaaactttaagaaaggtaaagactgccagttcttccgccaaccccatcagcccagcccgttaaatgtcaaacgtcaacccccaaaatacgcaatttcagataagttacgcagttactgaaatcttgtaagtatttaagtgatcgttacattttaggacactgcgttagatggtaataatctggaagttggttacaaacgcaagaggccattgtaaacatctgcttgtccttcttaggtcgccattccctttgcatgttaagcgtctgctcaggtaaatcttagtgaaattcctaccgttgttgtacgttctgcaaaacattttatgtatagatttagaggggaaacgagaaggtactgaaataatgatcttggaatatttgctgtgaagggagaaagggagagaaaactcttctgaggatcatttgtcttggtagtatagtaaaaccaaccagctgaacctttcaggctacaagagaacccgggtcggtaatgtctttttaagaataatttttaattgcttataacaagcatattttgtggcatttgaactatatttactgctccaatatccgttattttccaaaggattttgtatctttttgaaaatgtttacatcatcagatgatccacagaattcactttatgtgagatctcccgagagtttccatcccaacataatggactttggtttgaacacaattcgttttttcatttgaattggcatttcccaatatttgctaaacatttgctggagaaatcatttttcttttttcttttttagaaaactcagaatgaaaattcattcccctgaaatatttaggtgtctatattctatattttgatctattaagggattagtatttttccatgtttattgtgttatcagagtgcattagaaagattagtgattcatcttcacagcacatttttaatcaagcagttatttcaaccagcacattcgttttgttcatattcactatagaatgatatcttgtaaataaagacattcagcacactgtgaaaatgtatttgtgcacctgctttttaaatatttctactaaaaatgaaaaaaaaaaacccttagacctgtagatagtgatatcgtaatattaattgttaataaaatagtcactgcc

SEQ ID NO: 29086 - DNA, 3121 bp, Homo Sapiens
ggcacgagtggctgcttgcggctagtggatggtaattgcctgcctcgcgctagcagcaagctgctctgttaaaagcgaaaatgaaacaattgcctgcggcaacagttcgactcctttcaagttctcagatcatcacttcggtggtcagtgttgtaaaagagcttattgaaaactccttggatgctggtgccacaagcgtagatgttaaactggagaactatggatttgataaaattgaggtgcgagataacggggagggtatcaaggctgttgatgcacctgtaatggcaatgaagtactacacctcaaaaataaatagtcatgaagatcttgaaaatttgacaacttacggttttcgtggagaagccttggggtcaatttgttgtatagctgaggttttaattacaacaagaacggctgctgataattttagcacccagtatgttttagatggcagtggccacatactttctcagaaaccttcacatcttggtcaaggtacaactgtaactgctttaagattatttaagaatctacctgtaagaaagcagttttactcaactgcaaaaaaatgtaaagatgaaataaaaaagatccaagatctcctcatgagctttggtatccttaaacctgacttaaggattgtctttgtacataacaaggcagttatttggcagaaaagcagagtatcagatcacaagatggctctcatgtcagttctggggactgctgttatgaacaatatggaatcctttcagtaccactctgaagaatctcagatttatctcagtggatttcttccaaagtgtgatgcagaccactctttcactagtctttcaacaccagaaagaagtttcatcttcataaacagtcgaccagtacatcaaaaagatatcttaaagttaatccgacatcattacaatctgaaatgcctaaaggaatctactcgtttgtatcctgttttctttctgaaaatcgatgttcctacagctgatgttgatgtaaatttaacaccagataaaagccaagtattattacaaaataaggaatctgttttaattgctcttgaaaatctgatgacgacttgttatggaccattacctagtacaaattcttatgaaaataataaaacagatgtttccgcagctgacatcgttcttagtaaaacagcagaaacagatgtgctttttaataaagtggaatcatctggaaagaattattcaaatgttgatacttcagtcattccattccaaaatgatatgcataatgatgaatctggaaaaaacactgatgattgtttaaatcaccagataagtattggtgactttggttatggtcattgtagtagtgaaatttctaacattgataaaaacactaagaatgcatttcaggacatttcaatgagtaatgtatcatgggagaactctcagacggaatatagtaaaacttgttttataagttccgttaagcacacccagtcagaaaatggcaataaagaccatatagatgagagtggggaaaatgaggaagaagcaggtcttgaaaactcttcggaaatttctgcagatgagtggagcaggggaaatatacttaaaaattcagtgggagagaatattgaacctgtgaaaattttagtgcctgaaaaaagtttaccatgtaaagtaagtaataataattatccaatccctgaacaaatgaatcttaatgaagattcatgtaacaaaaaatcaaatgtaatagataataaatctggaaaagttacagcttatgatttacttagcaatcgagtaatcaagaaacccatgtcagcaagtgctctttttgttcaagatcatcgtcctcagtttctcatagaaaatcctaagactagtttagaggatgcaacactacaaattgaagaactgtggaagacattgagtgaagaggaaaaactgaaatatgaagagaaggctactaaagacttggaacgatacaatagtcaaatgaagagagccattgaacaggagtcacaaatgtcactaaaagatggcagaaaaaagataaaacccaccagcgcatggaatttggcccagaagcacaagttaaaaacctcattatctaatcaaccaaaacttgatgaactccttcagtcccaaattgaaaaaagaaggagtcaaaatattaaaatggtacagatccccttttctatgaaaaacttaaaaataaattttaagaaacaaaacaaagttgacttagaagagaaggatgaaccttgcttgatccacaatctcaggtttcctgatgcatggctaatgacatccaaaacagaggtaatgttattaaatccatatagagtagaagaagccctgctatttaaaagacttcttgagaatcataaacttcctgcagagccactggaaaagccaattatgttaacagagagtctttttaatggatctcattatttagacgttttatataaaatgacagcagatgaccaaagatacagtggatcaacttacctgtctgatcctcgtcttacagcgaatggtttcaagataaaattgataccaggagtttcaattactgaaaattacttggaaatagaaggaatggctaattgtctcccattctatggagtagcagatttaaaagaaattcttaatgctatattaaacagaaatgcaaaggaagtttatgaatgtagacctcgcaaagtgataagttatttagagggagaagcagtgcgtctatccagacaattacccatgtacttatcaaaagaggacatccaagacattatctacagaatgaagcaccagtttggaaatgaaattaaagagtgtgttcatggtcgcccattttttcatcatttaacctatcttccagaaactacatgagagtgtgttcatggtcgcccattttttcatcatttaacctatcttccagaaactacatgattaaatatgtttaagaagattagttaccattgaaattggttctgtcataaaacagcatgagtctggttttaaattatctttgtattatgtgtcacatggttattttttaaatgaggattcactgacttgtttttatattgaaaaaagttccacgtattgtagaaaacgtaaataaactaata

SEQ ID NO: 29087 - DNA, 3719 bp, Homo Sapiens
ggaccagagccggtagcgaggttgggagagacggagcggacctcagcgctgaagcagaagtccccggagctgcggtctccccgccgcggctgagccatgcggctccctgacctgagaccctggacctccctgctgctggtggacgcggctttactgtggctgcttcagggccctctggggactttgcttcctcaagggctgccaggactatggctggaggggaccctgcggctgggagggctgtgggggctgctaaagctaagagggctgctgggatttgtggggacactgctgctcccgctctgtctggccacccccctgactgtctccctgagagccctggtcgcgggggcctcacgtgctcccccagccagagtcgcttcagccccttggagctggctgctggtggggtacggggctgcggggctcagctggtcactgtgggctgttctgagccctcctggagcccaggagaaggagcaggaccaggtgaacaacaaagtcttgatgtggaggctgctgaagctctccaggccggacctgcctctcctcgttgccgccttcttcttccttgtccttgctgttttgggtgagacattaatccctcactattctggtcgtgtgattgacatcctgggaggtgattttgacccccatgcctttgccagtgccatcttcttcatgtgcctcttctcctttggcagctcactgtctgcaggctgccgaggaggctgcttcacctacaccatgtctcgaatcaacttgcggatccgggagcagcttttctcctccctgctgcgccaggacctcggtttcttccaggagactaagacaggggagctgaactcacggctgagctcggataccaccctgatgagtaactggcttcctttaaatgccaatgtgctcttgcgaagcctggtgaaagtggtggggctgtatggcttcatgctcagcatatcgcctcgactcaccctcctttctctgctgcacatgcccttcacaatagcagcggagaaggtgtacaacacccgccatcaggaagtgcttcgggagatccaggatgcagtggccagggcggggcaggtggtgcgggaagccgttggagggctgcagaccgttcgcagttttggggccgaggagcatgaagtctgtcgctataaagaggcccttgaacaatgtcggcagctgtattggcggagagacctggaacgcgccttgtacctgctcataaggagggtgctgcacttgggggtgcagatgctgatgctgagctgtgggctgcagcagatgcaggatggggagctcacccagggcagcctgctttcctttatgatctaccaggagagcgtggggagctatgtgcagaccctggtatacatatatggggatatgctcagcaacgtgggagctgcagagaaggttttctcctacatggaccgacagccaaatctgccttcacctggcacgcttgcccccaccactctgcagggggttgtgaaattccaagacgtctcctttgcatatcccaatcgccctgacaggcctgtgctcaaggggctgacgtttaccctacgtcctggtgaggtgacggcgctggtgggacccaatgggtctgggaagagcacagtggctgccctgctgcagaatctgtaccagcccacagggggacaggtgctgctggatgaaaagcccatctcacagtatgaacactgctacctgcacagccaggtggtttcagttgggcaggagcctgtgctgttctccggttctgtgaggaacaacattgcttatgggctgcagagctgcgaagatgataaggtgatggcggctgcccaggctgcccacgcagatgacttcatccaggaaatggagcatggaatatacacagatgtaggggagaagggaagccagctggctgcgggacagaaacaacgtctggccattgcccgggcccttgtacgagacccgcgggtcctcatcctggatgaggctactagtgccctagatgtgcagtgcgagcaggccctgcaggactggaattcccgtggggatcgcacagtgctggtgattgctcacaggctgcaggcagttcagcgcgcccaccagatcctggtgctccaggagggcaagctgcagaagcttgcccagctccaggagggacaggacctctattcccgcctggttcagcagcggctgatggactgaggccccagggatactgggccctcttctcaggggcgtctccaggacccagagctgttcctgctttgagtttccctagagctgtgcggccagatagctgttcctgagttgcaagcacgatggagatttggacactgtgtgcttttggtggggtggagaggtggggtggggtggggtgtggtggggtgggaggctgtctgtgtccaggaaacttaattccctggtgactagagctttgcctggtgatgaggagtattttgtggcataatacatatattttaaaatattttccttcttacgtgaactgtatacattcatatagaaaatttagacaatataaaaaagtacaaagaagaaaagtaaaagtacccattgtttcacttcctggagataaccatagttgctattttgctgcctgtcccatcagtcgtttatctgttgtttgagatagaaattaaccaaaaatgacataaatattcatgagattgccttcctatatccttccttgttcctaccagtgtctgctattttgaagaagctagggtctggagggacagagaacagttccctgattaacagtattaatagcgacattggtaacagctaccatttatagagttttaatgggagtaggagctatgctaagtgtttttcatgtattatcgtttttaatcattatccccaaccctatgaggttggttattatccccattttacagatgaggaaactgaagctcaaagaggctcaatgactttcccaaggtggtcgtagtggtggagttggagtttgaacacaggcctgaccctagagtccacaccctgacccaatcaattatattgcatcttgggtccataaaccctaatccataatcccatcaagaaaagctctgctgctcttagctctaaataattcagaatctattctcttctctccagtcccgttgttatagtcttcactcatagacttaagatgatcccatcaccagagaggtttctctaccattagcttccctcttccggccattcttcacaaagtcatttttctaaattctgtgtcacatacgatgatggcatttctggaaattccttcaggtgctctcaagccctgctgcagagatccttttcagagcacacactgttccagcccatctgtctcaccctctcctgttgtatccagctccacgacaaactttctgccttccccaacacctttgtgcctttgcatatggtgttttcttgcccattttctgctcgactcgcccctgattttcaagttcaagacttaactcagggttcaggtcttccaggaggccttacttatgtcgtcagtctggggaactctccatgtgcttctatcactgtgcggttacctctttcacagcccttttaaagttctatcttccctttcccaccttttttgaccttccactagaccatgagcacctgggcggaaagccatatatcttattaagctttatatctgctacctggccgagggctaattcatagtggag

SEQ ID NO: 29088 - DNA, 3249 bp, Homo Sapiens
cgtggccctgtggcagccgagccatggtttctaaactgagccagctgcagacggagctcctggcggccctgctcgagtcagggctgagcaaagaggcactgatccaggcactgggtgagccggggccctacctcctggctggagaaggccccctggacaagggggagtcctgcggcggcggtcgaggggagctggctgagctgcccaatgggctgggggagactcggggctccgaggacgagacggacgacgatggggaagacttcacgccacccatcctcaaagagctggagaacctcagccctgaggaggcggcccaccagaaagccgtggtggagacccttctgcaggaggacccgtggcgtgtggcgaagatggtcaagtcctacctgcagcagcacaacatcccacagcgggaggtggtcgataccactggcctcaaccagtcccacctgtcccaacacctcaacaagggcactcccatgaagacgcagaagcgggccgccctgtacacctggtacgtccgcaagcagcgagaggtggcgcagcagttcacccatgcagggcagggagggctgattgaagagcccacaggtgatgagctaccaaccaagaaggggcggaggaaccgtttcaagtggggcccagcatcccagcagatcctgttccaggcctatgagaggcagaagaaccctagcaaggaggagcgagagacgctagtggaggagtgcaatagggcggaatgcatccagagaggggtgtccccatcacaggcacaggggctgggctccaacctcgtcacggaggtgcgtgtctacaactggtttgccaaccggcgcaaagaagaagccttccggcacaagctggccatggacacgtacagcgggccccccccagggccaggcccgggacctgcgctgcccgctcacagctcccctggcctgcctccacctgccctctcccccagtaaggtccacggtgtgcgctatggacagcctgcgaccagtgagactgcagaagtaccctcaagcagcggcggtcccttagtgacagtgtctacacccctccaccaagtgtcccccacgggcctggagcccagccacagcctgctgagtacagaagccaagctggtctcagcagctgggggccccctcccccctgtcagcaccctgacagcactgcacagcttggagcagacatccccaggcctcaaccagcagccccagaacctcatcatggcctcacttcctggggtcatgaccatcgggcctggtgagcctgcctccctgggtcctacgttcaccaacacaggtgcctccaccctggtcatcggcctggcctccacgcaggcacagagtgtgccggtcatcaacagcatgggcagcagcctgaccaccctgcagcccgtccagttctcccagccgctgcacccctcctaccagcagccgctcatgccacctgtgcagagccatgtgacccagagccccttcatggccaccatggctcagctgcagagcccccacgccctctacagccacaagcccgaggtggcccagtacacccacacgggcctgctcccgcagactatgctcatcaccgacaccaccaacctgagcgccctggccagcctcacgcccaccaagcaggtcttcacctcagacactgaggcctccagtgagtccgggcttcacacgccggcatctcaggccaccaccctccacgtccccagccaggaccctgccggcatccagcacctgcagccggcccaccggctcagcgccagccccacagtgtcctccagcagcctggtgctgtaccagagctcagactccagcaatggccagagccacctgctgccatccaaccacagcgtcatcgagaccttcatctccacccagatggcctcttcctcccagtaaccacggcacctgggccctggggcctgtactgcctgcttggggggtgatgagggcagcagccagccctgcctggaggacctgagcctgccgagcaaccgtggcccttcctggacagctgtgcctcgctccccactctgctctgatgcatcagaaagggagggctctgaggcgccccaacccgtggaggctgctcggggtgcacaggagggggtcgtggagagctaggagcaaagcctgttcatggcagatgtaggagggactgtcgctgcttcgtgggatacagtcttcttacttggaactgaagggggcggcctatgacttgggcacccccagcctgggcctatggagagccctgggaccgctacaccactctggcagccacacttctcaggacacaggcctgtgtagctgtgacctgctgagctctgagaggccctggatcagcgtggccttgttctgtcaccaatgtacccaccgggccactccttcctgccccaactccttccagctagtgacccacatgccatttgtactgaccccatcacctactcacacaggcatttcctgggtggctactctgtgccagagcctggggctctaacgcctgagcccagggaggccgaagctaacagggaaggcaggcagggctctcctggcttcccatccccagcgattccctctcccaggccccatgacctccagctttcctgtatttgttcccaagagcatcatgcctctgaggccagcctggcctcctgcctctactgggaaggctacttcggggctgggaagtcgtccttactcctgtgggagcctcgcaacccgtgccaagtccaggtcctggtggggcagctcctctgtctcgagcgccctgcagaccctgcccttgtttggggcaggagtagctgagctcacaaggcagcaaggcccgagcagctgagcagggccggggaactggccaagctgaggtgcccaggagaagaaagaggtgaccccagggcacaggagctacctgtgtggacaggactaacactcagaagcctgggggcctggctggctgagggcagttcgcagccaccctgaggagtctgaggtcctgagcactgccaggagggacaaaggagcctgtgaacccaggacaagcatggtcccacatccctgggcctgctgctgagaacctggccttcagtgtaccgcgtctaccctgggattcaggaaaaggcctggggtgacccggcaccccctgcagcttgtagccagccggggcgagtggcacgtttatttaacttttagtaaagtcaaggagaaatgcggtggaaaaaaaaaaaaa

SEQ ID NO: 29089 - DNA, 2797 bp, Homo Sapiens
ttcatcagagacatccttcaggattgtgagctggattttcctctacgtgcttcagtcttctctacacaaagagctgcaaaccaggtctttgttttgcactcttatttcaagcagaatgagtgctcctaaactcctctctctgggctgtatcttcttccccttgctactttttcagcaggcccgggctcaattcccaagacagtgtgccactgttgaggctttgagaagtggtatgtgttgcccagacctgtcccctgtgtctgggcctgggacagaccgctgtggctcatcatcagggaggggcagatgtgaggcagtgactgcagactcccggccccacagccctcagtatccccatgatggcagagatgatcgggaggtctggcccttgcgcttcttcaataggacatgtcactgcaacggcaatttctcaggacacaactgtgggacgtgccgtcctggctggagaggagctgcctgtgaccagagggttctcatagtcaggagaaatcttctggacttaagtaaagaagaaaagaaccactttgtccgggccctggatatggcaaagcgcacaactcaccctttatttgtcattgccaccaggagatcagaagaaatactggggccagatggcaacacgccacaatttgagaacatttccatttataactactttgtttggacacactattactcagtcaaaaagactttccttggggtaggacaggaaagctttggtgaagtggatttctctcatgagggaccagcttttctcacatggcacaggtaccacctcctgcgtctggagaaagacatgcaggaaatgttgcaagagccttctttctcccttccttactggaattttgcaacggggaaaaatgtctgtgatatctgcacggatgacttgatgggatccagaagcaactttgattccactctaataagcccaaactctgtcttttctcaatggcgagtggtctgtgactccttggaagattatgataccctgggaacactttgtaacagcaccgaggatgggccaattaggagaaatccagctggaaatgtggccagaccaatggtgcaacgtcttcctgaaccacaggatgtcgctcagtgcttggaagttggtttatttgacacgcctcctttttattccaactctacaaacagtttccgaaacacagtggaaggttacagtgaccccacgggaaagtatgaccctgctgttcgaagtcttcacaatttggctcatctattcctgaatggaacagggggacaaacccatttgtctccaaatgatcctatttttgtcctcctgcacaccttcacagatgcagtctttgatgaatggctgaggagatacaatgctgatatatccacatttccattggaaaatgcccctattggacataatagacaatacaacatggtgccattctggcccccagtcaccaacacagaaatgtttgttactgctccagacaacctgggatacacttatgaaattcaatggccaagtcgggagtttagtgtacctgagataattgccatagcagtagttggcgctttgttactggttgcactcatttttgggactgcttcttatctgattcgtgccagacgcagtatggatgaagctaaccagcctctcctcactgatcagtatcaatgctatgctgaagaatatgaaaaactccagaatcctaatcagtctgtggtctaacaaatgccctactctcttatgcattagtatcacaaaaccacctggttgaatataatagattgagttattaactgtattttctttcactttattaccttctttctaatacaagcatatgttagaattaaagttctaggcatacttttcaaagctgggaagaccctttcagaatcttttcaatgggttttaattttcagttctatttaaaatggtgaatgacactaaactccatgatatttaaggatagtgtgaagatctttggcatgatttaaaggttgagtatgtgaagatataagtgaactaccatgctttgtttacgtgtaaaggaaaataatgtttgatagtaaatgtccacttaaaatacatgaatgggcatttctaaaatgttaaaacataaactcatttccattcatggatatttgtcaacagatttaaagaaaaccacagttattaattaaagaaaattatgtgtagttataaaccaatgaaattttgattaaccttttcaaattaatgttccagtttgaagaccaatcaaatatattatttagtcaacatatactatttagtctcaggttcaaggctacaacaaaaatcaccatctttgtcaaactttggagagggaaaatcttcactttcttaagcaacaatggatattgcctgtgtttgccactgtgtttccctgcctctcaattcgctgaaaaaggaactacctatccttacatttcacctactaatgtctcttctaacatcttagaggtccatggagaaggcatatggagaacatgttttatactgctctataaatagtattccaatcactgtgcttaatttaaatagcattctcttatcatttatcagccttttatgtattttccaagtaaaatattaacatattacttcattggtcttcttttttatctggttctatatgaatgctattttttcccttctcttctaacatgaaatatattttctctttttgatcttgtgctatgaaacaatcttccaaagaactgtataaggtggtcataagtgaatattttaattaaaattggtaaaaataaa
